United States Patent Application Publication US 2024/0066114 A1 - sequence listing, part 7

SEQ ID NO: 9986 - protein, 1171 aa, Artificial Sequence
  SARS-CoV-2/pangolin/Guangxi/P5L/2017__EPI_ISL_410540 spike protein (1-1141)(K980P_V981P_ H1042Q_H1058N_ H1077N_H1095N) Foldon construct
MFVFLFVLPLVSSQCVNLTTRTGIPPGYTNSSTRGVYYPDKVFRSSILHLTQDLFLPFFSNVTWFNTINYQGGFKKFDNPVLPFNDGVYFASTEKSNIIRGWIFGTTLDARTQSLLIVNNATNVVIKVCEFQFCTDPFLGVYYHNNNKTWVENEFRVYSSANNCTFEYISQPFLMDLEGKQGNFKNLREFVFKNVDGYFKIYSKHTPIDLVRDLPRGFAALEPLVDLPIGINITRFQTLLALHRSYLTPGKLESGWTTGAAAYYVGYLQQRTFLLSYNQNGTITDAVDCSLDPLSETKCTLKSLTVEKGIYQTSNFRVQPTISIVRFPNITNLCPFGEVFNASKFASVYAWNRKRISNCVADYSVLYNSTSFSTFKCYGVSPTKLNDLCFTNVYADSFVVKGDEVRQIAPGQTGVIADYNYKLPDDFTGCVIAWNSVKQDALTGGNYGYLYRLFRKSKLKPFERDISTEIYQAGSTPCNGQVGLNCYYPLERYGFHPTTGVNYQPFRVVVLSFELLNGPATVCGPKLSTTLVKDKCVNFNFNGLTGTGVLTTSKKQFLPFQQFGRDISDTTDAVRDPQTLEILDITPCSFGGVSVITPGTNTSNQVAVLYQDVNCTEVPMAIHAEQLTPAWRVYSAGANVFQTRAGCLVGAEHVNNSYECDIPVGAGICASYHSMSSFRSVNQRSIIAYTMSLGAENSVAYSNNSIAIPTNFTISVTTEILPVSMTKTSVDCTMYICGDSIECSNLLLQYGSFCTQLNRALTGIAVEQDKNTQEVFAQVKQIYKTPPIKDFGGFNFSQILPDPSKPSKRSFIEDLLFNKVTLADAGFIKQYGDCLGDIAARDLICAQKFNGLTVLPPLLTDEMIAQYTSALLAGTITSGWTFGAGAALQIPFAMQMAYRFNGIGVTQNVLYENQKLIANQFNSAIGKIQDSLSSTASALGKLQDVVNQNAQALNTLVKQLSSNFGAISSVLNDILSRLDPPEAEVQIDRLITGRLQSLQTYVTQQLIRAAEIRASANLAATKMSECVLGQSKRVDFCGKGYQLMSFPQSAPHGVVFLNVTYVPAQEKNFTTAPAICNEGKAHFPREGVFVSNGTNWFITQRNFYEPQIITTDNTFVSGSCDVVIGIVNNTVYDPLQPELDSGGSGYIPEAPRDGQAYVRKDGEWVLLSTFL

SEQ ID NO: 9987 - protein, 1171 aa, Artificial Sequence
  SARS-CoV-2/pangolin/Guangxi/P5E/2017__EPI_ISL_410541 spike protein (1-1141)(K980P_V981P_ H1042Q_H1058N_ H1077N_H1095N) Foldon construct
MFVFLFVLPLVSSQCVNLTTRTGIPPGYTNSSTRGVYYPDKVFRSSILHLTQDLFLPFFSNVTWFNTITYQGGSKKFDNPVLPFNDGVYFASTEKSNIIRGWIFGTTLDARTQSLLIVNNATNVVIKVCEFQFCTDPFLGVYYHNNNKTWVENEFRVYSSANNCTFEYISQPFLMDLEGKQGNFKNLREFVFKNVDGYFKIYSKHTPIDLVRDLPRGFAALEPLVDLPIGINITRFQTLLALHRSYLTPGKLESGWTTGAAAYYVGYLQQRTFLLSYNQNGTITDAVDCSLDPLSETKCTLKSLTVEKGIYQTSNFRVQPTISIVRFPNITNLCPFGEVFNASKFASVYAWNRKRISNCVADYSVLYNSTSFSTFKCYGVSPTKLNDLCFTNVYADSFVVKGDEVRQIAPGQTGVIADYNYKLPDDFTGCVIAWNSVKQDALTGDNYGYLYRLFRKSKLKPFERDISTEIYQAGSTPCNGQVGLNCYYPLERYGFHPTTGVNYQPFRVVVLSFELLNGPATVCGPKLSTTLVKDKCVNFNFNGLTGTGVLTTSKKQFLPFQQFGRDISDTTDAVRDPQTLEILDITPCSFGGVSVITPGTNTSNQVAVLYQDVNCTEVPMAIHAEQLTPAWRVYSAGANVFQTRAGCLVGAEHVNNSYECDIPVGAGICASYHSMSSFRSVNQRSIIAYTMSLGAENSVAYSNNSIAIPTNFTISVTTEILPVSMTKTSVDCTMYICGDSIECSNLLLQYGSFCTQLNRALTGIAVEQDKNTQEVFAQVKQIYKTPPIKDFGGFNFSQILPDPSKPSKRSFIEDLLFNKVTLADAGFIKQYGDCLGDIAARDLICAQKFNGLTVLPPLLTDEMIAQYTSALLAGTITSGWTFGAGAALQIPFAMQMAYRFNGIGVTQNVLYENQKLIANQFNSAIGKIQDSLSSTASALGKLQDVVNQNAQALNTLVKQLSSNFGAISSVLNDILSRLDPPEAEVQIDRLITGRLQSLQTYVTQQLIRAAEIRASANLAATKMSECVLGQSKRVDFCGKGYQLMSFPQSAPHGVVFLNVTYVPAQEKNFTTAPAICNEGKAHFPREGVFVSNGTNWFITQRNFYEPQIITTDNTFVSGSCDVVIGIVNNTVYDPLQPELDSGGSGYIPEAPRDGQAYVRKDGEWVLLSTFL

SEQ ID NO: 9988 - protein, 1169 aa, Artificial Sequence
  SARS-CoV-2/pangolin/Guangxi/P1E/2017__EPI_ISL_410539 spike protein (1-1139)(K978P_V979P_ H1040Q_H1056N_ H1075N_H1093N) Foldon construct
MFVFLFVLPLVSSQCVNLTTRTGIQPGYTNSSTRGVYYPDKVFRSSILHLTQDLFLPFFSNVTWFNTINYQGGFKKFDNPVLPFNDGVYFASTEKSNIIRGWIFGTTLDARTQSLLIVNNATNVVIKVCEFQFCTDPFLGVYYHNNNKTWVENEFRVYSSANNCTFEYISQPFLMDLEGKQGNFKNLREFVFKNVDGYFKIYSKHTPIDLVRDLPRGFAALEPLVDLPIGINITRFQTLLALHRSYLTPGKLESGWTTGAAAYYVGYLQQRTFLLSYNQNGTITDAVDCSLDPLSETKCTLKSLTVEKGIYQTSNFRVQPTISIVRFPNITNLCPFGEVFNASKFASVYAWNRKRISNCVADYSVLYNSTSFSTFKCYGVSPTKLNDLCFTNVYADSFVVKGDEVRQIAPGQTGVIADYNYKLPDDFTGCVIAWNSVKQDALTGGNYLYRLFRKSKLKPFERDISTEIYQAGSTPCNGQVGLNCYYPLERYGFHPTTGVNYQPFRVVVLSFELLNGPATVCGPKLSTTLVKDKCVNFNFNGLTGTGVLTTSKKQFLPFQQFGRDISDTTDAVRDPQTLEILDITPCSFGGVSVITPGTNTSNQVAVLYQDVNCTEVPMAIHAEQLTPAWRVYSAGANVFQTRAGCLVGAEHVNNSYECDIPVGAGICASYHSMSSLRSVNQRSIIAYTMSLGAENSVAYSNNSIAIPTNFTISVTTEILPVSMTKTSVDCTMYICGDSIECSNLLLQYGSFCTQLNRALTGIAVEQDKNTQEVFAQVKQIYKTPPIKDFGGFNFSQILPDPSKPSKRSFIEDLLFNKVTLADAGFIKQYGDCLGDIAARDLICAQKFNGLTVLPPLLTDEMIAQYTSALLAGTITSGWTFGAGAALQIPFAMQMAYRFNGIGVTQNVLYENQKLIANQFNSAIGKIQDSLSSTASALGKLQDVVNQNAQALNTLVKQLSSNFGAISSVLNDILSRLDPPEAEVQIDRLITGRLQSLQTYVTQQLIRAAEIRASANLAATKMSECVLGQSKRVDFCGKGYQLMSFPQSAPHGVVFLNVTYVPAQEKNFTTAPAICNEGKAHFPREGVFVSNGTNWFITQRNFYEPQIITTDNTFVSGSCDVVIGIVNNTVYDPLQPELDSGGSGYIPEAPRDGQAYVRKDGEWVLLSTFL

SEQ ID NO: 9989 - protein, 1177 aa, Artificial Sequence
  SARS-CoV-2/Wuhan/WIV05/2019__EPI_ISL_402128 spike protein (1-1147)(I712C_T1077C) Foldon construct
MFVFLVLLPLVSSQCVNLTTRTQLPPAYTNSFTRGVYYPDKVFRSSVLHSTQDLFLPFFSNVTWFHAIHVSGTNGTKRFDNPVLPFNDGVYFASTEKSNIIRGWIFGTTLDSKTQSLLIVNNATNVVIKVCEFQFCNDPFLGVYYHKNNKSWMESEFRVYSSANNCTFEYVSQPFLMDLEGKQGNFKNLREFVFKNIDGYFKIYSKHTPINLVRDLPQGFSALEPLVDLPIGINITRFQTLLALHRSYLTPGDSSSGWTAGAAAYYVGYLQPRTFLLKYNENGTITDAVDCALDPLSETKCTLKSFTVEKGIYQTSNFRVQPTESIVRFPNITNLCPFGEVFNATRFASVYAWNRKRISNCVADYSVLYNSASFSTFKCYGVSPTKLNDLCFTNVYADSFVIRGDEVRQIAPGQTGKIADYNYKLPDDFTGCVIAWNSNNLDSKVGGNYNYLYRLFRKSNLKPFERDISTEIYQAGSTPCNGVEGFNCYFPLQSYGFQPTNGVGYQPYRVVVLSFELLHAPATVCGPKKSTNLVKNKCVNFNFNGLTGTGVLTESNKKFLPFQQFGRDIADTTDAVRDPQTLEILDITPCSFGGVSVITPGTNTSNQVAVLYQDVNCTEVPVAIHADQLTPTWRVYSTGSNVFQTRAGCLIGAEHVNNSYECDIPIGAGICASYQTQTNSPRRARSVASQSIIAYTMSLGAENSVAYSNNSCAIPTNFTISVTTEILPVSMTKTSVDCTMYICGDSTECSNLLLQYGSFCTQLNRALTGIAVEQDKNTQEVFAQVKQIYKTPPIKDFGGFNFSQILPDPSKPSKRSFIEDLLFNKVTLADAGFIKQYGDCLGDIAARDLICAQKFNGLTVLPPLLTDEMIAQYTSALLAGTITSGWTFGAGAALQIPFAMQMAYRFNGIGVTQNVLYENQKLIANQFNSAIGKIQDSLSSTASALGKLQDVVNQNAQALNTLVKQLSSNFGAISSVLNDILSRLDKVEAEVQIDRLITGRLQSLQTYVTQQLIRAAEIRASANLAATKMSECVLGQSKRVDFCGKGYHLMSFPQSAPHGVVFLHVTYVPAQEKNFTCAPAICHDGKAHFPREGVFVSNGTHWFVTQRNFYEPQIITTDNTFVSGNCDVVIGIVNNTVYDPLQPELDSGGSGYIPEAPRDGQAYVRKDGEWVLLSTFL

SEQ ID NO: 9990 - protein, 1173 aa, Artificial Sequence
  SARS-CoV-2/bat/Yunnan/RaTG13/2013__EPI_ISL_402131 spike protein (1-1143)(I708C_T1073C) Foldon construct
MFVFLVLLPLVSSQCVNLTTRTQLPPAYTNSSTRGVYYPDKVFRSSVLHLTQDLFLPFFSNVTWFHAIHVSGTNGIKRFDNPVLPFNDGVYFASTEKSNIIRGWIFGTTLDSKTQSLLIVNNATNVVIKVCEFQFCNDPFLGVYYHKNNKSWMESEFRVYSSANNCTFEYVSQPFLMDLEGKQGNFKNLREFVFKNIDGYFKIYSKHTPINLVRDLPPGFSALEPLVDLPIGINITRFQTLLALHRSYLTPGDSSSGWTAGAAAYYVGYLQPRTFLLKYNENGTITDAVDCALDPLSETKCTLKSFTVEKGIYQTSNFRVQPTDSIVRFPNITNLCPFGEVFNATTFASVYAWNRKRISNCVADYSVLYNSTSFSTFKCYGVSPTKLNDLCFTNVYADSFVITGDEVRQIAPGQTGKIADYNYKLPDDFTGCVIAWNSKHIDAKEGGNFNYLYRLFRKANLKPFERDISTEIYQAGSKPCNGQTGLNCYYPLYRYGFYPTDGVGHQPYRVVVLSFELLNAPATVCGPKKSTNLVKNKCVNFNFNGLTGTGVLTESNKKFLPFQQFGRDIADTTDAVRDPQTLEILDITPCSFGGVSVITPGTNASNQVAVLYQDVNCTEVPVAIHADQLTPTWRVYSTGSNVFQTRAGCLIGAEHVNNSYECDIPIGAGICASYQTQTNSRSVASQSIIAYTMSLGAENSVAYSNNSCAIPTNFTISVTTEILPVSMTKTSVDCTMYICGDSTECSNLLLQYGSFCTQLNRALTGIAVEQDKNTQEVFAQVKQIYKTPPIKDFGGFNFSQILPDPSKPSKRSFIEDLLFNKVTLADAGFIKQYGDCLGDIAARDLICAQKFNGLTVLPPLLTDEMIAQYTSALLAGTITSGWTFGAGAALQIPFAMQMAYRFNGIGVTQNVLYENQKLIANQFNSAIGKIQDSLSSTASALGKLQDVVNQNAQALNTLVKQLSSNFGAISSVLNDILSRLDKVEAEVQIDRLITGRLQSLQTYVTQQLIRAAEIRASANLAATKMSECVLGQSKRVDFCGKGYHLMSFPQSAPHGVVFLHVTYVPAQEKNFTCAPAICHDGKAHFPREGVFVSNGTHWFVTQRNFYEPQIITTDNTFVSGSCDVVIGIVNNTVYDPLQPELDSGGSGYIPEAPRDGQAYVRKDGEWVLLSTFL

SEQ ID NO: 9991 - protein, 1177 aa, Artificial Sequence
  SARS-CoV-2/Wuhan/HBCDC-HB-01/2019__EPI_ISL_402132 spike protein (1-1147)(I712C_T1077C) Foldon construct
MFVFLVLLPLVSSQCVNLTTRTQLPPAYTNSITRGVYYPDKVFRSSVLHSTQDLFLPFFSNVTWFHAIHVSGTNGTKRFDNPVLPFNDGVYFASTEKSNIIRGWIFGTTLDSKTQSLLIVNNATNVVIKVCEFQFCNDPFLGVYYHKNNKSWMESEFRVYSSANNCTFEYVSQPFLMDLEGKQGNFKNLREFVFKNIDGYFKIYSKHTPINLVRDLPQGFSALEPLVDLPIGINITRFQTLLALHRSYLTPGDSSSGWTAGAAAYYVGYLQPRTFLLKYNENGTITDAVDCALDPLSETKCTLKSFTVEKGIYQTSNFRVQPTESIVRFPNITNLCPFGEVFNATRFASVYAWNRKRISNCVADYSVLYNSASFSTFKCYGVSPTKLNDLCFTNVYADSFVIRGDEVRQIAPGQTGKIADYNYKLPDDFTGCVIAWNSNNLDSKVGGNYNYLYRLFRKSNLKPFERDISTEIYQAGSTPCNGVEGFNCYFPLQSYGFQPTNGVGYQPYRVVVLSFELLHAPATVCGPKKSTNLVKNKCVNFNFNGLTGTGVLTESNKKFLPFQQFGRDIADTTDAVRDPQTLEILDITPCSFGGVSVITPGTNTSNQVAVLYQDVNCTEVPVAIHADQLTPTWRVYSTGSNVFQTRAGCLIGAEHVNNSYECDIPIGAGICASYQTQTNSPRRARSVASQSIIAYTMSLGAENSVAYSNNSCAIPTNFTISVTTEILPVSMTKTSVDCTMYICGDSTECSNLLLQYGSFCTQLNRALTGIAVEQDKNTQEVFAQVKQIYKTPPIKDFGGFNFSQILPDPSKPSKRSFIEDLLFNKVTLADAGFIKQYGDCLGDIAARDLICAQKFNGLTVLPPLLTDEMIAQYTSALLAGTITSGWTFGAGAALQIPFAMQMAYRFNGIGVTQNVLYENQKLIANQFNSAIGKIQDSLSSTASALGKLQDVVNQNAQALNTLVKQLSSNFGAISSVLNDILSRLDKVEAEVQIDRLITGRLQSLQTYVTQQLIRAAEIRASANLAATKMSECVLGQSKRVDFCGKGYHLMSFPQSAPHGVVFLHVTYVPAQEKNFTCAPAICHDGKAHFPREGVFVSNGTHWFVTQRNFYEPQIITTDNTFVSGNCDVVIGIVNNTVYDPLQPELDSGGSGYIPEAPRDGQAYVRKDGEWVLLSTFL

SEQ ID NO: 9992 - protein, 1177 aa, Artificial Sequence
  SARS-CoV-2/Guangdong/20SF028/2020__EPI_ISL_403936 spike protein (1-1147)(I712C_T1077C) Foldon construct
MFVFLVLLPLVSSQCVNLTTRTQLPPAYTNSFTRGVYYPDKVFRSSVLYSTQDLFLPFFSNVTWFHAIHVSGTNGTKRFDNPVLPFNDGVYFASTEKSNIIRGWIFGTTLDSKTQSLLIVNNATNVVIKVCEFQFCNDPFLGVYYHKNNKSWMESEFRVYSSANNCTFEYVSQPFLMDLEGKQGNFKNLREFVFKNIDGYFKIYSKHTPINLVRDLPQGFSALEPLVDLPIGINITRFQTLLALHRSYLTPGDSSSGWTAGAAAYYVGYLQPRTFLLKYNENGTITDAVDCALDPLSETKCTLKSFTVEKGIYQTSNFRVQPTESIVRFPNITNLCPFGEVFNATRFASVYAWNRKRISNCVADYSVLYNSASFSTFKCYGVSPTKLNDLCFTNVYADSFVIRGDEVRQIAPGQTGKIADYNYKLPDDFTGCVIAWNSNNLDSKVGGNYNYLYRLFRKSNLKPFERDISTEIYQAGSTPCNGVEGFNCYFPLQSYGFQPTNGVGYQPYRVVVLSFELLHAPATVCGPKKSTNLVKNKCVNFNFNGLTGTGVLTESNKKFLPFQQFGRDIADTTDAVRDPQTLEILDITPCSFGGVSVITPGTNTSNQVAVLYQDVNCTEVPVAIHADQLTPTWRVYSTGSNVFQTRAGCLIGAEHVNNSYECDIPIGAGICASYQTQTNSPRRARSVASQSIIAYTMSLGAENSVAYSNNSCAIPTNFTISVTTEILPVSMTKTSVDCTMYICGDSTECSNLLLQYGSFCTQLNRALTGIAVEQDKNTQEVFAQVKQIYKTPPIKDFGGFNFSQILPDPSKPSKRSFIEDLLFNKVTLADAGFIKQYGDCLGDIAARDLICAQKFNGLTVLPPLLTDEMIAQYTSALLAGTITSGWTFGAGAALQIPFAMQMAYRFNGIGVTQNVLYENQKLIANQFNSAIGKIQDSLSSTASALGKLQDVVNQNAQALNTLVKQLSSNFGAISSVLNDILSRLDKVEAEVQIDRLITGRLQSLQTYVTQQLIRAAEIRASANLAATKMSECVLGQSKRVDFCGKGYHLMSFPQSAPHGVVFLHVTYVPAQEKNFTCAPAICHDGKAHFPREGVFVSNGTHWFVTQRNFYEPQIITTDNTFVSGNCDVVIGIVNNTVYDPLQPELDSGGSGYIPEAPRDGQAYVRKDGEWVLLSTFL

SEQ ID NO: 9993 - protein, 1177 aa, Artificial Sequence
  SARS-CoV-2/Shenzhen/SZTH-001/2020__EPI_ISL_406592 spike protein (1-1147)(I712C_T1077C) Foldon construct
MFVFLVLLPLVSSQCVNLTTRTQLPPAYTNSFTRGVYYPDKVFRSSVLHSTQDLFLPFFSNVTWFHAIHVSGTNGTKRFDNPVLPFNDGVYFASTEKSNIIRGWIFGTTLDSKTQSLLIVNNATNVVIKVCEFQFCNDPFLGVYYHKNNKSWMESEFRVYSSANNCTFEYVSQPFLMDLEGKQGNFKNLREFVFKNIDGYFKIYSKHTPINLVRDLPQGFSALEPLVDLPIGINITRFQTLLALHRSYLTPGDSSSGWTAGAAAYYVGYLQPRTFLLKYNENGTITDAVDCALDPLSETKCTLKSFTVEKGIYQTSNFRVQPTESIVRFPNITNLCPFGEVFNATRFASVYAWNRKRISNCVADYSVLYNSASFSTFKCYGVSPTKLNDLCFTNVYADSFVIRGDEVRQIAPGQTGKIADYNYKLPDDFTGCVIAWNSNNLDSKVGGNYNYLYRLFRKSNLKPFERDISTEIYQAGSTPCNGVEGFNCYFPLQSYGFQPTNGVGYQPYRVVVLSFELLHAPATVCGPKKSTNLVKNKCVNFNFNGLTGTGVLTESNKKFLPFQQFGRDIADTTDAVRDPQTLEILDITPCSFGGVSVITPGTNTSNQVAVLYQDVNCTEVPVAIHADQLTPTWRVYSTGSNVFQTRAGCLIGAEHVNNSYECDIPIGAGICASYQTQTNSPRRARSVASQSIIAYTMSLGAENSVAYSNNSCAIPTNFTISVTTEILPVSMTKTSVDCTMYICGDSTECSNLLLQYGSFCTQLNRALTGIAVEQDKNTQEVFAQVKQIYKTPPIKDFGGFNFSQILPDPSKPSKRSFIEDLLFNKVTLADAGFIKQYGDCLGDIAARDLICAQKFNGLTVLPPLLTDEMIAQYTSALLAGTITSGWTFGAGAALQIPFAMQMAYRFNGIGVTQNVLYENQKLIANQFNSAIGKIQDSLSSTASALGKLQDVVNQNAQALNTLVKQLSSNFGAISSVLNDILSRLDKVEAEVQIDRLITGRLQSLQTYVTQQLIRAAEIRASANLAATKMSECVLGQSKRVDFCGKGYHLMSFPQSAPHGVVFLHVTYVPAQEKNFTCAPAICHDGKAHFPREGVFVSNGTHWFVTQRNFYEPQIITTDNTFVSGNCDVLIGIVNNTVYDPLQPELDSGGSGYIPEAPRDGQAYVRKDGEWVLLSTFL

SEQ ID NO: 9994 - protein, 1177 aa, Artificial Sequence
  SARS-CoV-2/Shenzhen/SZTH-004/2020__EPI_ISL_406595 spike protein (1-1147)(I712C_T1077C) Foldon construct
MFVFLVLLPLVSSQCVNLTTRTQLPPAYTNSFTRGVYYPDKVFRSSVLHSTQDLFLPFFSNVTWFHAIHVSGTNGTKRFDNPVLPFNDGVYFASTEKSNIIRGWIFGTTLDSKTQSLLIVNNATNVVIKVCEFQFCNDPFLGVYYHKNNKSWMESEFRVYSSANNCTFEYVSQPFLMDLEGKQGNFKNLREFVFKNIDGYFKIYSKHTPINLVRDLPQGFSALEPLVDLPIGINITRFQTLLALHRSYLTPGDSSSGWTAGAAAYYVGYLQPRTFLLKYNENGTITDAVDCALDPLSETKCTLKSFTVEKGIYQTSNFRVQPTESIVRFPNITNLCPFGEVFNATRFASVYAWDRKRISNCVAYYSVLYNSASFSTFKCYGVSPTKLNDLCFTNVYADSFVIRGDEVRQIAPGQTGKIADYNYKLPDDFTGCVIAWNSNNLDSKVGGNYNYLYRLFRKSNLKPFERDISTEIYQAGSTPCNGVEGFNCYFPLQSYGFQPTNGVGYQPYRVVVLSFELLHAPATVCGPKKSTNLVKNKCVNFNFNGLTGTGVLTESNKKFLPFQQFGRDIADTTDAVRDPQTLEILDITPCSFGGVSVITPGTNTSNQVAVLYQDVNCTEVPVAIHADQLTPTWRVYSTGSNVFQTRAGCLIGAEHVNNSYECDIPIGAGICASYQTQTNSPRRARSVASQSIIAYTMSLGAENSVAYSNNSCAIPTNFTISVTTEILPVSMTKTSVDCTMYICGDSTECSNLLLQYGSFCTQLNRALTGIAVEQDKNTQEVFAQVKQIYKTPPIKDFGGFNFSQILPDPSKPSKRSFIEDLLFNKVTLADAGFIKQYGDCLGDIAARDLICAQKFNGLTVLPPLLTDEMIAQYTSALLAGTITSGWTFGAGAALQIPFAMQMAYRFNGIGVTQNVLYENQKLIANQFNSAIGKIQDSLSSTASALGKLQDVVNQNAQALNTLVKQLSSNFGAISSVLNDILSRLDKVEAEVQIDRLITGRLQSLQTYVTQQLIRAAEIRASANLAATKMSECVLGQSKRVDFCGKGYHLMSFPQSAPHGVVFLHVTYVPAQEKNFTCAPAICHDGKAHFPREGVFVSNGTHWFVTQRNFYEPQIITTDNTFVSGNCDVVIGIVNNTVYDPLQPELDSGGSGYIPEAPRDGQAYVRKDGEWVLLSTFL

SEQ ID NO: 9995 - protein, 1177 aa, Artificial Sequence
  SARS-CoV-2/France/IDF0372/2020__EPI_ISL_406596 spike protein (1-1147)(I712C_T1077C) Foldon construct
MFVFLVLLPLVSSQCVNLTTRTQLPPAYTNSFTRGVYYPDKVFRSSVLHSTQDLFLPFFSNVTWFHAIHVSGTNGTKRFDNPVLPFNDGVYFASTEKSNIIRGWIFGTTLDSKTQSLLIVNNATNVVIKVCEFQFCNDPFLGVYYHKNNKSWMESEFRVYSSANNCTFEYVSQPFLMDLEGKQGNFKNLREFVFKNIDGYFKIYSKHTPINLVRDLPQGFSALEPLVDLPIGINITRFQTLLALHRSYLTPGDSSSGWTAGAAAYYVGYLQPRTFLLKYNENGTITDAVDCALDPLSETKCTLKSFTVEKGIYQTSNFRVQPTESIVRFPNITNLCPFGEVFNATRFASVYAWNRKRISNCVADYSFLYNSASFSTFKCYGVSPTKLNDLCFTNVYADSFVIRGDEVRQIAPGQTGKIADYNYKLPDDFTGCVIAWNSNNLDSKVGGNYNYLYRLFRKSNLKPFERDISTEIYQAGSTPCNGVEGFNCYFPLQSYGFQPTNGVGYQPYRVVVLSFELLHAPATVCGPKKSTNLVKNKCVNFNFNGLTGTGVLTESNKKFLPFQQFGRDIADTTDAVRDPQTLEILDITPCSFGGVSVITPGTNTSNQVAVLYQDVNCTEVPVAIHADQLTPTWRVYSTGSNVFQTRAGCLIGAEHVNNSYECDIPIGAGICASYQTQTNSPRRARSVASQSIIAYTMSLGAENSVAYSNNSCAIPTNFTISVTTEILPVSMTKTSVDCTMYICGDSTECSNLLLQYGSFCTQLNRALTGIAVEQDKNTQEVFAQVKQIYKTPPIKDFGGFNFSQILPDPSKPSKRSFIEDLLFNKVTLADAGFIKQYGDCLGDIAARDLICAQKFNGLTVLPPLLTDEMIAQYTSALLAGTITSGWTFGAGAALQIPFAMQMAYRFNGIGVTQNVLYENQKLIANQFNSAIGKIQDSLSSTASALGKLQDVVNQNAQALNTLVKQLSSNFGAISSVLNDILSRLDKVEAEVQIDRLITGRLQSLQTYVTQQLIRAAEIRASANLAATKMSECVLGQSKRVDFCGKGYHLMSFPQSAPHGVVFLHVTYVPAQEKNFTCAPAICHDGKAHFPREGVFVSNGTHWFVTQRNFYEPQIITTDNTFVSGNCDVVIGIVNNTVYDPLQPELDSGGSGYIPEAPRDGQAYVRKDGEWVLLSTFL

SEQ ID NO: 9996 - protein, 1177 aa, Artificial Sequence
  SARS-CoV-2/Australia/VIC01/2020__EPI_ISL_406844 spike protein (1-1147)(I712C_T1077C) Foldon construct
MFVFLVLLPLVSSQCVNLTTRTQLPPAYTNSFTRGVYYPDKVFRSSVLHSTQDLFLPFFSNVTWFHAIHVSGTNGTKRFDNPVLPFNDGVYFASTEKSNIIRGWIFGTTLDSKTQSLLIVNNATNVVIKVCEFQFCNDPFLGVYYHKNNKSWMESEFRVYSSANNCTFEYVSQPFLMDLEGKQGNFKNLREFVFKNIDGYFKIYSKHTPINLVRDLPQGFSALEPLVDLPIGINITRFQTLLALHRRYLTPGDSSSGWTAGAAAYYVGYLQPRTFLLKYNENGTITDAVDCALDPLSETKCTLKSFTVEKGIYQTSNFRVQPTESIVRFPNITNLCPFGEVFNATRFASVYAWNRKRISNCVADYSVLYNSASFSTFKCYGVSPTKLNDLCFTNVYADSFVIRGDEVRQIAPGQTGKIADYNYKLPDDFTGCVIAWNSNNLDSKVGGNYNYLYRLFRKSNLKPFERDISTEIYQAGSTPCNGVEGFNCYFPLQSYGFQPTNGVGYQPYRVVVLSFELLHAPATVCGPKKSTNLVKNKCVNFNFNGLTGTGVLTESNKKFLPFQQFGRDIADTTDAVRDPQTLEILDITPCSFGGVSVITPGTNTSNQVAVLYQDVNCTEVPVAIHADQLTPTWRVYSTGSNVFQTRAGCLIGAEHVNNSYECDIPIGAGICASYQTQTNSPRRARSVASQSIIAYTMSLGAENSVAYSNNSCAIPTNFTISVTTEILPVSMTKTSVDCTMYICGDSTECSNLLLQYGSFCTQLNRALTGIAVEQDKNTQEVFAQVKQIYKTPPIKDFGGFNFSQILPDPSKPSKRSFIEDLLFNKVTLADAGFIKQYGDCLGDIAARDLICAQKFNGLTVLPPLLTDEMIAQYTSALLAGTITSGWTFGAGAALQIPFAMQMAYRFNGIGVTQNVLYENQKLIANQFNSAIGKIQDSLSSTASALGKLQDVVNQNAQALNTLVKQLSSNFGAISSVLNDILSRLDKVEAEVQIDRLITGRLQSLQTYVTQQLIRAAEIRASANLAATKMSECVLGQSKRVDFCGKGYHLMSFPQSAPHGVVFLHVTYVPAQEKNFTCAPAICHDGKAHFPREGVFVSNGTHWFVTQRNFYEPQIITTDNTFVSGNCDVVIGIVNNTVYDPLQPELDSGGSGYIPEAPRDGQAYVRKDGEWVLLSTFL

SEQ ID NO: 9997 - protein, 1177 aa, Artificial Sequence
  SARS-CoV-2/Germany/BavPat1/2020__EPI_ISL_406862 spike protein (1-1147)(I712C_T1077C) Foldon construct
MFVFLVLLPLVSSQCVNLTTRTQLPPAYTNSFTRGVYYPDKVFRSSVLHSTQDLFLPFFSNVTWFHAIHVSGTNGTKRFDNPVLPFNDGVYFASTEKSNIIRGWIFGTTLDSKTQSLLIVNNATNVVIKVCEFQFCNDPFLGVYYHKNNKSWMESEFRVYSSANNCTFEYVSQPFLMDLEGKQGNFKNLREFVFKNIDGYFKIYSKHTPINLVRDLPQGFSALEPLVDLPIGINITRFQTLLALHRSYLTPGDSSSGWTAGAAAYYVGYLQPRTFLLKYNENGTITDAVDCALDPLSETKCTLKSFTVEKGIYQTSNFRVQPTESIVRFPNITNLCPFGEVFNATRFASVYAWNRKRISNCVADYSVLYNSASFSTFKCYGVSPTKLNDLCFTNVYADSFVIRGDEVRQIAPGQTGKIADYNYKLPDDFTGCVIAWNSNNLDSKVGGNYNYLYRLFRKSNLKPFERDISTEIYQAGSTPCNGVEGFNCYFPLQSYGFQPTNGVGYQPYRVVVLSFELLHAPATVCGPKKSTNLVKNKCVNFNFNGLTGTGVLTESNKKFLPFQQFGRDIADTTDAVRDPQTLEILDITPCSFGGVSVITPGTNTSNQVAVLYQGVNCTEVPVAIHADQLTPTWRVYSTGSNVFQTRAGCLIGAEHVNNSYECDIPIGAGICASYQTQTNSPRRARSVASQSIIAYTMSLGAENSVAYSNNSCAIPTNFTISVTTEILPVSMTKTSVDCTMYICGDSTECSNLLLQYGSFCTQLNRALTGIAVEQDKNTQEVFAQVKQIYKTPPIKDFGGFNFSQILPDPSKPSKRSFIEDLLFNKVTLADAGFIKQYGDCLGDIAARDLICAQKFNGLTVLPPLLTDEMIAQYTSALLAGTITSGWTFGAGAALQIPFAMQMAYRFNGIGVTQNVLYENQKLIANQFNSAIGKIQDSLSSTASALGKLQDVVNQNAQALNTLVKQLSSNFGAISSVLNDILSRLDKVEAEVQIDRLITGRLQSLQTYVTQQLIRAAEIRASANLAATKMSECVLGQSKRVDFCGKGYHLMSFPQSAPHGVVFLHVTYVPAQEKNFTCAPAICHDGKAHFPREGVFVSNGTHWFVTQRNFYEPQIITTDNTFVSGNCDVVIGIVNNTVYDPLQPELDSGGSGYIPEAPRDGQAYVRKDGEWVLLSTFL

SEQ ID NO: 9998 - protein, 1177 aa, Artificial Sequence
  SARS-CoV-2/Wuhan/HBCDC-HB-02/2020__EPI_ISL_412978 spike protein (1-1147)(I712C_T1077C) Foldon construct
MFVFLVLLPLVSSQCVNLTTRTQLPPAYTNSFTRGVYYPDKVFRSSVLHSTQDLFLPFFSNVTWFHAIHVSGTNGTKRFDNPVLPFNDGVYFASTEKSNIIRGWIFGTTLDSKTQSLLIVNNATNVVIKVCEFQFCNDPFLGVYYHKNNKSWMESEFRVYSSANNCTFEYVSQPFLMDLEGKQGNFKNLREFVFKNIDGYFKIYSKHTPINLVRDLPQGFSALEPLVDLPIGINITRFQTLLALHRSYLTPGDSSSGWTAGAAAYYVGYLQPRTFLLKYNENGTITDAVDCALDPLSETKCTLKSFTVEKGIYQTSNFRVQPTESIVRFPNITNLCPFGEVFNATRFASVYAWNRKRISNCVADYSVLYNSASFSTFKCYGVSPTKLNDLCFTNVYADSFVIRGDEVRQIAPGQTGKIADYNYKLPDDFTGCVIAWNSNNLDSKVGGNYNYLYRLFRKSNLKPFERDISTEIYQAGSTPCNGVEGFNCYFPLQSYGFQPTNGVGYQPYRVVVLSFELLHAPATVCGPKKSTNLVKNKCVNFNFNGLTGTGVLTESNKKFLPFQQFGRDIADTTDAVRDPQTLEILDITPCSFGGVSVITPGTNTSNQVAVLYQDVNCTEVPVAIHADQLTPTWRVYSTGSNVFQTRAGCLIGAEHVNNSYECDIPIGAGICASYQTQTNSPRRARSVASQSIIAYTMSLGAENSVAYSNNSCAIPTNFTISVTTEILPVSMTKTSVDCTMYICGDSTECSNFLLQYGSFCTQLNRALTGIAVEQDKNTQEVFAQVKQIYKTPPIKDFGGFNFSQILPDPSKPSKRSFIEDLLFNKVTLADAGFIKQYGDCLGDIAARDLICAQKFNGLTVLPPLLTDEMIAQYTSALLAGTITSGWTFGAGAALQIPFAMQMAYRFNGIGVTQNVLYENQKLIANQFNSAIGKIQDSLSSTASALGKLQDVVNQNAQALNTLVKQLSSNFGAISSVLNDILSRLDKVEAEVQIDRLITGRLQSLQTYVTQQLIRAAEIRASANLAATKMSECVLGQSKRVDFCGKGYHLMSFPQSAPHGVVFLHVTYVPAQEKNFTCAPAICHDGKAHFPREGVFVSNGTHWFVTQRNFYEPQIITTDNTFVSGNCDVVIGIVNNTVYDPLQPELDSGGSGYIPEAPRDGQAYVRKDGEWVLLSTFL

SEQ ID NO: 9999 - protein, 1177 aa, Artificial Sequence
  SARS-CoV-2/Australia/QLD02/2020__EPI_ISL_407896 spike protein (1-1147)(I712C_T1077C) Foldon construct
MFVFLVLLPLVSSQCVNLTTRTQLPPAYTNSFTRGVYYPDKVFRSSVLHSTQDLFLPFFSNVTWFHAIHVSGTNGTKRFDNPVLPFNDGVYFASTEKSNIIRGWIFGTTLDSKTQSLLIVNNATNVVIKVCEFQFCNDPFLGVYYHKNNKSWMESEFRVYSSANNCTFEYVSQPFLMDLEGKQGNFKNLREFVFKNIDGYFKIYSKHTPINLVRDLPQGFSALEPLVDLPIGINITRFQTLLALHRSYLTPGDSSSGWTAGAAAYYVGYLQPRTFLLKYNENGTITDAVDCALDPLSETKCTLKSFTVEKGIYQTSNFRVQPTESIVRFPNITNLCPFGEVFNATRFASVYAWNRKRISNCVADYSVLYNSASFSTFKCYGVSPTKLNDLCFTNVYADSFVIRGDEVRQIAPGQTGKIADYNYKLPDDFTGCVIAWNSNNLDSKVGGNYNYLYRLFRKSNLKPFERDISTEIYQAGSTPCNGVEGFNCYFPLQSYGFQPTNGVGYQPYRVVVLSFELLHAPATVCGPKKSTNLVKNKCVNFNFNGLTGTGVLTESNKKFLPFQQFGRDIADTTDAVRDPQTLEILDITPCSFGGVSVITPGTNTSNQVAVLYQDVNCTEVPVAIHADQLTPTWRVYSTGSNVFQTRAGCLIGAEHVNNSYECDIPIGAGICASYQTQTNSPRRARSVASQSIIAYTMSLGAENSVAYSNNSCAIPTNFTISVTTEILPVSMTKTSVDCTMYICGDSTECSNLLLQYGSFCTQLNRALTGIAVEQDKNTQEVFAQVKQIYKTPPIKDFGGFNFSQILPDPSKPSKRSFIEDLLFNKVTLADAGFIKQYGDCLGDIAARDLICAQKFNGLTVLPPLLTDEMIAQYTSALLAGTITSGWTFGAGAALQIPFAMQMAYRFNGIGVTQNVLYENQKLIANQFNSAIGKIQDSLSSTASALGKLQDVVNQNAQALNTLVKQLSSNFGAISSVLNDILSRLDKVEAEVQIDRLITGRLQSLQTYVTQQLIRAAEIRASANLAATKMSECVLGQSKRVDFCGKGYHLMSFPQSAPHGVVFLHVTYVPAQEKNFTCAPAICHDGKAHFPREGVFVSNGTHWFVTQRNFYEPQIITTDNTFVSGNCDVVIGIVNNTVYDPLQLELDSGGSGYIPEAPRDGQAYVRKDGEWVLLSTFL

SEQ ID NO: 10000 - protein, 1177 aa, Artificial Sequence
  SARS-CoV-2/India/1-31/2020__EPI_ISL_413523 spike protein (1-1147)(I712C_T1077C) Foldon construct
MFVFLVLLPLVSSQCVNLTTRTQLPPAYTNSFTRGVYYPDKVFRSSVLHSTQDLFLPFFSNVTWFHAIHVSGTNGTKRFDNPVLPFNDGVYFASTEKSNIIRGWIFGTTLDSKTQSLLIVNNATNVVIKVCEFQFCNDPFLGVYYHKNNKSWMESEFRVYSSANNCTFEYVSQPFLMDLEGKQGNFKNLREFVFKNIDGYFKIYSKHTPINLVRDLPQGFSALEPLVDLPIGINITRFQTLLALHRSYLTPGDSSSGWTAGAAAYYVGYLQPRTFLLKYNENGTITDAVDCALDPLSETKCTLKSFTVEKGIYQTSNFRVQPTESIVRFPNITNLCPFGEVFNATRFASVYAWNRKRISNCVADYSVLYNSASFSTFKCYGVSPTKLNDLCFTNVYADSFVIRGDEVRQIAPGQTGKIADYNYKLPDDFTGCVIAWNSNNLDSKVGGNYNYLYRLFRKSNLKPFERDISTEIYQAGSTPCNGVEGFNCYFPLQSYGFQPTNGVGYQPYRVVVLSFELLHAPATVCGPKKSTNLVKNKCVNFNFNGLTGTGVLTESNKKFLPFQQFGRDIADTTDAVRDPQTLEILDITPCSFGGVSVITPGTNTSNQVAVLYQDVNCTEVPVAIHADQLTPTWRVYSTGSNVFQTRAGCLIGAEHVNNSYECDIPIGAGICASYQTQTNSPRRARSVASQSIIAYTMSLGAENSVAYSNNSCAIPTNFTISVTTEILPVSMTKTSVDCTMYICGDSTECSNLLLQYGSFCTQLNRALTGIAVEQDKNTQEVFAQVKQIYKTPPIKDFGGFNFSQILPDPSKPSKRSFIEDLLFNKVTLADAGFIKQYGDCLGDIAARDLICAQKFNGLTVLPPLLTDEMIAQYTSALLAGTITSGWTFGAGAALQIPFAMQMAYRFNGIGVTQNVLYENQKLIANQFNSVIGKIQDSLSSTASALGKLQDVVNQNAQALNTLVKQLSSNFGAISSVLNDILSRLDKVEAEVQIDRLITGRLQSLQTYVTQQLIRAAEIRASANLAATKMSECVLGQSKRVDFCGKGYHLMSFPQSAPHGVVFLHVTYVPAQEKNFTCAPAICHDGKAHFPREGVFVSNGTHWFVTQRNFYEPQIITTDNTFVSGNCDVVIGIVNNTVYDPLQPELDSGGSGYIPEAPRDGQAYVRKDGEWVLLSTFL

SEQ ID NO: 10001 - protein, 1177 aa, Artificial Sequence
  SARS-CoV-2/Guangdong/GD2020087-P0008/2020__EPI_ISL_413863 spike protein (1-1147)(I712C_T1077C) Foldon construct
MFVFLVLLPLVSSQCVNLTTRTQLPPAYTNSFTRGVYYPDKVFRSSVLHSTQDLFLPFFSNVTWFHAIHVSGTNGTKRFDNPVLPFNDGVYFASTEKSNIIRGWIFGTTLDSKTQSLLIVNNATNVVIKVCEFQFCNDPFLGVYYHKNNKSWMESEFRVYSSANNCTFEYVSQPFLMDLEGKQGNFKNLREFVFKNIDGYFKIYSKHTPINLVRDLPQGFSALEPLVDLPIGINITRFQTLLALHRSYLTPGDSSSGWTAGAAAYYVGYLQPRTFLLKYNENGTITDAVDCALDPLSETKCTLKSFTVEKGIYQTSNFRVQPTESIVRFPNITNLCPFGEVFNATRFASVYAWNRKRISNCVADYSVLYNSASFSTFKCYGVSPTKLNDLCFTNVYADSFVIRGDEVREIAPGQTGKIADYNYKLPDDFTGCVIAWNSNNLDSKVGGNYNYLYRLFRKSNLKPFERDISTEIYQAGSTPCNGVEGFNCYFPLQSYGFQPTNGVGYQPYRVVVLSFELLHAPATVCGPKKSTNLVKNKCVNFNFNGLTGTGVLTESNKKFLPFQQFGRDIADTTDAVRDPQTLEILDITPCSFGGVSVITPGTNTSNQVAVLYQDVNCTEVPVAIHADQLTPTWRVYSTGSNVFQTRAGCLIGAEHVNNSYECDIPIGAGICASYQTQTNSPRRARSVASQSIIAYTMSLGAENSVAYSNNSCAIPTNFTISVTTEILPVSMTKTSVDCTMYICGDSTECSNLLLQYGSFCTQLNRALTGIAVEQDKNTQEVFAQVKQIYKTPPIKDFGGFNFSQILPDPSKPSKRSFIEDLLFNKVTLADAGFIKQYGDCLGDIAARDLICAQKFNGLTVLPPLLTDEMIAQYTSALLAGTITSGWTFGAGAALQIPFAMQMAYRFNGIGVTQNVLYENQKLIANQFNSAIGKIQDSLSSTASALGKLQDVVNQNAQALNTLVKQLSSNFGAISSVLNDILSRLDKVEAEVQIDRLITGRLQSLQTYVTQQLIRAAEIRASANLAATKMSECVLGQSKRVDFCGKGYHLMSFPQSAPHGVVFLHVTYVPAQEKNFTCAPAICHDGKAHFPREGVFVSNGTHWFVTQRNFYEPQIITTDNTFVSGNCDVVIGIVNNTVYDPLQPELDSGGSGYIPEAPRDGQAYVRKDGEWVLLSTFL

SEQ ID NO: 10002 - protein, 1177 aa, Artificial Sequence
  SARS-CoV-2/Sweden/01/2020__EPI_ISL_411951 spike protein (1-1147)(I712C_T1077C) Foldon construct
MFVFLVLLPLVSSQCVNLTTRTQLPPAYTNSFTRGVYYPDKVFRSSVLHSTQDLFLPFFSNVTWFHAIHVSGTNGTKRFDNPVLPFNDGVYFASTEKSNIIRGWIFGTTLDSKTQSLLIVNNATNVVIKVCEFQFCNDPFLGVYYHKNNKSWMESEFRVYSSANNCTFEYVSQPFLMDLEGKQGNFKNLREFVFKNIDGYFKIYSKHTPINLVRDLPQGFSALEPLVDLPIGINITRFQTLLALHRSYLTPGDSSSGWTAGAAAYYVGYLQPRTFLLKYNENGTITDAVDCALDPLSETKCTLKSFTVEKGIYQTSNFRVQPTESIVRFPNITNLCPFGEVFNATRFASVYAWNRKRISNCVADYSVLYNSASFSTFKCYGVSPTKLNDLCFTNVYADSFVIRGDEVRQIAPGQTGKIADYNYKLPDDFTGCVIAWNSNNLDSKVGGNYNYLYRLFRKSNLKPFERDISTEIYQAGSTPCNGVEGFNCYFPLQSYGFQPTNGVGYQPYRVVVLSFELLHAPATVCGPKKSTNLVKNKCVNFNFNGLTGTGVLTESNKKFLPFQQFGRDIADTTDAVRDPQTLEILDITPCSFGGVSVITPGTNTSNQVAVLYQDVNCTEVPVAIHADQLTPTWRVYSTGSNVFQTRAGCLIGAEHVNNSYECDIPIGAGICASYQTQTNSPRRARSVASQSIIAYTMSLGAENSVAYSNNSCAIPTNFTISVTTEILPVSMTKTSVDCTMYICGDSTECSNLLLQYGSFCTQLNRALTGIAVEQDKNTQEVFAQVKQIYKTPPIKDCGGFNFSQILPDPSKPSKRSFIEDLLFNKVTLADAGFIKQYGDCLGDIAARDLICAQKFNGLTVLPPLLTDEMIAQYTSALLAGTITSGWTFGAGAALQIPFAMQMAYRFNGIGVTQNVLYENQKLIANQFNSAIGKIQDSLSSTASALGKLQDVVNQNAQALNTLVKQLSSNFGAISSVLNDILSRLDKVEAEVQIDRLITGRLQSLQTYVTQQLIRAAEIRASANLAATKMSECVLGQSKRVDFCGKGYHLMSFPQSAPHGVVFLHVTYVPAQEKNFTCAPAICHDGKAHFPREGVFVSNGTHWFVTQRNFYEPQIITTDNTFVSGNCDVVIGIVNNTVYDPLQPELDSGGSGYIPEAPRDGQAYVRKDGEWVLLSTFL

SEQ ID NO: 10003 - protein, 1177 aa, Artificial Sequence
  SARS-CoV-2/Tianmen/HBCDC-HB-07/2020__EPI_ISL_412983 spike protein (1-1147)(I712C_T1077C) Foldon construct
MFVFLVLLPLVSSQCVNLTTRTQLPPAYTNSFTRGVYYPDKVFRSSVLHSTQDLFLPFFSNVTWFHAIHVSGTNGTKRFDNPVLPFNDGVYFASTEKSNIIRGWIFGTTLDSKTQSLLIVNNATNVVIKVCEFQFCNDPFLGVYYHKNNKSWMESEFRVYSSANNCTFEYVSQPFLMDLEGKQGNFKNLREFVFKNIDGYFKIYSKHTPINLVRDLPQGFSALEPLVDLPIGINITRFQTLLALHRSYLTPGDSSSGWTAGAAAYYVGYLQPRTFLLKYNENGTITDAVDCALDPLSETKCTLKSFTVEKGIYQTSNFRVQPTESIVRFPNITNLCPFGEVFNATRFASVYAWNRKRISNCVADYSVLYNSASFSTFKCYGVSPTKLNDLCFTNVYADSFVIRGDEVRQIAPGQTGKIADYNYKLPDDFTGCVIAWNSNNLDSKVGGNYNYLYRLFRKSNLKPFERDISTEIYQAGSTPCNGVEGFNCYFPLQSYGFQPTNGVGYQPYRVVVLSFELLHAPATVCGPKKSTNLVKNKCVNFNFNGLTGTGVLTESNKKFLPFQQFGRDIADTTDAVRDPQTLEILDITPCSFGGVSVITPGTNTSNQVAVLYQDLNCTEVPVAIHADQLTPTWRVYSTGSNVFQTRAGCLIGAEHVNNSYECDIPIGAGICASYQTQTNSPRRARSVASQSIIAYTMSLGAENSVAYSNNSCAIPTNFTISVTTEILPVSMTKTSVDCTMYICGDSTECSNLLLQYGSFCTQLNRALTGIAVEQDKNTQEVFAQVKQIYKTPPIKDFGGFNFSQILPDPSKPSKRSFIEDLLFNKVTLADAGFIKQYGDCLGDIAARDLICAQKFNGLTVLPPLLTDEMIAQYTSALLAGTITSGWTFGAGAALQIPFAMQMAYRFNGIGVTQNVLYENQKLIANQFNSAIGKIQDSLSSTASALGKLQDVVNQNAQALNTLVKQLSSNFGAISSVLNDILSRLDKVEAEVQIDRLITGRLQSLQTYVTQQLIRAAEIRASANLAATKMSECVLGQSKRVDFCGKGYHLMSFPQSAPHGVVFLHVTYVPAQEKNFTCAPAICHDGKAHFPREGVFVSNGTHWFVTQRNFYEPQIITTDNTFVSGNCDVVIGIVNNTVYDPLQPELDSGGSGYIPEAPRDGQAYVRKDGEWVLLSTFL

SEQ ID NO: 10004 - protein, 1177 aa, Artificial Sequence
  SARS-CoV-2/Hong Kong/case42_VM20002493/2020__EPI_ISL_414527 spike protein (1-1147)(I712C_T1077C) Foldon construct
MFVFLVLLPLVSSQCVNLTTRTQLPPAYTNSFTRGVYYPDKVFRSSVLHSTQDLFLPFFSNVTWFHAIHVSGTNGTKRFDNPVLPFNDGVYFASTEKSNIIRGWIFGTTLDSKTQSLLIVNNATNVVIKVCEFQFCNDPFLGVYYHKNNKSWMESEFRVYSSANNCTFEYVSQPFLMDLEGKQGNFKNLREFVFKNIDGYFKIYSKHTPINLVRDLPQGFSALEPLVDLPIGINITRFQTLLALHRSYLTPGDSSSGWTAGAAAYYVGYLQPRTFLLKYNENGTITDAVDCALDPLSETKCTLKSFTVEKGIYQTSNFRVQPTESIVRFPNITNLCPFGEVFNATRFASVYAWNRKRISNCVADYSVLYNSASFSTFKCYGVSPTKLNDLCFTNVYADSFVIRGDEVRQIAPGQTGKIADYNYKLPDDFTGCVIAWNSNNLDSKVGGNYNYLYRLFRKSNLKPFERDISTEIYQAGSTPCNGVEGFNCYFPLQSYGFQPTNGVGYQPYRVVVLSFELLHAPATVCGPKKSTNLVKNKCVNFNFNGLTGTGVLTESNKKFLPFQQFGRDIADTTDAVRDPQTLEILDITPCSFGGVSVITPGTNTSNQVAVLYQDVNCTEVPVAIHADQLTPTWRVYSTGSNVFQTRAGCLIGAEHVNNSYECDIPIGAGICASYQTQTNSPRRARSVASQSIIAYTMSLGAENSVAYSNNSCAIPTNFAISVTTEILPVSMTKTSVDCTMYICGDSTECSNLLLQYGSFCTQLNRALTGIAVEQDKNTQEVFAQVKQIYKTPPIKDFGGFNFSQILPDPSKPSKRSFIEDLLFNKVTLADAGFIKQYGDCLGDIAARDLICAQKFNGLTVLPPLLTDEMIAQYTSALLAGTITSGWTFGAGAALQIPFAMQMAYRFNGIGVTQNVLYENQKLIANQFNSAIGKIQDSLSSTASALGKLQDVVNQNAQALNTLVKQLSSNFGAISSVLNDILSRLDKVEAEVQIDRLITGRLQSLQTYVTQQLIRAAEIRASANLAATKMSECVLGQSKRVDFCGKGYHLMSFPQSAPHGVVFLHVTYVPAQEKNFTCAPAICHDGKAHFPREGVFVSNGTHWFVTQRNFYEPQIITTDNTFVSGNCDVVIGIVNNTVYDPLQPELDSGGSGYIPEAPRDGQAYVRKDGEWVLLSTFL

SEQ ID NO: 10005 - protein, 1177 aa, Artificial Sequence
  SARS-CoV-2/USA/CruiseA-23/2020__EPI_ISL_414482 spike protein (1-1147)(I712C_T1077C) Foldon construct
MFVFLVLLPLVSSQCVNLTTRTQLPPAYTNSFTRGVYYPDKVFRSSVLHSTQDLFLPFFSNVTWFHAIHVSGTNGTKRFDNPVLPFNDGVYFASTEKSNIIRGWIFGTTLDSKTQSLLIVNNATNVVIKVCEFQFCNDPFLGVYYHKNNKSWMESEFRVYSSANNCTFEYVSQPFLMDLEVKQGNFKNLREFVFKNIDGYFKIYSKHTPINLVRDLPQGFSALEPLVDLPIGINITRFQTLLALHRSYLTPGDSSSGWTAGAAAYYVGYLQPRTFLLKYNENGTITDAVDCALDPLSETKCTLKSFTVEKGIYQTSNFRVQPTESIVRFPNITNLCPFGEVFNATRFASVYAWNRKRISNCVADYSVLYNSASFSTFKCYGVSPTKLNDLCFTNVYADSFVIRGDEVRQIAPGQTGKIADYNYKLPDDFTGCVIAWNSNNLDSKVGGNYNYLYRLFRKSNLKPFERDISTEIYQAGSTPCNGVEGFNCYFPLQSYGFQPTNGVGYQPYRVVVLSFELLHAPATVCGPKKSTNLVKNKCVNFNFNGLTGTGVLTESNKKFLPFQQFGRDIADTTDAVRDPQTLEILDITPCSFGGVSVITPGTNTSNQVAVLYQDVNCTEVPVAIHADQLTPTWRVYSTGSNVFQTRAGCLIGAEHVNNSYECDIPIGAGICASYQTQTNSPRRARSVASQSIIAYTMSLGAENSVAYSNNSCAIPTNFTISVTTEILPVSMTKTSVDCTMYICGDSTECSNLLLQYGSFCTQLNRALTGIAVEQDKNTQEVFAQVKQIYKTPPIKDFGGFNFSQILPDPSKPSKRSFIEDLLFNKVTLADAGFIKQYGDCLGDIAARDLICAQKFNGLTVLPPLLTDEMIAQYTSALLAGTITSGWTFGAGAALQIPFAMQMAYRFNGIGVTQNVLYENQKLIANQFNSAIGKIQDSLSSTASALGKLQDVVNQNAQALNTLVKQLSSNFGAISSVLNDILSRLDKVEAEVQIDRLITGRLQSLQTYVTQQLIRAAEIRASANLAATKMSECVLGQSKRVDFCGKGYHLMSFPQSAPHGVVFLHVTYVPAQEKNFTCAPAICHDGKAHFPREGVFVSNGTHWFVTQRNFYEPQIITTDNTFVSGNCDVVIGIVNNTVYDPLQPELDSGGSGYIPEAPRDGQAYVRKDGEWVLLSTFL

SEQ ID NO: 10006 - protein, 1177 aa, Artificial Sequence
  SARS-CoV-2/Hong Kong/case85_VM20002868/2020__EPI_ISL_414519 spike protein (1-1147)(I712C_T1077C) Foldon construct
MFVFLVLVPLVSSQCVNLTTRTQLPPAYTNSFTRGVYYPDKVFRSSVLHSTQDLFLPFFSNVTWFHAIHVSGTNGTKRFDNPVLPFNDGVYFASTEKSNIIRGWIFGTTLDSKTQSLLIVNNATNVVIKVCEFQFCNDPFLGVYYHKNNKSWMESEFRVYSSANNCTFEYVSQPFLMDLEGKQGNFKNLREFVFKNIDGYFKIYSKHTPINLVRDLPQGFSALEPLVDLPIGINITRFQTLLALHRSYLTPGDSSSGWTAGAAAYYVGYLQPRTFLLKYNENGTITDAVDCALDPLSETKCTLKSFTVEKGIYQTSNFRVQPTESIVRFPNITNLCPFGEVFNATRFASVYAWNRKRISNCVADYSVLYNSASFSTFKCYGVSPTKLNDLCFTNVYADSFVIRGDEVRQIAPGQTGKIADYNYKLPDDFTGCVIAWNSNNLDSKVGGNYNYLYRLFRKSNLKPFERDISTEIYQAGSTPCNGVEGFNCYFPLQSYGFQPTNGVGYQPYRVVVLSFELLHAPATVCGPKKSTNLVKNKCVNFNFNGLTGTGVLTESNKKFLPFQQFGRDIADTTDAVRDPQTLEILDITPCSFGGVSVITPGTNTSNQVAVLYQDVNCTEVPVAIHADQLTPTWRVYSTGSNVFQTRAGCLIGAEHVNNSYECDIPIGAGICASYQTQTNSPRRARSVASQSIIAYTMSLGAENSVAYSNNSCAIPTNFTISVTTEILPVSMTKTSVDCTMYICGDSTECSNLLLQYGSFCTQLNRALTGIAVEQDKNTQEVFAQVKQIYKTPPIKDFGGFNFSQILPDPSKPSKRSFIEDLLFNKVTLADAGFIKQYGDCLGDIAARDLICAQKFNGLTVLPPLLTDEMIAQYTSALLAGTITSGWTFGAGAALQIPFAMQMAYRFNGIGVTQNVLYENQKLIANQFNSAIGKIQDSLSSTASALGKLQDVVNQNAQALNTLVKQLSSNFGAISSVLNDILSRLDKVEAEVQIDRLITGRLQSLQTYVTQQLIRAAEIRASANLAATKMSECVLGQSKRVDFCGKGYHLMSFPQSAPHGVVFLHVTYVPAQEKNFTCAPAICHDGKAHFPREGVFVSNGTHWFVTQRNFYEPQIITTDNTFVSGNCDVVIGIVNNTVYDPLQPELDSGGSGYIPEAPRDGQAYVRKDGEWVLLSTFL

SEQ ID NO: 10007 - protein, 1177 aa, Artificial Sequence; identical to SEQ ID NO: 9997
  SARS-CoV-2/England/200990660/2020__EPI_ISL_414523 spike protein (1-1147)(I712C_T1077C) Foldon construct

SEQ ID NO: 10008 - protein, 1177 aa, Artificial Sequence
  SARS-CoV-2/Australia/NSW09/2020__EPI_ISL_413595 spike protein (1-1147)(I712C_T1077C) Foldon construct
MFVFLVLLPLVSSQCVNLTTRTQLPPAYTNSFTRGVYYPDKVFRSSVLHSTQDLFLPFFSNVTWFHAIHVSGTNGTKRFDNPVLPFNDGVYFASTEKSNIIRGWIFGTTLDSKTQSLLIVNNATNVVIKVCEFQFCNDPFLGVYYHKNNKSWMESEFRVYSSANNCTFEYVSQPFLMDLEGKQGNFKNLREFVFKNIDGYFKIYSKHTPINLVRDLPQGFSALEPLVDLPIGINITRFQTLLALHRSYLTPGDSSSGWTAGAAAYYVGYLQPRTFLLKYNENGTITDAVDCALDPLSETKCTLKSFTVEKGIYQTSNFRVQPTESIVRFPNITNLCPFGEVFNATRFASVYAWNRKRISNCVADYSVLYNSASFSTFKCYGVSPTKLNDLCFTNVYADSFVIRGDEVRQIAPGQTGKIADYNYKLPDDFTGCVIAWNSNNLDSKVGGNYNYLYRLFRKSNLKPFERDISTEIYQAGSTPCNGVEGFNCYFPLQSYGFQPTNGVGYQPYRVVVLSFELLHAPATVCGPKKSTNLVKNKCVNFNFNGLTGTGVLTESNKKFLPFQQFGRDIADTTDAVRDPQTLEILDITPCSFGGVSVITPGTNTSNQVAVLYQDVNCTEVPVAIHADQLTPTWRVYSTGSNVFQTRAGCLIGAEHVNNSYECDIPIGAGICASYQTQTNSPRRARSVASQSIIAYTMSLGAENSVAYSNNSCAIPTNFTISVTTEILPVSMTKTSVDCTMYICGDSTECSNLLLQYGSFCTQLNRALTGIAVEQDKNTQEVFAQVKQIYKTPPIKDFGGFNFSQILPDPSKPSKRSFIEDLLFNKVTLADAGFIKQYGDCLGDIAARDLICAQKFNGLTVLPPLLTDEMIAQYTSALLAGTITSGWTFGAGAALQIPFAMQMAYRFNGIGVTQNVLYENQKLIANQFNSAIGKIQDSLSFTASALGKLQDVVNQNAQALNTLVKQLSSNFGAISSVLNDILSRLDKVEAEVQIDRLITGRLQSLQTYVTQQLIRAAEIRASANLAATKMSECVLGQSKRVDFCGKGYHLMSFPQSAPHGVVFLHVTYVPAQEKNFTCAPAICHDGKAHFPREGVFVSNGTHWFVTQRNFYEPQIITTDNTFVSGNCDVVIGIVNNTVYDPLQPELDSGGSGYIPEAPRDGQAYVRKDGEWVLLSTFL

SEQ ID NO: 10009 - protein, 1177 aa, Artificial Sequence; identical to SEQ ID NO: 9989
  SARS-CoV-2/Australia/NSW10/2020__EPI_ISL_413596 spike protein (1-1147)(I712C_T1077C) Foldon construct

SEQ ID NO: 10010 - protein, 1177 aa, Artificial Sequence
  SARS-CoV-2/Switzerland/1000477797/2020__EPI_ISL_413023 spike protein (1-1147)(I712C_T1077C) Foldon construct
MFVFLVLLPLVSSQCVNLTTRTQLPPAYTNSFTRGVYYPDKVFRSSVLHSTQDLFLPFFSNVTWFHAIHVSGTNGTKRFDNPVLPFNDGVYFASTEKSNIIRGWIFGTTLDSKTQSLLIVNNATNVVIKVCEFQFCNDPFLGVYYHKNNKSWMESEFRVYSSANNCTFEYVSQPFLMDLEGKQGNFKNLREFVFKNIDGYFNIYSKHTPINLVRDLPQGFSALEPLVDLPIGINITRFQTLLALHRSYLTPGDSSSGWTAGAAAYYVGYLQPRTFLLKYNENGTITDAVDCALDPLSETKCTLKSFTVEKGIYQTSNFRVQPTESIVRFPNITNLCPFGEVFNATRFASVYAWNRKRISNCVADYSVLYNSASFSTFKCYGVSPTKLNDLCFTNVYADSFVIRGDEVRQIAPGQTGKIADYNYKLPDDFTGCVIAWNSNNLDSKVGGNYNYLYRLFRKSNLKPFERDISTEIYQAGSTPCNGVEGFNCYFPLQSYGFQPTNGVGYQPYRVVVLSFELLHAPATVCGPKKSTNLVKNKCVNFNFNGLTGTGVLTESNKKFLPFQQFGRDIADTTDAVRDPQTLEILDITPCSFGGVSVITPGTNTSNQVAVLYQGVNCTEVPVAIHADQLTPTWRVYSTGSNVFQTRAGCLIGAEHVNNSYECDIPIGAGICASYQTQTNSPRRARSVASQSIIAYTMSLGAENSVAYSNNSCAIPTNFTISVTTEILPVSMTKTSVDCTMYICGDSTECSNLLLQYGSFCTQLNRALTGIAVEQDKNTQEVFAQVKQIYKTPPIKDFGGFNFSQILPDPSKPSKRSFIEDLLFNKVTLADAGFIKQYGDCLGDIAARDLICAQKFNGLTVLPPLLTDEMIAQYTSALLAGTITSGWTFGAGAALQIPFAMQMAYRFNGIGVTQNVLYENQKLIANQFNSAIGKIQDSLSSTASALGKLQDVVNQNAQALNTLVKQLSSNFGAISSVLNDILSRLDKVEAEVQIDRLITGRLQSLQTYVTQQLIRAAEIRASANLAATKMSECVLGQSKRVDFCGKGYHLMSFPQSAPHGVVFLHVTYVPAQEKNFTCAPAICHDGKAHFPREGVFVSNGTHWFVTQRNFYEPQIITTDNTFVSGNCDVVIGIVNNTVYDPLQPELDSGGSGYIPEAPRDGQAYVRKDGEWVLLSTFL

SEQ ID NO: 10011 - protein, 1177 aa, Artificial Sequence
  SARS-CoV-2/Belgium/BA-02291/2020__EPI_ISL_415159 spike protein (1-1147)(I712C_T1077C) Foldon construct
MFVFLVLLPLVSSQCVNLTTRTQLPPAYTNSFTRGVYYPDKVFRSSVLHSTQDLFLPFFSNVTWFHAIHVSGTNGTKRFDNPVLPFNDGVYFASTEKSNIIRGWIFGTTLDSKTQSLLIVNNATNVVIKVCEFQFCNDPFLGVYYHKNNKSWMESEFRVYSSANNCTFEYVSQPFLMDLEGKQGNFKNLREFVFKNIDGYFKIYSKHTPINLVRDLPQGFSALEPLVDLPIGINITRFQTLLALHRSYLTPGDSSSGWTAGAAAYYVGYLQPRTFLLKYNENGTITDAVDCALDPLSETKCTLKSFTVEKGIYQTSNFRVQPTESIVRFPNITNLCPFGEVFNATRFASVYAWNRKRISNCVADYSVLYNSASFSTFKCYGVSPTKLNDLCFTNVYADSFVIRGDEVRQIAPGQTGKIADYNYKLPDDFTGCVIAWNSNNLDSKVGGNYNYLYRLFRRSNLKPFERDISTEIYQAGSTPCNGVEGFNCYFPLQSYGFQPTNGVGYQPYRVVVLSFELLPAPATVCGPKKSTNLVKNKCVNFNFNGLTGTGVLTESNKKFLPFQQFGRDIADTTDAVRDPQTLEILDITPCSFGGVSVITPGTNTSNQVAVLYQGVNCTEVPVAIHADQLTPTWRVYSTGSNVFQTRAGCLIGAEHVNNSYECDIPIGAGICASYQTQTNSPRRARSVASQSIIAYTMSLGAENSVAYSNNSCAIPTNFTISVTTEILPVSMTKTSVDCTMYICGDSTECSNLLLQYGSFCTQLNRALTGIAVEQDKNTQEVFAQVKQIYKTPPIKDFGGFNFSQILPDPSKPSKRSFIEDLLFNKVTLADAGFIKQYGDCLGDIAARDLICAQKFNGLTVLPPLLTDEMIAQYTSALLAGTITSGWTFGAGAALQIPFAMQMAYRFNGIGVTQNVLYENQKLIANQFNSAIGKIQDSLSSAAPALGKLQDVVNQNAQALNTLVKQLSSNFGAISSVLNDILSRLDKVEAEVQIDRLITGRLQSLQTYVTQQLIRAAEIRASANLAATKMSECVLGQSKRVDFCGKGYHLMSFPQSAPHGVVFLHVTYVPAQEKNFTCAPAICHDGKAHFPREGVFVSNGTHWFVTQRNFYEPQIITTDNTFVSGNCDVVIGIVNNTVYDPLQPELDSGGSGYIPEAPRDGQAYVRKDGEWVLLSTFL

SEQ ID NO: 10012 - protein, 1177 aa, Artificial Sequence
  SARS-CoV-2/USA/WA8-UW5/2020__EPI_ISL_413486 spike protein (1-1147)(I712C_T1077C) Foldon construct
MFVFLVLLPLVSSQCVNLTTRTQLPPAYTNSFTRGVYYPDKVFRSSVLHSTQDLFLPFFSNVTWFHAIHVSGTNGTKRFDNPVLPFNDGVYFASTEKSNIIRGWIFGTTLDSKTQSLLIVNNATNVVIKVCEFQFCNDPFLGVYYHKNNKSWMESEFRVYSSANNCTFEYVSQPFLMDLEGKQGNFKNLREFVFKNIDGYFKIYSKHTPINLVRDLPQGFSALEPLVDLPIGINITRFQTLLALHRSYLTPGDSSSGWTAGAAAYYVGYLQPRTFLLKYNENGTITDAVDCALDPLSETKCTLKSFTVEKGIYQTSNFRVQPTESIVRFPNITNLCPFGEVFNATRFASVYAWNRKRISNCVADYSVLYNSASFSTFKCYGVSPTKLNDLCFTNVYADSFVIRGDEVRQIAPGQTGKIADYNYKLPDDFTGCVIAWNSNNLDSKVGGNYNYLYRLFRKSNLKPFERDISTEIYQAGSTPCNGVEGFNCYFPLQSYGFQPTNGVGYQPYRVVVLSFELLHAPATVCGPKKSTNLVKNKCVNFNFNGLTGTGVLTESNKKFLPFQQFGRDIADTTDAVRDPQTLEILDITPCSFGGVSVITPGTNTSNQVAVLYQDVNCTEVPVAIHADQLTPTWRVYSTGSNVFQTRAGCLIGAEYVNNSYECDIPIGAGICASYQTQTNSPRRARSVASQSIIAYTMSLGAENSVAYSNNSCAIPTNFTISVTTEILPVSMTKTSVDCTMYICGDSTECSNLLLQYGSFCTQLNRALTGIAVEQDKNTQEVFAQVKQIYKTPPIKDFGGFNFSQILPDPSKPSKRSFIEDLLFNKVTLADAGFIKQYGDCLGDIAARDLICAQKFNGLTVLPPLLTDEMIAQYTSALLAGTITSGWTFGAGAALQIPFAMQMAYRFNGIGVTQNVLYENQKLIANQFNSAIGKIQDSLSSTASALGKLQDVVNQNAQALNTLVKQLSSNFGAISSVLNDILSRLDKVEAEVQIDRLITGRLQSLQTYVTQQLIRAAEIRASANLAATKMSECVLGQSKRVDFCGKGYHLMSFPQSAPHGVVFLHVTYVPAQEKNFTCAPAICHDGKAHFPREGVFVSNGTHWFVTQRNFYEPQIITTDNTFVSGNCDVVIGIVNNTVYDPLQPELDSGGSGYIPEAPRDGQAYVRKDGEWVLLSTFL

SEQ ID NO: 10013 - protein, 1177 aa, Artificial Sequence
  SARS-CoV-2/England/20102000506/2020__EPI_ISL_415147 spike protein (1-1147)(I712C_T1077C) Foldon construct
MFVFLVLLPLVSSQCVNLTTRTQLPPAYTNSFTRGVYYPDKVFRSSVLHSTQDLFLPFFSNVTWFHAIHVSGTNGTKRFDNPVLPFNDGVYFASTEKSNIIRGWIFGTTLDSKTQSLLIVNNATNVVIKVCEFQFCNDPFLGVYYHKNNKSWMESEFRVYSSANNCTFEYVSQPFLMDLEGKQGNFKNLREFVFKNIDGYFKIYSKHTPINLVRDLPQGFSALEPLVDLPIGINITRFQTLLALHRSYLTPGDSSSGWTAGAAAYYVGYLQPRTFLLKYNENGTITDAVDCALDPLSETKCTLKSFTVEKGIYQTSNFRVQPTESIVRFPNITNLCPFGEVFNATRFASVYAWNRKRISNCVADYSVLYNSASFSTFKCYGVSPTKLNDLCFTNVYADSFVIRGDEVRQIAPGQTGKIADYNYKLPDDFTGCVIAWNSNNLDSKVGGNYNYLYRLFRKSNLKPFERDISTEIYQAGSTPCNGVEGFNCYFPLQSYGFQPTNGVGYQPYRVVVLSFELLHAPATVCGPKKSTNLVKNKCVNFNFNGLTGTGVLTESNKKFLPFQQFGRDIADTTDAVRDPQTLEILDITPCSFGGVSVITPGTNTSNQVAVLYQGVNCTEVPVAIHADQLTPTWRVYSTGSNVFQTRAGCLIGAEHVNNSYECDIPIGAGICASYQTQTNSPRRARSVASQSIIAYTMSLGAENSVAYSNNSCAIPTNFTISVTTEILPVSMTKTSVDCTMYICGDSTECSNLLLQYGSFCTQLNRALTGIAVEQDKNTQEVFAQVKQIYKTPPIKDFGGFNFSQILPDPSKPSKRSFIEDLLFNKVTLADAGFIKQYGYCLGDIAARDLICAQKFNGLTVLPPLLTDEMIAQYTSALLAGTITSGWTFGAGAALQIPFAMQMAYRFNGIGVTQNVLYENQKLIANQFNSAIGKIQDSLSSTASALGKLQDVVNQNAQALNTLVKQLSSNFGAISSVLNDILSRLDKVEAEVQIDRLITGRLQSLQTYVTQQLIRAAEIRASANLAATKMSECVLGQSKRVDFCGKGYHLMSFPQSAPHGVVFLHVTYVPAQEKNFTCAPAICHDGKAHFPREGVFVSNGTHWFVTQRNFYEPQIITTDNTFVSGNCDVVIGIVNNTVYDPLQPELDSGGSGYIPEAPRDGQAYVRKDGEWVLLSTFL

SEQ ID NO: 10014 - protein, 1177 aa, Artificial Sequence
  SARS-CoV-2/Belgium/VAG-03013/2020__EPI_ISL_415155 spike protein (1-1147)(I712C_T1077C) Foldon construct
MFVFLVLLPLVSSQCVNLTTRTQLPPAYTNSFTRGVYYPDKVFRSSVLHSTQDLFLPFFSNVTWFHAIHVSGTNGTKRFDNPVLPFNDGVYFASTEKSNIIRGWIFGTTLDSKTQSLLIVNNATNVVIKVCEFQFCNDPFLGVYYHKNNKSWMESEFRVYSSANNCTFEYVSQPFLMDLEGKQGNFKNLREFVFKNIDGYFKIYSKHTPINLVRDLPQGFSALEPLVDLPIGINITRFQTLLALHRSYLTPGDSSSGWTAGAAAYYVGYLQPRTFLLKYNENGTITDAVDCALDPLSETKCTLKSFTVEKGIYQTSNFRVQPTESIVRFPNITNLCPFGEVFNATRFASVYAWNRKRISNCVADYSVLYNSASFSTFKCYGVSPTKLNDLCFTNVYADSFVIRGDEVRQIAPGQTGKIADYNYKLPDDFTGCVIAWNSNNLDSKVGGNYNYLYRLFRKSNLKPFERDISTEIYQAGSTPCNGVEGFNCYFPLQSYGFQPTNGVGYQPYRVVVLSFELLHAPATVCGPKKSTNLVKNKCVNFNFNGLTGTGVLTESNKKFLPFQQFGRDIADTTDAVRDPQTLEILDITPCSFGGVSVITPGTNTSNQVAVLYQGVNCTEVPVAIHADQLTPTWRVYSTGSNVFQTRAGCLIGAEHVNNSYECDIPIGAGICASYQTQTNSPRRARSVASQSIIAYTMSLGAENSVAYSNNSCAIPTNFTISVTTEILPVSMTKTSVDCTMYICGDSTECSNLLLQYGSFCTQLNRALTGIAVEQDKNTQEVFAQVKQIYKTPPIKDFGGFNFSQILPDPSKPSKRSFIEDLLFNKVTLADAGFIKQYGDCLGDIAARDLICAQKFNGLTVLPPLLTDEMIAQYTSALLAGTITSGWTFGAGAALQIPFAMQMAYRFNGIGVTQNVLYENQKLIANQFNSAIGKIQDSLSSTATALGKLQDVVNQNAQALNTLVKQLSSNFGAISSVLNDILSRLDKVEAEVQIDRLITGRLQSLQTYVTQQLIRAAEIRASANLAATKMSECVLGQSKRVDFCGKGYHLMSFPQSAPHGVVFLHVTYVPAQEKNFTCAPAICHDGKAHFPREGVFVSNGTHWFVTQRNFYEPQIITTDNTFVSGNCDVVIGIVNNTVYDPLQPELDSGGSGYIPEAPRDGQAYVRKDGEWVLLSTFL

SEQ ID NO: 10015 - protein, 1177 aa, Artificial Sequence
  SARS-CoV-2/Belgium/BC-03016/2020__EPI_ISL_415157 spike protein (1-1147)(I712C_T1077C) Foldon construct
MFVFLVLLPLVSSQCVNLTTRTQLPPAYTNSFTRGVYYPDKVFRSSVLHSTQDLFLPFFSNVTWFHAIHVSGTNGTKRFDNPVLPFNDGVYFASTEKSNIIRGWIFGTTLDSKTQSLLIVNNATNVVIKVCEFQFCNDPFLGVYYHKNNKSWMESEFRVYSSANNCTFEYVSQPFLMDLEGKQGNFKNLREFVFKNIDGYFKIYSKHTPINLVRDLPQGFSALEPLVDLPIGINITRFQTLLALHRSYLTPGDSSSGWTAGAAAYYVGYLQPRTFLLKYNENGTITDAVDCALDPLSETKCTLKSFTVEKGIYQTSNFRVQPTESIVRFPNITNLCPFGEVFNATRFASVYAWNRKRISNCVADYSVLYNSASFSTFKCYGVSPTKLNDLCFTNVYADSFVIRGDEVRQIAPGQTGKIADYNYKLPDDFTGCVIAWNSNNLDSKVGGNYNYLYRLFRKSNLKPFERDISTEIYQAGSTPCNGVEGFNCYFPLQSYGFQPTNGVGYQPYRVVVLSFELLHAPATVCGPKKSTNLVKNKCVNFNFNGLTGTGVLTESNKKFLPFQQFGRDIADTTDAVRDPQTLEILDITPCSFGGVSVITPGTNTSNQVAVLYQGVNCTEVPVAIHADQLTPTWRVYSTGSNVFQTRAGCLIGAEHVNNSYECDIPIGAGICASYQTQTNSPRRARSVASQSIIAYTMSLGAENSVAYSNNSCAIPTNFTISVTTEILPVSMTKTSVDCTMYICGDSTECSNLLLQYGSFCTQLNRALTGIAVEQDKNTQEVFAQVKQIYKTPPIKDFGGFNFSQILPDPSKPSKRSFIEDLLFNKVTLADAGFIKQYGDCLGDIAARDLICAQKFNGLTVLPPLLTDEMIAQYTSALLAGTITSGWTFGAGAALQIPFAMQMAYRFNGIGVTQNVLYENQKLIANQFNSAIGKIQDSLSSTAPALGKLQDVVNQNAQALNTLVKQLSSNFGAISSVLNDILSRLDKVEAEVQIDRLITGRLQSLQTYVTQQLIRAAEIRASANLAATKMSECVLGQSKRVDFCGKGYHLMSFPQSAPHGVVFLHVTYVPAQEKNFTCAPAICHDGKAHFPREGVFVSNGTHWFVTQRNFYEPQIITTDNTFVSGNCDVVIGIVNNTVYDPLQPELDSGGSGYIPEAPRDGQAYVRKDGEWVLLSTFL

SEQ ID NO: 10016 - protein, 1177 aa, Artificial Sequence
  SARS-CoV-2/Germany/BavPat3/2020__EPI_ISL_414521 spike protein (1-1147)(I712C_T1077C) Foldon construct
MFVFLVLLPLVSSQCVNLTTRTQLPPAYTNSFTRGVYYPDKVFRSSVLHSTQDLFLPFFSNVTWFHAIHVSGTNGTKRFDNPVLPFNDGVYFASTEKSNIIRGWIFGTTLDSKTQSLLIVNNATNVVIKVCEFQFCNDPFLGVYYHKNNKSWMESEFRVYSSANNCTFEYVSQPFLMDLEGKQGNFKNLREFVFKNIDGYFKIYSKHTPINLVRDLPQGFSALEPLVDLPIGINITRFQTLLALHRSYLTPGDSSSGWTAGAAAYYVGYLQPRTFLLKYNENGTITDAVDCALDPLSETKCTLKSFTVEKGIYQTSNFRVQPTESIVRFPNITNLCPFGEVFNATRFASVYAWNRKRISNCVADYSVLYNSASFSTFKCYGVSPTKLNDLCFTNVYADSFVIRGDEVRQIAPGQTGKIADYNYKLPDDFTGCVIAWNSNNLDSKVGGNYNYLYRLFRKSNLKPFERDISTEIYQAGSTPCNGVEGFNCYFPLQSYGFQPTNGVGYQPYRVVVLSFELLHAPATVCGPKKSTNLVKNKCVNFNFNGLTGTGVLTESNKKFLPFQQFGRDIADTTDAVRDPQTLEILDITPCSFGGVSVITPGTNTSNQVAVLYQDVNCTEVPVAIHADQLTPTWRVYSTGSNVFQTRAGCLIGAEHVNNSYECDIPIGAGICASYQTQTNSPRRARSVASQSIIAYTMSLGAENSVAYSNNSCAIPTNFTISVTTEILPVSMTKTSVDCTMYICGDSTECSNLLLQYGSFCTQLNRALTGIAVEQDKNTQQVFAQVKQIYKTPPIKDFGGFNFSQILPDPSKPSKRSFIEDLLFNKVTLADAGFIKQYGDCLGDIAARDLICAQKFNGLTVLPPLLTDEMIAQYTSALLAGTITSGWTFGAGAALQIPFAMQMAYRFNGIGVTQNVLYENQKLIANQFNSAIGKIQDSLSSTASALGKLQDVVNQNAQALNTLVKQLSSNFGAISSVLNDILSRLDKVEAEVQIDRLITGRLQSLQTYVTQQLIRAAEIRASANLAATKMSECVLGQSKRVDFCGKGYHLMSFPQSAPHGVVFLHVTYVPAQEKNFTCAPAICHDGKAHFPREGVFVSNGTHWFVTQRNFYEPQIITTDNTFVSGNCDVVIGIVNNTVYDPLQPELDSGGSGYIPEAPRDGQAYVRKDGEWVLLSTFL

SEQ ID NO: 10017 - protein, 1177 aa, Artificial Sequence
  SARS-CoV-2/France/HF1805/2020__EPI_ISL_414628 spike protein (1-1147)(I712C_T1077C) Foldon construct
MFVFLVLLPLVSSQCVNLTTRTQLPPAYTNSFTRGVYYPDKVFRSSVLHSTQDLFLPFFSNVTWFHAIHVSGTNGTKRFDNPVLPFNDGVYFASTEKSNIIRGWIFGTTLDSKTQSLLIVNNATNVVIKVCEFQFCNDPFLGVYYHKNNKSWMESEFRVYSSANNCTFEYVSQPFLMDLEGKQGNFKNLREFVFKNIDGYFKIYSKHTPINLVRDLPQGFSALEPLVDLPIGINITRFQTLLALHRSYLTPGDSSSGWTAGAAAYYVGYLQPRTFLLKYNENGTITDAVDCALDPLSETKCTLKSFTVEKGIYQTSNFRVQPTESIVRFPNITNLCPFGEVFNATRFASVYAWNRKRISNCVADYSVLYNSASFSTFKCYGVSPTKLNDLCFTNVYADSFVIRGDEVRQIAPGQTGKIADYNYKLPDDFTGCVIAWNSNNLDSKVGGNYNYLYRLFRKSNLKPFERDISTEIYQAGSTPCNGVEGFNCYFPLQSYGFQPTNGVGYQPYRVVVLSFELLHAPATVCGPKKSTNLVKNKCVNFNFNGLTGTGVLTESNKKFLPFQQFGRDIADTTDAVRDPQTLEILDITPCSFGGVSVITPGTNTSNQVAVLYQGVNCTEVPVAIHADQLTPTWRVYSTGSNVFQTRAGCLIGAEHVNNSYECDIPIGAGICASYQTQTNSPRRARSVASQSIIAYTMSLGAENSVAYSNNSCAIPTNFTISVTTEILPVSMTKTSVDCTMYICGDSTECSNLLLQYGSFCTQLNRALTGIAVEQDKNTQEVFAQVKQIYKTPPIKDFGGFNFSQILPDPSKPSKRSFIEDLLFNKVTLADAGFIKQYGDCLGDIAARDLICAQKFNGLTVLPPLLTDEMIAQYTSALLAGTITSGWTFGAGAALQIPFAMQMAYRFNGIGVTQNVLYENQKLIANQFNSAIGKIQDSLSSTASALGKLQDVVNQNAQALNTLVKQLSSNFGAISSVLNDILSRLDKVEAEVQIDRLITGRLQSLQTYVTQQLIRAAEIRASANLAATKMSECVLGQSKRVDFCGKGYHLMSFPQSAPHGVVFLHVTYVPAQEKNFTCAPAICHDGKAHFPREGVFVSNGTHWFVTQRNFYEPQIITTDNTFVSGNCDVVIGVVNNTVYDPLQPELDSGGSGYIPEAPRDGQAYVRKDGEWVLLSTFL

SEQ ID NO: 10018 - protein, 1177 aa, Artificial Sequence
  SARS-CoV-2/Netherlands/ZuidHolland_9/2020__EPI_ISL_414445 spike protein (1-1147)(I712C_T1077C) Foldon construct
MFVFLVLLPLVSSQCVNLTTRTQLPPAYTNSFTRGVYYPDKVFRSSVLHSTQDLFLPFFSNVTWFHAIHVSGTNGTKRFDNPVLPFNDGVYFASTEKSNIIRGWIFGTTLDSKTQSLLIVNNATNVVIKVCEFQFCNDPFLGVYYHKNNKSWMESEFRVYSSANNCTFEYVSQPFLMDLEGKQGNFKNLREFVFKNIDGYFKIYSKHTPINLVRDLPQGFSALEPLVDLPIGINITRFQTLLALHRSYLTPGDSSSGWTAGAAAYYVGYLQPRTFLLKYNENGTITDAVDCALDPLSETKCTLKSFTVEKGIYQTSNFRVQPTESIVRFPNITNLCPFGEVFNATRFASVYAWNRKRISNCVADYSVLYNSASFSTFKCYGVSPTKLNDLCFTNVYADSFVIRGDEVRQIAPGQTGKIADYNYKLPDDFTGCVIAWNSNNLDSKVGGNYNYLYRLFRKSNLKPFERDISTEIYQAGSTPCNGVEGFNCYFPLQSYGFQPTNGVGYQPYRVVVLSFELLHAPATVCGPKKSTNLVKNKCVNFNFNGLTGTGVLTESNKKFLPFQQFGRDIADTTDAVRDPQTLEILDITPCSFGGVSVITPGTNTSNQVAVLYQGVNCTEVPVAIHADQLTPTWRVYSTGSNVFQTRAGCLIGAEHVNNSYECDIPIGAGICASYQTQTNSPRRARSVASQSIIAYTMSLGAENSVAYSNNSCAIPTNFTISVTTEILPVSMTKTSVDCTMYICGDSTECSNLLLQYGSFCTQLNRALTGIAVEQDKNTQEVFAQVKQIYKTPPIKDFGGFNFSQILPDPSKPSKRSFIEDLLFNKVTLADAGFIKQYGDCLGDIAARDLICVQKFNGLTVLPPLLTDEMIAQYTSALLAGTITSGWTFGAGAALQIPFAMQMAYRFNGIGVTQNVLYENQKLIANQFNSAIGKIQDSLSSTASALGKLQDVVNQNAQALNTLVKQLSSNFGAISSVLNDILSRLDKVEAEVQIDRLITGRLQSLQTYVTQQLIRAAEIRASANLAATKMSECVLGQSKRVDFCGKGYHLMSFPQSAPHGVVFLHVTYVPAQEKNFTCAPAICHDGKAHFPREGVFVSNGTHWFVTQRNFYEPQIITTDNTFVSGNCDVVIGIVNNTVYDPLQPELDSGGSGYIPEAPRDGQAYVRKDGEWVLLSTFL

SEQ ID NO: 10019 - protein, 1177 aa, Artificial Sequence
  SARS-CoV-2/Finland/FIN03032020A/2020__EPI_ISL_413602 spike protein (1-1147)(I712C_T1077C) Foldon construct
MFVFLVLLPLVSSQCVNLTTRTQLPPAYTNSFTRGVYYPDKVFRSSVLHSTQDLFLPFFSNVTWFHAIHVSGTNGTKRFDNPVLPFNDGVYFASTEKSNIIRGWIFGTTLDSKTQSLLIVNNATNVVIKVCEFQFCNDPFLGVYYHKNNKSWMESEFRVYSSANNCTFEYVSQPFLMDLEGKQGNFKNLREFVFKNIDGYFKIYSKHTPINLVRDLPQGFSALEPLVDLPIGINITRFQTLLALHRSYLTPGDSSSGWTAGAAAYYVGYLQPRTFLLKYNENGTITDAVDCALDPLSETKCTLKSFTVEKGIYQTSNFRVQPTESIVRFPNITNLCPFGEVFNATRFASVYAWNRKRISNCVADYSVLYNSASFSTFKCYGVSPTKLNDLCFTNVYADSFVIRGDEVRQIAPGQTGKIADYNYKLPDDFTGCVISWNSNNLDSKVGGNYNYLYRLFRKSNLKPFERDISTEIYQAGSTPCNGVEGFNCYFPLQSYGFQPTNGVGYQPYRVVVLSFELLHAPATVCGPKKSTNLVKNKCVNFNFNGLTGTGVLTESNKKFLPFQQFGRDIADTTDAVRDPQTLEILDITPCSFGGVSVITPGTNTSNQVAVLYQGVNCTEVPVAIHADQLTPTWRVYSTGSNVFQTRAGCLIGAEHVNNSYECDIPIGAGICASYQTQTNSPRRARSVASQSIIAYTMSLGAENSVAYSNNSCAIPTNFTISVTTEILPVSMTKTSVDCTMYICGDSTECSNLLLQYGSFCTQLNRALTGIAVEQDKNTQEVFAQVKQIYKTPPIKDFGGFNFSQILPDPSKPSKRSFIEDLLFNKVTLADAGFIKQYGDCLGDIAARDLICAQKFNGLTVLPPLLTDEMIAQYTSALLAGTITSGWTFGAGAALQIPFAMQMAYRFNGIGVTQNVLYENQKLIANQFNSAIGKIQDSLSSTASALGKLQDVVNQNAQALNTLVKQLSSNFGAISSVLNDILSRLDKVEAEVQIDRLITGRLQSLQTYVTQQLIRAAEIRASANLAATKMSECVLGQSKRVDFCGKGYHLMSFPQSAPHGVVFLHVTYVPAQEKNFTCAPAICHDGKAHFPREGVFVSNGTHWFVTQRNFYEPQIITTDNTFVSGNCDVVIGIVNNTVYDPLQPELDSGGSGYIPEAPRDGQAYVRKDGEWVLLSTFL

SEQ ID NO: 10020 - protein, 1177 aa, Artificial Sequence
  SARS-CoV-2/France/GE1977/2020__EPI_ISL_414632 spike protein (1-1147)(I712C_T1077C) Foldon construct
MFVFLVLLPLVSSQCVNLTTRTQLPPAYTNSFTRGVYYPDKVFRSSVLHSTQDLFLPFFSNVTWFHAIHVSGTNGTKRFDNPVLPFNDGVYFASTEKSNIIRGWIFGTTLDSKTQSLLIVNNATNVVIKVCEFQFCNDPFLGVYYHKNNKSWMESEFRVYSSANNCTFEYVSQPFLMDLEGKQGNFKNLREFVFKNIDGYFKIYSKHTPINLVRDLPQGFSALEPLVDLPIGINITRFQTLLALHRSYLTPGDSSSGWTAGAAAYYVGYLQPRTFLLKYNENGTITDAVDCALDPLSETKCTLKSFTVEKGIYQTSNFRVQPTESIVRFPNITNLCPFGEVFNATRFASVYAWNRKRISNCVADYSVLYNSASFSTFKCYGVSPTKLNDLCFTNVYADSFVIRGDEVRQIAPGQTGKIADYNYKLPDDFTGCVIAWNSNNLDSKVGGNYNYLYRLFRKSNLKPFERDISTEIYQAGSTPCNGVEGFNCYFPLQSYGFQPTNGVGYQPYRVVVLSFELLHAPATVCGPKKSTNLVKNKCVNFNFNGLTGTGVLTESNKKFLPFQQFGRDIADTTDAVRDPQTLEILDITPCSFGGVSVITPGTNTSNQVAVLYQGVNCTEVPVAIHADQLTPTWRVYSTGSNVFQTRAGCLIGAEHVNNSYECDIPIGAGICASYQTQTNSPRRARSVASQSIIAYTMSLGAENSVAYSNNSCAIPTNFTISVTTEILPVSMTKTSVDCTMYICGDSTECSNLLLQYGSFCTQLNRALTGIAVEQDKNTQEVFAQVKQIYKTPPIKDFGGFNFSQILPDPSKPSKRSFIEDLLFNKVTLADAGFIKQYGDCLGDIAARDLICAQKFNGLTVLPPLLTDEMIAQYTSALLAGTITSGWTFGAGAALQIPFAMQMAYRFNGIGVTQNVLYENQKLIANQFNSAIGKIQDSLFSTASALGKLQDVVNQNAQALNTLVKQLSSNFGAISSVLNDILSRLDKVEAEVQIDRLITGRLQSLQTYVTQQLIRAAEIRASANLAATKMSECVLGQSKRVDFCGKGYHLMSFPQSAPHGVVFLHVTYVPAQEKNFTCAPAICHDGKAHFPREGVFVSNGTHWFVTQRNFYEPQIITTDNTFVSGNCDVVIGIVNNTVYDPLQPELDSGGSGYIPEAPRDGQAYVRKDGEWVLLSTFL

SEQ ID NO: 10021 - protein, 1177 aa, Artificial Sequence
  SARS-CoV-2/Finland/FIN-313/2020__EPI_ISL_414641 spike protein (1-1147)(I712C_T1077C) Foldon construct
MFVFLVLLPLVSSQCVNLTTRTQLPPAYTNSFTRGVYYPDKVFRSSVLHSTQDLFLPFFSNVTWFHAIHVSGTNGTKRFDNPVLPFNDGVYFASTEKSNIIRGWIFGTTLDSKTQSLLIVNNATNVVIKVCEFQFCNDPFLGVYYHKNNKSWMESEFRVYSSANNCTFEYVSQPFLMDLEGKQGNFKNLREFVFKNIDGYFKIYSKHTPINLVRDLPQGFSALEPLVDLPIGINITRFKTLLALHRSYLTPGDSSSGWTAGAAAYYVGYLQPRTFLLKYNENGTITDAVDCALDPLSETKCTLKSFTVEKGIYQTSNFRVQPTESIVRFPNITNLCPFGEVFNATRFASVYAWNRKRISNCVADYSVLYNSASFSTFKCYGVSPTKLNDLCFTNVYADSFVIRGDEVRQIAPGQTGKIADYNYKLPDDFTGCVIAWNSNNLDSKVGGNYNYLYRLFRKSNLKPFERDISTEIYQAGSTPCNGVEGFNCYFPLQSYGFQPTNGVGYQPYRVVVLSFELLHAPATVCGPKKSTNLVKNKCVNFNFNGLTGTGVLTESNKKFLPFQQFGRDIADTTDAVRDPQTLEILDITPCSFGGVSVITPGTNTSNQVAVLYQGVNCTEVPVAIHADQLTPTWRVYSTGSNVFQTRAGCLIGAEHVNNSYECDIPIGAGICASYQTQTNSPRRARSVASQSIIAYTMSLGAENSVAYSNNSCAIPTNFTISVTTEILPVSMTKTSVDCTMYICGDSTECSNLLLQYGSFCTQLNRALTGIAVEQDKNTQEVFAQVKQIYKTPPIKDFGGFNFSQILPDPSKPSKRSFIEDLLFNKVTLADAGFIKQYGDCLGDIAARDLICAQKFNGLTVLPPLLTDEMIAQYTSALLAGTITSGWTFGAGAALQIPFAMQMAYRFNGIGVTQNVLYENQKLIANQFNSAIGKIQDSLSSTASALGKLQDVVNQNAQALNTLVKQLSSNFGAISSVLNDILSRLDKVEAEVQIDRLITGRLQSLQTYVTQQLIRAAEIRASANLAATKMSECVLGQSKRVDFCGKGYHLMSFPQSAPHGVVFLHVTYVPAQEKNFTCAPAICHDGKAHFPREGVFVSNGTHWFVTQRNFYEPQIITTDNTFVSGNCDVVIGIVNNTVYDPLQPELDSGGSGYIPEAPRDGQAYVRKDGEWVLLSTFL

SEQ ID NO: 10022 - protein, 1177 aa, Artificial Sequence
  SARS-CoV-2/Netherlands/ZuidHolland_2/2020__EPI_ISL_414556 spike protein (1-1147)(I712C_T1077C) Foldon construct
MFVFLVLLPLVSSQCVNLTTRTQLPPAYTNSFTRGVYYPDKVFRSSVLHSTQDLFLPFFSNVTWFHAIHVSGTNGTKRFDNPVLPFNDGVYFASTEKSNIIRGWIFGTTLDSKTQSLLIVNNATNVVIKVCEFQFCNDPFLGVYYHKNNKSWMESEFRVYSSANNCTFEYVSQPFLMDLEGKQGNFKNLREFVFKNIDGYFKIYSKHTPINLVRDLPQGFSALEPLVDLPIGINITRFQTLLALHRSYLTPGDSSSGWTAGAAAYYVGYLQPRTFLLKYNENGTITDAVDCALDPLSETKCTLKSFTVEKGIYQTSNFRVQPTESIVRFPNITNLCPFGEVFNATRFASVYAWNRKRISNCVADYSVLYNSASFSTFKCYGVSPTKLNDLCFTNVYADSFVIRGDEVRQIAPGQTGKIADYNYKLPDDFTGCVIAWNSNNLDSKVGGNYNYLYRLFRKSNLKPFERDISTEIYQAGSTPCNGVEGFNCYFPLQSYGFQPTNGVGYQPYRVVVLSFELLHAPATVCGPKKSTNLVKNKCVNFNFNGLTGTGVLTESNKKFLPFQQFGRDIADTTDAVRDPQTLEILDITPCSFGGVSVITPGTNTSNQVAVLYQGVNCTEVPVAIHADQLTPTWRVYSTGSNVFQTRAGCLIGAEHVNNSYECDIPIGAGICASYQTQTNSPRRARSVASQSIIAYTMSLGAENSVAYSNNSCAIPTNFTISVTTEILPVSMTKTSVDCTMYICGDSTECSNLLLQYGSFCTQLNRALTGIALEQDKNTQEVFAQVKQIYKTPPIKDFGGFNFSQILPDPSKPSKRSFIEDLLFNKVTLADAGFIKQYGDCLGDIAARDLICAQKFNGLTVLPPLLTDEMIAQYTSALLAGTITSGWTFGAGAALQIPFAMQMAYRFNGIGVTQNVLYENQKLIANQFNSAIGKIQDSLSSTASALGKLQDVVNQNAQALNTLVKQLSSNFGAISSVLNDILSRLDKVEAEVQIDRLITGRLQSLQTYVTQQLIRAAEIRASANLAATKMSECVLGQSKRVDFCGKGYHLMSFPQSAPHGVVFLHVTYVPAQEKNFTCAPAICHDGKAHFPREGVFVSNGTHWFVTQRNFYEPQIITTDNTFVSGNCDVVIGIVNNTVYDPLQPELDSGGSGYIPEAPRDGQAYVRKDGEWVLLSTFL

SEQ ID NO: 10023 - protein, 1177 aa, Artificial Sequence
  SARS-CoV-2/USA/WA-UW31/2020__EPI_ISL_414618 spike protein (1-1147)(I712C_T1077C) Foldon construct
MFVFLVLLPLVSSQCVNLTTRTQLPPAYTNSFTRGVYYPDKVFRSSVLHSTQDLFLPFFSNVTWFHAIHVSGTNGTKRFDNPVLPFNDGVYFASTEKSNIIRGWIFGTTLDSKTQSLLIVNNATNVVIKVCEFQFCNDPFLGVYYHKNNKSWMESEFRVYSSANNCTFEYVSQPFLMDLEGKQGNFKNLREFVFKNIDGYFKIYSKHTPINLVRDLPQGFSALEPLVDLPIGINITRFQTLLALHRSYLTPGDSSSGWTAGAAAYYVGYLQPRTFLLKYNENGTITDAVDCALDPLSETKCTLKSFTVEKGIYQTSNFRVQPTESIVRFPNITNLCPFGEVFNATRFASVYAWNRKRISNCVADYSVLYNSASFSTFKCYGVSPTKLNDLCFTNVYADSFVIRGDEVRQIAPGQTGKIADYNYKLPDDFTGCVIAWNSNNLDSKVGGNYNYLYRLFRKSNLKPFERDISTEIYQAGSTPCNGAEGFNCYFPLQSYGFQPTNGVGYQPYRVVVLSFELLHAPATVCGPKKSTNLVKNKCVNFNFNGLTGTGVLTESNKKFLPFQQFGRDIADTTDAVRDPQTLEILDITPCSFGGVSVITPGTNTSNQVAVLYQDVNCTEVPVAIHADQLTPTWRVYSTGSNVFQTRAGCLIGAEHVNNSYECDIPIGAGICASYQTQTNSPRRARSVASQSIIAYTMSLGAENSVAYSNNSCAIPTNFTISVTTEILPVSMTKTSVDCTMYICGDSTECSNLLLQYGSFCTQLNRALTGIAVEQDKNTQEVFAQVKQIYKTPPIKDFGGFNFSQILPDPSKPSKRSFIEDLLFNKVTLADAGFIKQYGDCLGDIAARDLICAQKFNGLTVLPPLLTDEMIAQYTSALLAGTITSGWTFGAGAALQIPFAMQMAYRFNGIGVTQNVLYENQKLIANQFNSAIGKIQDSLSSTASALGKLQDVVNQNAQALNTLVKQLSSNFGAISSVLNDILSRLDKVEAEVQIDRLITGRLQSLQTYVTQQLIRAAEIRASANLAATKMSECVLGQSKRVDFCGKGYHLMSFPQSAPHGVVFLHVTYVPAQEKNFTCAPAICHDGKAHFPREGVFVSNGTHWFVTQRNFYEPQIITTDNTFVSGNCDVVIGIVNNTVYDPLQPELDSGGSGYIPEAPRDGQAYVRKDGEWVLLSTFL

SEQ ID NO: 10024 - protein, 1177 aa, Artificial Sequence
  SARS-CoV-2/South Korea/SNU01/2020__EPI_ISL_411929 spike protein (1-1147)(I712C_T1077C) Foldon construct
MFVFLVLLPLVSSQCVNLTTRTQLPPAYTNSFTRGVYYPDKVFRSSVLHSTQDLFLPFFSNVTWFHAIHVSGTNGTKRFDNPVLPFNDGVYFASTEKSNIIRGWIFGTTLDSKTQSLLIVNNATNVVIKVCEFQFCNDPFLGVYYHKNNKSWMESEFRVYSSANNCTFEYVSQPFLMDLEGKQGNFKNLREFVFKNIDGYFKIYSKHTPINLVRDLPQGFWALEPLVDLPIGINITRFQTLLALHRSYLTPGDSSSGWTAGAAAYYVGYLQPRTFLLKYNENGTITDAVDCALDPLSETKCTLKSFTVEKGIYQTSNFRVQPTESIVRFPNITNLCPFGEVFNATRFASVYAWNRKRISNCVADYSVLYNSASFSTFKCYGVSPTKLNDLCFTNVYADSFVIRGDEVRQIAPGQTGKIADYNYKLPDDFTGCVIAWNSNNLDSKVGGNYNYLYRLFRKSNLKPFERDISTEIYQAGSTPCNGVEGFNCYFPLQSYGFQPTNGVGYQPYRVVVLSFELLHAPATVCGPKKSTNLVKNKCVNFNFNGLTGTGVLTESNKKFLPFQQFGRDIADTTDAVRDPQTLEILDITPCSFGGVSVITPGTNTSNQVAVLYQDVNCTEVPVAIHADQLTPTWRVYSTGSNVFQTRAGCLIGAEHVNNSYECDIPIGAGICASYQTQTNSPRRARSVASQSIIAYTMSLGAENSVAYSNNSCAIPTNFTISVTTEILPVSMTKTSVDCTMYICGDSTECSNLLLQYGSFCTQLNRALTGIAVEQDKNTQEVFAQVKQIYKTPPIKDFGGFNFSQILPDPSKPSKRSFIEDLLFNKVTLADAGFIKQYGDCLGDIAARDLICAQKFNGLTVLPPLLTDEMIAQYTSALLAGTITSGWTFGAGAALQIPFAMQMAYRFNGIGVTQNVLYENQKLIANQFNSAIGKIQDSLSSTASALGKLQDVVNQNAQALNTLVKQLSSNFGAISSVLNDILSRLDKVEAEVQIDRLITGRLQSLQTYVTQQLIRAAEIRASANLAATKMSECVLGQSKRVDFCGKGYHLMSFPQSAPHGVVFLHVTYVPAQEKNFTCAPAICHDGKAHFPREGVFVSNGTHWFVTQRNFYEPQIITTDNTFVSGNCDVVIGIVNNTVYDPLQPELDSGGSGYIPEAPRDGQAYVRKDGEWVLLSTFL

SEQ ID NO: 10025 - protein, 1177 aa, Artificial Sequence
  SARS-CoV-2/China/WF0004/2020__EPI_ISL_413694 spike protein (1-1147)(I712C_T1077C) Foldon construct
MFVFLVLLPLVSSQCVNLTTRTQLPPAYTNSFTRGVYYPDKVFRSSVLHSTQDLFLPFFSNVTWFHAIHVSGTNGTKRFDNPVLPFNDGVYFASTEKSNIIRGWIFGTTLDSKTQSLLIVNNATNVVIKVCEFQFCNDPFLGVYYHKNNKSWTESEFRVYSSANNCTFEYVSQPFLMDLEGKQGNFKNLREFVFKNIDGYFKIYSKHTPINLVRDLPQGFSALEPLVDLPIGINITRFQTLLALHRSYLTPGDSSSGWTAGAAAYYVGYLQPRTFLLKYNENGTITDAVDCALDPLSETKCTLKSFTVEKGIYQTSNFRVQPTESIVRFPNITNLCPFGEVFNATRFASVYAWNRKRISNCVADYSVLYNSASFSTFKCYGVSPTKLNDLCFTNVYADSFVIRGDEVRQIAPGQTGKIADYNYKLPDDFTGCVIAWNSNNLDSKVGGNYNYLYRLFRKSNLKPFERDISTEIYQAGSTPCNGVEGFNCYFPLQSYGFQPTNGVGYQPYRVVVLSFELLHAPATVCGPKKSTNLVKNKCVNFNFNGLTGTGVLTESNKKFLPFQQFGRDIADTTDAVRDPQTLEILDITPCSFGGVSVITPGTNTSNQVAVLYQDVNCTEVPVAIHADQLTPTWRVYSTGSNVFQTRAGCLIGAEHVNNSYECDIPIGAGICASYQTQTNSPRRARSVASQSIIAYTMSLGAENSVAYSNNSCAIPTNFTISVTTEILPVSMTKTSVDCTMYICGDSTECSNLLLQYGSFCTQLNRALTGIAVEQDKNTQEVFAQVKQIYKTPPIKDFGGFNFSQILPDPSKPSKRSFIEDLLFNKVTLADAGFIKQYGDCLGDIAARDLICAQKFNGLTVLPPLLTDEMIAQYTSALLAGTITSGWTFGAGAALQIPFAMQMAYRFNGIGVTQNVLYENQKLIANQFNSAIGKIQDSLSSTASALGKLQDVVNQNAQALNTLVKQLSSNFGAISSVLNDILSRLDKVEAEVQIDRLITGRLQSLQTYVTQQLIRAAEIRASANLAATKMSECVLGQSKRFDFCGKGYHLMSFPQSAPHGVVFLHVTYVPAQEKNFTCAPAICHDGKAHFPREGVFVSNGTHWFVTQRNFYEPQIITTDNTFVSGNCDVVIGIVNNTVYDPLQPELDSGGSGYIPEAPRDGQAYVRKDGEWVLLSTFL

SEQ ID NO: 10026 - protein, 1177 aa, Artificial Sequence
  SARS-CoV-2/China/WF0028/2020__EPI_ISL_413791 spike protein (1-1147)(I712C_T1077C) Foldon construct
MFVFLVLLPLVSSQCVNLTTRTQLPPAYTNSFTRGVYYPDKVFRSSVLHSTQDLFLPFFSNVTWFHAIHVSGTNGTKRFDNPVLPFNDGVYFASTEKSNIIRGWIFGTTLDSKTQSLLIVNNATNVVIKVCEFQFCNDPFLGVYYHKNNKSWMESEFRVYSSANNCTFEYVSQPFLMDLEGKQGNFKNLREFVFKNIDGYFKIYSKHTPINLVRDLPQGFSALEPLVDLPIGINITRFQTLLALHRSYLTPGDSSSGWTAGAAAYYVGYLQPRTFLLKYNENGTITDAVDCALDPLSETKCTLKSFTVEKGIYQTSNFRVQPTESIVRFPNITNLCPFGEVFNATRFASVYAWNRKRISNCVADYSVLYNSASFSTFKCYGVSPTKLNDLCFTNVYADSFVIRGDEVRQIAPGQTGKIADYNYKLPDDFTGCVIAWNSNNLDSKVGGNYNYLYRLFRKSNLKPFERDISTEIYQAGSTPCNGVEGFNCYFPLQSYGFQPTNGVGYQPYRVVVLSFELLHAPATVCGPKKSTNLVKNKCVNFNFNGLTGTGVLTESNKKFLPFQQFGRDIADTTDAVRDPQTLEILDITPCSFGGVSVITPGTNTSNQVAVLYQDVNCTEVPVAIHADQLTPTWRVYSTGSNVFQTRAGCLIGAEHVNNSYECDIPIGAGICASYQTQTNSPRRARSVASQSIIAYTMSLGAENSVAYSNNSCAIPTNFTISVTTEILPVSMTKTSVDCTMYICGDSTECSNLLLQYGSFCTQLNRALTGIAVEQDKNTQEVFAQVKQIYKTPPIKDFGGFNFSQILPDPSKPSKRSFIEDLLFNKVTLADAGFIKQYGDCLGDIAARDLICAQKFNGLTVLPPLLTDEMIAQYTSALLAGTITSGWTFGAGAALQIPFAMQMAYRFNGIGVTQNVLYENQKLIANQFNSAIGKIQDSLSSTASALGKLQDVVNQNAQALNTLVKQLSSNFGAISSVLNDILSRLDKVEAEVQIDRLITGRLQSLQTYVTQQLIRAAEIRASANLAATKMSECVLGQSKRVDFCGKGYHLMSFPQSAPHGVVFLHVTYVPAQEKNFTCAPAICHDGKAHFPREGVFVSNGTHWFVTQRNFYEPQIITTDNTFVSGNCDVVIGIVNNTVYDPLQPELESGGSGYIPEAPRDGQAYVRKDGEWVLLSTFL

SEQ ID NO: 10027 - protein, 1177 aa, Artificial Sequence
  SARS-CoV-2/2019-nCoV/USA-CruiseA-18/2020__MT159716.1 spike protein (1-1147)(I712C_T1077C) Foldon construct
MFVFLVLLPLVSSQCVNLTTRTQLPPAYTNSFTRGVYYPDKVFRSSVLHSTQDLFLPFFSNVTWFHAIHVSGTNGTKRFDNPVLPFNDGVYFASTEKSNIIRGWIFGTTLDSKTQSLLIVNNATNVVIKVCEFQFCNDPFLGVYYHKNNKSWMESELRVYSSANNCTFEYVSQPFLMDLEGKQGNFKNLREFVFKNIDGYFKIYSKHTPINLVRDLPQGFSALEPLVDLPIGINITRFQTLLALHRSYLTPGDSSSGWTAGAAAYYVGYLQPRTFLLKYNENGTITDAVDCALDPLSETKCTLKSFTVEKGIYQTSNFRVQPTESIVRFPNITNLCPFGEVFNATRFASVYAWNRKRISNCVADYSVLYNSASFSTFKCYGVSPTKLNDLCFTNVYADSFVIRGDEVRQIAPGQTGKIADYNYKLPDDFTGCVIAWNSNNLDSKVGGNYNYLYRLFRKSNLKPFERDISTEIYQAGSTPCNGVEGFNCYFPLQSYGFQPTNGVGYQPYRVVVLSFELLHAPATVCGPKKSTNLVKNKCVNFNFNGLTGTGVLTESNKKFLPFQQFGRDIADTTDAVRDPQTLEILDITPCSFGGVSVITPGTNTSNQVAVLYQDVNCTEVPVAIHADQLTPTWRVYSTGSNVFQTRAGCLIGAEHVNNSYECDIPIGAGICASYQTQTNSPRRARSVASQSIIAYTMSLGAENSVAYSNNSCAIPTNFTISVTTEILPVSMTKTSVDCTMYICGDSTECSNLLLQYGSFCTQLNRALTGIAVEQDKNTQEVFAQVKQIYKTPPIKDFGGFNFSQILPDPSKPSKRSFIEDLLFNKVTLADAGFIKQYGDCLGDIAARDLICAQKFNGLTVLPPLLTDEMIAQYTSALLAGTITSGWTFGAGAALQIPFAMQMAYRFNGIGVTQNVLYENQKLIANQFNSAIGKIQDSLSSTASALGKLQDVVNQNAQALNTLVKQLSSNFGAISSVLNDILSRLDKVEAEVQIDRLITGRLQSLQTYVTQQLIRAAEIRASANLAATKMSECVLGQSKRVDFCGKGYHLMSFPQSAPHGVVFLHVTYVPAQEKNFTCAPAICHDGKAHFPREGVFVSNGTHWFVTQRNFYEPQIITTDNTFVSGNCDVVIGIVNNTVYDPLQPELDSGGSGYIPEAPRDGQAYVRKDGEWVLLSTFL

SEQ ID NO: 10028 - protein, 1177 aa, Artificial Sequence
  SARS-CoV-2/SARS-CoV-2/Yunnan-01/human/2020/CHN__MT049951.1 spike protein (1-1147)(I712C_T1077C) Foldon construct
MFVFLVLLPLVSSQCVNLTTRTQLPPANTNSFTRGVYYPDKVFRSSVLHSTQDLFLPFFSNVTWFHAIHVSGTNGTKRFDNPVLPFNDGVYFASTEKSNIIRGWIFGTTLDSKTQSLLIVNNATNVVIKVCEFQFCNDPFLGVYYHKNNKSWMESEFRVYSSANNCTFEYVSQPFLMDLEGKQGNFKNLREFVFKNIDGYFKIYSKHTPINLVRDLPQGFSALEPLVDLPIGINITRFQTLLALHRSYLTPGDSSSGWTAGAAAYYVGYLQPRTFLLKYNENGTITDAVDCALDPLSETKCTLKSFTVEKGIYQTSNFRVQPTESIVRFPNITNLCPFGEVFNATRFASVYAWNRKRISNCVADYSVLYNSASFSTFKCYGVSPTKLNDLCFTNVYADSFVIRGDEVRQIAPGQTGKIADYNYKLPDDFTGCVIAWNSNNLDSKVGGNYNYLYRLFRKSNLKPFERDISTEIYQAGSTPCNGVEGFNCYFPLQSYGFQPTNGVGYQPYRVVVLSFELLHAPATVCGPKKSTNLVKNKCVNFNFNGLTGTGVLTESNKKFLPFQQFGRDIADTTDAVRDPQTLEILDITPCSFGGVSVITPGTNTSNQVAVLYQDVNCTEVPVAIHADQLTPTWRVYSTGSNVFQTRAGCLIGAEHVNNSYECDIPIGAGICASYQTQTNSPRRARSVASQSIIAYTMSLGAENSVAYSNNSCAIPTNFTISVTTEILPVSMTKTSVDCTMYICGDSTECSNLLLQYGSFCTQLNRALTGIAVEQDKNTQEVFAQVKQIYKTPPIKDFGGFNFSQILPDPSKPSKRSFIEDLLFNKVTLADAGFIKQYGDCLGDIAARDLICAQKFNGLTVLPPLLTDEMIAQYTSALLAGTITSGWTFGAGAALQIPFAMQMAYRFNGIGVTQNVLYENQKLIANQFNSAIGKIQDSLSSTASALGKLQDVVNQNAQALNTLVKQLSSNFGAISSVLNDILSRLDKVEAEVQIDRLITGRLQSLQTYVTQQLIRAAEIRASANLAATKMSECVLGQSKRVDFCGKGYHLMSFPQSAPHGVVFLHVTYVPAQEKNFTCAPAICHDGKAHFPREGVFVSNGTHWFVTQRNFYEPQIITTDNTFVSGNCDVVIGIVNNTVYDPLQPELDSGGSGYIPEAPRDGQAYVRKDGEWVLLSTFL

SEQ ID NO: 10029 - protein, 1177 aa, Artificial Sequence
  SARS-CoV-2/USA/WA-UW292/2020__EPI_ISL_418077 spike protein (1-1147)(I712C_T1077C) Foldon construct
MFVFLVLLPLVSSQCVNLTTRTQLPPAYTNSFTRGVYYPDKVFRSSVLHSTQDLFLPFFSNVTWFHAIHVSGTNGTKRFDNPVLPFNDGVYFASTEKSNIIRGWIFGTTLDSKTQSLLIVNNATNVVIKVCEFQFCNDPFLGVYYHKNNKSWMESEFRVYSSANNCTFEYVSQPFLMDLEGKQGNFKNLREFVFKNIDGYFKIYSKHTPINLVRDLPQGFSALEPLVDLPIGINITRFQTLLALHRSYLTPGDSSSGWTAGAAAYYVGYLQPRTFLLKYNENGTITDAVDCALDPLSETKCTLKSFTVEKGIYQTSNFRVQPTESIVRFPNITNLCPFGEVFNATRFASVYAWNRKRISNCVADYSVLYNSASFSTFKCYGVSPTKLNDLCFTNVYADSFVIRGDEVRQIAPGQTGKIADYNYKLPDDFTGCVIAWNSNNLDSKVGGNYNYLYRLFRKSNLKPFERDISTEIYQASSTPCNGVEGFNCYFPLQSYGFQPTNGVGYQPYRVVVLSFELLHAPATVCGPKKSTNLVKNKCVNFNFNGLTGTGVLTESNKKFLPFQQFGRDIADTTDAVRDPQTLEILDITPCSFGGVSVITPGTNTSNQVAVLYQDVNCTEVPVAIHADQLTPTWRVYSTGSNVFQTRAGCLIGAEHVNNSYECDIPIGAGICASYQTQTNSPRRARSVASQSIIAYTMSLGAENSVAYSNNSCAIPTNFTISVTTEILPVSMTKTSVDCTMYICGDSTECSNLLLQYGSFCTQLNRALTGIAVEQDKNTQEVFAQVKQIYKTPPIKDFGGFNFSQILPDPSKPSKRSFIEDLLFNKVTLADAGFIKQYGDCLGDIAARDLICAQKFNGLTVLPPLLTDEMIAQYTSALLAGTITSGWTFGAGAALQIPFAMQMAYRFNGIGVTQNVLYENQKLIANQFNSAIGKIQDSLSSTASALGKLQDVVNQNAQALNTLVKQLSSNFGAISSVLNDILSRLDKVEAEVQIDRLITGRLQSLQTYVTQQLIRAAEIRASANLAATKMSECVLGQSKRVDFCGKGYHLMSFPQSAPHGVVFLHVTYVPAQEKNFTCAPAICHDGKAHFPREGVFVSNGTHWFVTQRNFYEPQIITTDNTFVSGNCDVVIGIVNNTVYDPLQPELDSGGSGYIPEAPRDGQAYVRKDGEWVLLSTFL

SEQ ID NO: 10030 - protein, 1177 aa, Artificial Sequence
  SARS-CoV-2/Iceland/192/2020__EPI_ISL_417819 spike protein (1-1147)(I712C_T1077C) Foldon construct
MFVFFVLLPLVSSQCVNLTTRTQLPPAYTNSFTRGVYYPDKVFRSSVLHSTQDLFLPFFSNVTWFHAIHVSGTNGTKRFDNPVLPFNDGVYFASTEKSNIIRGWIFGTTLDSKTQSLLIVNNATNVVIKVCEFQFCNDPFLGVYYHKNNKSWMESEFRVYSSANNCTFEYVSQPFLMDLEGKQGNFKNLREFVFKNIDGYFKIYSKHTPINLVRDLPQGFSALEPLVDLPIGINITRFQTLLALHRSYLTPGDSSSGWTAGAAAYYVGYLQPRTFLLKYNENGTITDAVDCALDPLSETKCTLKSFTVEKGIYQTSNFRVQPTESIVRFPNITNLCPFGEVFNATRFASVYAWNRKRISNCVADYSVLYNSASFSTFKCYGVSPTKLNDLCFTNVYADSFVIRGDEVRQIAPGQTGKIADYNYKLPDDFTGCVIAWNSNNLDSKVGGNYNYLYRLFRKSNLKPFERDISTEIYQAGSTPCNGVEGFNCYFPLQSYGFQPTNGVGYQPYRVVVLSFELLHAPATVCGPKKSTNLVKNKCVNFNFNGLTGTGVLTESNKKFLPFQQFGRDIADTTDAVRDPQTLEILDITPCSFGGVSVITPGTNTSNQVAVLYQGVNCTEVPVAIHADQLTPTWRVYSTGSNVFQTRAGCLIGAEHVNNSYECDIPIGAGICASYQTQTNSPRRARSVASQSIIAYTMSLGAENSVAYSNNSCAIPTNFTISVTTEILPVSMTKTSVDCTMYICGDSTECSNLLLQYGSFCTQLNRALTGIAVEQDKNTQEVFAQVKQIYKTPPIKDFGGFNFSQILPDPSKPSKRSFIEDLLFNKVTLADAGFIKQYGDCLGDIAARDLICAQKFNGLTVLPPLLTDEMIAQYTSALLAGTITSGWTFGAGAALQIPFAMQMAYRFNGIGVTQNVLYENQKLIANQFNSAIGKIQDSLSSTASALGKLQDVVNQNAQALNTLVKQLSSNFGAISSVLNDILSRLDKVEAEVQIDRLITGRLQSLQTYVTQQLIRAAEIRASANLAATKMSECVLGQSKRVDFCGKGYHLMSFPQSAPHGVVFLHVTYVPAQEKNFTCAPAICHDGKAHFPREGVFVSNGTHWFVTQRNFYEPQIITTDNTFVSGNCDVVIGIVNNTVYDPLQPELDSGGSGYIPEAPRDGQAYVRKDGEWVLLSTFL

SEQ ID NO: 10031 - protein, 1177 aa, Artificial Sequence
  SARS-CoV-2/Belgium/ULG-6939/2020__EPI_ISL_417020 spike protein (1-1147)(I712C_T1077C) Foldon construct
MFVFLVLLPLVSSQCVNLTTRTQLPPAYTNSFTRGVYYPDKVFRSSVLHSTQDLFLPFFSNVTWFHAIHVSGTNGTKRFDNPVLPFNDGVYFASTEKSNIIRGWIFGTTLDSKTQSLLIVNNATNVVIKVCEFQFCNDPFLGVYYHKNNKSWMESEFRVYSSANNCTFEYVSQPFLMDLEGKQGNFKNLREFVFKNIDGYFKIYSKHTPINLVRDLPQGFSALEPLVDLPIGINITRFQTLLALHRSYLTPGDSSSGWTAGAAAYYVGYLQPRTFLLKYNENGTITDAVDCALDPLSETKCTLKSFTVEKGIYQTSNFRVQPTESIVRFPNITNLCPFGEVFNATRFASVYAWNRKRISNCVADYSVLYNSASFSTFKCYGVSPTKLNDLCFTNVYADSFVIRGDEVRQIAPGQTGKIADYNYKLPDDFTGCVIAWNSNNLDSKVGGNYNYLYRLFRKSNLKPFERDISTEIYQAGSTPCNGVEGFNCYFPLQSYGFQPTNGVGYQPYRVVVLSFELLHAPATVCGPKKSTNLVKNKCVNFNFNGLTGTGVLTESNKKFLPFQQFGRDIADTTDAVRDPQTLEILDITPCSFGGVSVITPGTNTSNQVAVLYQGVNCTEVPVAIHADQLTPTWRVYSTGSNVFQTRAGCLIGAEHVNNSYECDIPIGAGICASYQTQTNSPRRARSVASQSIIAYTMSLGAENSVVYSNNSCAIPTNFTISVTTEILPVSMTKTSVDCTMYICGDSTECSNLLLQYGSFCTQLNRALTGIAVEQDKNTQEVFAQVKQIYKTPPIKDFGGFNFSQILPDPSKPSKRSFIEDLLFNKVTLADAGFIKQYGDCLGDIAARDLICAQKFNGLTVLPPLLTDEMIAQYTSALLAGTITSGWTFGAGAALQIPFAMQMAYRFNGIGVTQNVLYENQKLIANQFNSAIGKIQDSLSSTASALGKLQDVVNQNAQALNTLVKQLSSNFGAISSVLNDILSRLDKVEAEVQIDRLITGRLQSLQTYVTQQLIRAAEIRASANLAATKMSECVLGQSKRVDFCGKGYHLMSFPQSAPHGVVFLHVTYVPAQEKNFTCAPAICHDGKAHFPREGVFVSNGTHWFVTQRNFYEPQIITTDNTFVSGNCDVVIGIVNNTVYDPLQPELDSGGSGYIPEAPRDGQAYVRKDGEWVLLSTFL

SEQ ID NO: 10032 - protein, 1177 aa, Artificial Sequence
  SARS-CoV-2/France/HF2496/2020__EPI_ISL_418231 spike protein (1-1147)(I712C_T1077C) Foldon construct
MFVFLVLLPLVSSQCVNLTTRTQLPPAYTNSFTRGVYYPDKVFRSSVLHSTQDLFLPFFSNVTWFHAIHVSGTNGTKRFDNPVLPFNDGVYFASTEKSNIIRGWIFGTTLDSKTQSLLIVNNATNVVIKVCEFQFCNDPFLGVYYHKNNKSWMESEFRVYSSANNCTFEYVSQPFLMDLEGKQGNFKNLREFVFKNIDGYFKIYSKHTPINLVRDLPQGFSALEPLVDLPIGINITRFQTLLALHRSYLTPGDSSSGWTAGAAAYYVGYLQPRTFLLKYNENGTITDAVDCALDPLSETKCTLKSFTVEKGIYQTSNFRVQPTESIVRFPNITNLCPFGEVFNATRFASVYAWNRKRISNCVADYSVLYNSASFSTFKCYGVSPTKLNDLCFTNVYADSFVIRGDEVRQIAPGQTGKIADYNYKLPDDFTGCVIAWNSNNLDSKVGGNYNYLYRLFRKSNLKPFERDISTEIYQAGSTPCNGVEGFNCYFPLQSYGFQPTNGVGYQPYRVVVLSFELLHAPATVCGPKKSTNLVKNKCVNFNFNGLTGTGVLTESNKKFLPFQQFGRDIADTTDAVRDPQTLEILDITPCSFGGVSVITPGTNTSNQVAVLYQGVNCTEVPVAIHADQLTPTWRVYSTGSNVFQTRAGCLIGAEHVNNSYECDIPIGAGICASYQTQTNSPRRARSVASQSIIAYTMSLGAENSVAYSNNSCAIPTNFTISVTTEILPVSMTKTSVDCTMYICGDSTECSNLLLQYGSFCTQLNRALTGIAVEQDKNTQEVFAQVKQIYKTPPIKDFGGFNFSQILPDPSKPSKRSFIEDLLFNKVTLADAGFIKQYGDCLGDIVARDLICAQKFNGLTVLPPLLTDEMIAQYTSALLAGTITSGWTFGAGAALQIPFAMQMAYRFNGIGVTQNVLYENQKLIANQFNSAIGKIQDSLSSTASALGKLQDVVNQNAQALNTLVKQLSSNFGAISSVLNDILSRLDKVEAEVQIDRLITGRLQSLQTYVTQQLIRAAEIRASANLAATKMSECVLGQSKRVDFCGKGYHLMSFPQSAPHGVVFLHVTYVPAQEKNFTCAPAICHDGKAHFPREGVFVSNGTHWFVTQRNFYEPQIITTDNTFVSGNCDVVIGIVNNTVYDPLQPELDSGGSGYIPEAPRDGQAYVRKDGEWVLLSTFL

SEQ ID NO: 10033 - protein, 1177 aa, Artificial Sequence
  SARS-CoV-2/USA/WA-UW291/2020__EPI_ISL_418076 spike protein (1-1147)(I712C_T1077C) Foldon construct
MFVFLVLLPLVSSQCVNLTTRTQLPPAYTNSFTRGVYYPDKVFRSSVLHSTQDLFLPFFSNVTWFHAIHVSGTNGTKRFDNPVLPFNDGVYFASTEKSNIIRGWIFGTTLDSKTQSLLIVNNATNVVIKVCEFQFCNDPFLGVYYHKNNKSWMESEFRVYSSANNCTFEYVSQPFLMDLEGKQGNFKNLREFVFKNIDGYFKIYSKHTPINLVRDLPQGFSALEPLVDLPIGINITRFQTLLALHRSYLTPGDSSSGWTAGAAAYYVGYLQPRTFLLKYNENGTITDAVDCALDPLSETKCTLKSFTVEKGIYQTSNFRVQPTESIVRFPNITNLCPFGEVFNATRFASVYAWNRKRISNCVADYSVLYNSASFSTFKCYGVSPTKLNDLCFTNVYADSFVIRGDEVRQIAPGQTGKIADYNYKLPDDFTGCVIAWNSNNLDSKVGGNYNYLYRLFRKSNLKPFERDISTEIYQAGSTPCNGVEGFNCYFPLQSYGFQPTNGVGYQPYRVVVLSFELLHAPATVCGPKKSTNLVKNKCVNFNFNGLTGTGVLTESNKKFLPFQQFGRDIADTTDAVRDPQTLEILDITPCSFGGVSVITPGTNTSNQVAVLYQGVNCTEVPVAIHADQLTPTWRVYSTGSNVFQTRAGCLIGAEHVNNSYECDIPIGAGICASYQTQTNSPRRARSVASQSIIAYTMSLGAENSVAYSNNSCAIPTNFTISVTTEILPVSMTKTSVDCTMYICGDSTECSNLLLQYGSFCTQLNRALTGIAVEQDKNTQEVFAQVKQIYKTPPIKDFGGFNFSQILPDPSKPSKRSFIEDLLFNKVTLADAGFIKQYGDCLGDIAARDLICAQKFNGLTVLPPLLTDEMIAQYTSALLAGTITSGWTFGAGAALQIPFAMQMAYRFNGIGVTQNVLYENQKLIANQFNSAIGKIQYSLSSTASALGKLQDVVNQNAQALNTLVKQLSSNFGAISSVLNDILSRLDKVEAEVQIDRLITGRLQSLQTYVTQQLIRAAEIRASANLAATKMSECVLGQSKRVDFCGKGYHLMSFPQSAPHGVVFLHVTYVPAQEKNFTCAPAICHDGKAHFPREGVFVSNGTHWFVTQRNFYEPQIITTDNTFVSGNCDVVIGIVNNTVYDPLQPELDSGGSGYIPEAPRDGQAYVRKDGEWVLLSTFL

SEQ ID NO: 10034 - protein, 1177 aa, Artificial Sequence; identical to SEQ ID NO: 9997
  SARS-CoV-2/Portugal/PT0034/2020__EPI_ISL_418019 spike protein (1-1147)(I712C_T1077C) Foldon construct

SEQ ID NO: 10035 - protein, 1177 aa, Artificial Sequence; identical to SEQ ID NO: 9989
  SARS-CoV-2/Iceland/202/2020__EPI_ISL_417750 spike protein (1-1147)(I712C_T1077C) Foldon construct

SEQ ID NO: 10036 - protein, 1177 aa, Artificial Sequence
  SARS-CoV-2/USA/WA-UW261/2020__EPI_ISL_418046 spike protein (1-1147)(I712C_T1077C) Foldon construct
MFVFLVLLPLVSSQCVNLTTRTQLPPAYTNSFTRGVYYPDKVFRSSVLHSTQDLFLPFFSNVTWFHAIHVSGTNGTKRFDNPVLPFNDGVYFASTEKSNIIRGWIFGTTLDSKTQSLLIVNNATNVVIKVCEFQFCNDPFLGVYYHKNNKSWMESEFRVYSSANNCTFEYVSQPFLMDLEGKQGNFKNLREFVFKNIDGYFKIYSKHTPINLVRDLPQGFSALEPLVDLPIGINITRFQTLLALHRSYLTPGDSSSGWTAGAAAYYVGYLQPRTFLLKYNENGTITDAVDCALDPLSETKCTLKSFTVEKGIYQTSNFRVQPTESIVRFPNITNLCPFGEVFNATRFTSVYAWNRKRISNCVADYSVLYNSASFSTFKCYGVSPTKLNDLCFTNVYADSFVIRGDEVRQIAPGQTGKIADYNYKLPDDFTGCVIAWNSNNLDSKVGGNYNYLYRLFRKSNLKPFERDISTEIYQAGSTPCNGVEGFNCYFPLQSYGFQPTNGVGYQPYRVVVLSFELLHAPATVCGPKKSTNLVKNKCVNFNFNGLTGTGVLTESNKKFLPFQQFGRDIADTTDAVRDPQTLEILDITPCSFGGVSVITPGTNTSNQVAVLYQDVNCTEVPVAIHADQLTPTWRVYSTGSNVFQTRAGCLIGAEHVNNSYECDIPIGAGICASYQTQTNSPRRARSVASQSIIAYTMSLGAENSVAYSNNSCAIPTNFTISVTTEILPVSMTKTSVDCTMYICGDSTECSNLLLQYGSFCTQLNRALTGIAVEQDKNTQEVFAQVKQIYKTPPIKDFGGFNFSQILPDPSKPSKRSFIEDLLFNKVTLADAGFIKQYGDCLGDIAARDLICAQKFNGLTVLPPLLTDEMIAQYTSALLAGTITSGWTFGAGAALQIPFAMQMAYRFNGIGVTQNVLYENQKLIANQFNSAIGKIQDSLSSTASALGKLQDVVNQNAQALNTLVKQLSSNFGAISSVLNDILSRLDKVEAEVQIDRLITGRLQSLQTYVTQQLIRAAEIRASANLAATKMSECVLGQSKRVDFCGKGYHLMSFPQSAPHGVVFLHVTYVPAQEKNFTCAPAICHDGKAHFPREGVFVSNGTHWFVTQRNFYEPQIITTDNTFVSGNCDVVIGIVNNTVYDPLQPELDSGGSGYIPEAPRDGQAYVRKDGEWVLLSTFL

SEQ ID NO: 10037 - protein, 1177 aa, Artificial Sequence
  SARS-CoV-2/Portugal/PT0035/2020__EPI_ISL_418020 spike protein (1-1147)(I712C_T1077C) Foldon construct
MFVFLVLLPLVSSQCVNLTTRTQLPPAYTNSFTRGVYYPDKVFRSSVLHSTQDLFLPFFSNVTWFHAIHVSGTNGTKRFDNPVLPFNDGVYFASTEKSNIIRGWIFGTTLDSKTQSLLIVNNATNVVIKVCEFQFCNDPFLGVYYHKNNKSWMESEFRVYSSANNCTFEYVSQPFLMDLEGKQGNFKNLREFVFKNIDGYFKIYSKHTPINLVRDLPQGFSALEPLVDLPIGINITRFQTLLALHRSYLTPGDSSSGWTAGAAAYYVGYLQPRTFLLKYNENGTITDAVDCALDPLSETKCTLKSFTVEKGIYQTSNFRVQPTESIVRFPNITNLCPFGEVFNATRFASVYAWNRKRISNCVADYSVLYNSASFSTFKCYGVSPTKLNDLCFTNVYADSFVIRGDEVRQIAPGQTGKIADYNYKLPDDFTGCVIAWNSNNLDSKVGGNYNYLYRLFRKSNLKPFERDISTEIYQAGSTPCNGVEGFNCYFPLQSYGFQPTNGVGYQPYRVVVLSFELLHAPATVCGPKKSTNLVKNKCVNFNFNGLTGTGVLTESNKKFLPFQQFGRDIADTTDAVRDPQTLEILDITPCSFGGVSVITPGTNTSNQVAVLYQDVNCTEVPVAIHADQLTPTWRVYSTGSNVFQTRAGCLIGAEHVNNSYECDIPIGAGICASYQTQTNSPRRARSVASQSIIAYTMSLGAENSVAYSNNSCAIPTNFTISVTTEILPVSMTKTSVDCTMYICGDSTECSNLLLQYGSFCTQLNRALTGIAVEQDKNTQEVFAQVKQIYKTPPIKDFGGFNFSQILPDPSKPSKRSFIEDLLFNKVTLADAGFIKQYGDCLGDISARDLICAQKFNGLTVLPPLLTDEMIAQYTSALLAGTITSGWTFGAGAALQIPFAMQMAYRFNGIGVTQNVLYENQKLIANQFNSAIGKIQDSLSSTASALGKLQDVVNQNAQALNTLVKQLSSNFGAISSVLNDILSRLDKVEAEVQIDRLITGRLQSLQTYVTQQLIRAAEIRASANLAATKMSECVLGQSKRVDFCGKGYHLMSFPQSAPHGVVFLHVTYVPAQEKNFTCAPAICHDGKAHFPREGVFVSNGTHWFVTQRNFYEPQIITTDNTFVSGNCDVVIGIVNNTVYDPLQPELDSGGSGYIPEAPRDGQAYVRKDGEWVLLSTFL

SEQ ID NO: 10038 - protein, 1177 aa, Artificial Sequence
  SARS-CoV-2/USA/NY-NYUMC7/2020__EPI_ISL_418192 spike protein (1-1147)(I712C_T1077C) Foldon construct
MFVFLVLLPLVSSQCVNLTTRTQLPPAYTNSFTRGVYYPDKVFRSSVLHSTQDLFLPFFSNVTWFHAIHVSGTNGTKRFDNPVLPFNDGVYFASTEKSNIIRGWIFGTTLDSKTQSLLIVNNATNVVIKVCEFQFCNDPFLGVYHHKNNKSWMESEFRVYSSANNCTFEYVSQPFLMDLEGKQGNFKNLREFVFKNIDGYFKIYSKHTPINLVRDLPQGFSALEPLVDLPIGINITRFQTLLALHRSYLTPGDSSSGWTAGAAAYYVGYLQPRTFLLKYNENGTITDAVDCALDPLSETKCTLKSFTVEKGIYQTSNFRVQPTESIVRFPNITNLCPFGEVFNATRFASVYAWNRKRISNCVADYSVLYNSASFSTFKCYGVSPTKLNDLCFTNVYADSFVIRGDEVRQIAPGQTGKIADYNYKLPDDFTGCVIAWNSNNLDSKVGGNYNYLYRLFRKSNLKPFERDISTEIYQAGSTPCNGVEGFNCYFPLQSYGFQPTNGVGYQPYRVVVLSFELLHAPATVCGPKKSTNLVKNKCVNFNFNGLTGTGVLTESNKKFLPFQQFGRDIADTTDAVRDPQTLEILDITPCSFGGVSVITPGTNTSNQVAVLYQGVNCTEVPVAIHADQLTPTWRVYSTGSNVFQTRAGCLIGAEHVNNSYECDIPIGAGICASYQTQTNSPRRARSVASQSIIAYTMSLGAENSVAYSNNSCAIPTNFTISVTTEILPVSMTKTSVDCTMYICGDSTECSNLLLQYGSFCTQLNRALTGIAVEQDKNTQEVFAQVKQIYKTPPIKDFGGFNFSQILPDPSKPSKRSFIEDLLFNKVTLADAGFIKQYGDCLGDIAARDLICAQKFNGLTVLPPLLTDEMIAQYTSALLAGTITSGWTFGAGAALQIPFAMQMAYRFNGIGVTQNVLYENQKLIANQFNSAIGKIQDSLSSTASALGKLQDVVNQNAQALNTLVKQLSSNFGAISSVLNDILSRLDKVEAEVQIDRLITGRLQSLQTYVTQQLIRAAEIRASANLAATKMSECVLGQSKRVDFCGKGYHLMSFPQSAPHGVVFLHVTYVPAQEKNFTCAPAICHDGKAHFPREGVFVSNGTHWFVTQRNFYEPQIITTDNTFVSGNCDVVIGIVNNTVYDPLQPELDSGGSGYIPEAPRDGQAYVRKDGEWVLLSTFL

SEQ ID NO: 10039 - protein, 1177 aa, Artificial Sequence
  SARS-CoV-2/Iceland/189/2020__EPI_ISL_417709 spike protein (1-1147)(I712C_T1077C) Foldon construct
MFVFLVLLPLVSSQCVNLTTRTQLPPAYTNSFTRGVYYPDKVFRSSVLHSTQDLFLPFFSNVTWFHAIHVSGTNGTKRFDNPVLPFNDGVYFASTEKSNIIRGWIFGTTLDSKTQSLLIVNNATNVVIKVCEFQFCNDPFLGVYYHKNNKSWMESEFRVYSSANNCTFEYVSQPFLMDLEGKQGNFKNLREFVFKNIDGYFKIYSKHTPINLVRDLPQGFSALEPLVDLPIGINITRFQTLLALHRSYLTPGDSSSGWTAGAAAYYVGYLQPRTFLLKYNENGTITDAVDCALDPLSETKCTLKSFTVEKGIYQTSNFRVQPTESIVRFPNITNLCPFGEVFNATRFASVYAWNRKRISNCVADYSVLYNSASFSTFKCYGVSPTKLNDLCFTNVYADSFVIRGDEVRQIAPGQTGKIADYNYKLPDDFTGCVIAWNSNNLDSKVGGNYNYLYRLFRKSNLKPFERDISTEIYQAGSTPCNGVEGFNCYFPLQSYGFQPTNGVGYQPYRVVVLSFELLHAPATVCGPKKSTNLVKNKCVNFNFNGLTGTGVLTESNKKFLPFQQFGRDIADTTDAVRDPQTLEILDITPCSFGGVSVITPGTNTSNQVAVLYQGVNCTEVPVAIHADQLTPTWRVYSTGSNVFQTRAGCLIGAEHVNNSYECDIPIGAGICASYQTQTNSPRRARSVASQSIIAYTMSLGAENSVAYSNNSCAIPTNFTISVTTEILPVSMTKTSVDCTMYICGDSTECSNLLLQYGSFCTQLNRALTGIAVEQDKNTQEVFAQVKQIYKTPPIKDFGGFNFSQILPDPSKPSKRSFIEDLLFNKVTLADAGFTKQYGDCLGDIAARDLICAQKFNGLTVLPPLLTDEMIAQYTSALLAGTITSGWTFGAGAALQIPFAMQMAYRFNGIGVTQNVLYENQKLIANQFNSAIGKIQDSLSSTASALGKLQDVVNQNAQALNTLVKQLSSNFGAISSVLNDILSRLDKVEAEVQIDRLITGRLQSLQTYVTQQLIRAAEIRASANLAATKMSECVLGQSKRVDFCGKGYHLMSFPQSAPHGVVFLHVTYVPAQEKNFTCAPAICHDGKAHFPREGVFVSNGTHWFVTQRNFYEPQIITTDNTFVSGNCDVVIGIVNNTVYDPLQPELDSGGSGYIPEAPRDGQAYVRKDGEWVLLSTFL

SEQ ID NO: 10040 - protein, 1177 aa, Artificial Sequence
  SARS-CoV-2/Australia/NSW56/2020__EPI_ISL_417408 spike protein (1-1147)(I712C_T1077C) Foldon construct
MFVFLVLLPLVSSQCVNLTTRTQLPPAYTNSFTRGVYYPDKVFRSSVLHSTQDLFLPFFSNVTWFHAIHVSGTNGTKRFDNPVLPFNDGVYFASTEKSNIIRGWIFGTTLDSKTQSLLIVNNATNVVIKVCEFQFCNDPFLGVYYHKNNKSWMESEFRVYSSANNCTFEYVSQPFLMDLEGKQGNFKNLREFVFKNIDGYFKIYSKHTPINLVRDLPQGFSALEPLVDLPIGINITRFQTLLALHRSYLTPGDSSSGWTAGAAAYYVGYLQPRTFLLKYNENGTITDAVDCALDPLSETKCTLKSFTVEKGIYQTSNFRVQPTESIVRFPNITNLCPFGEVFNATRFASVYAWNRKRISNCVADYSVLYNSASFSTFKCYGVSPTKLNDLCFTNVYADSFVIRGDEVRQIAPGQTGKIADYNYKLPDDFTGCVIAWNSNNLDSKVGGNYNYLYRLFRKSNLKPFERDISTEIYQAGSTPCNGVEGFNCYFPLQSYGFQPTNGVGYQPYRVVVLSFELLHAPATVCGPKKSTNLVKNKCVNFNFNGLTGTGVLTESNKKFLPFQQFGRDIADTTDAVRDPQTLEILDITPCSFGGVSVITPGTNTSNQVAVLYQDVNCTEVPVAIHADQLTPTWRVYSTGSNVFQTRAGCLIGAEHVNNSYECDIPIGAGICASYQTQTNSPRRARSVASQSIIAYTMSLGAENSVAYSNNSCAIPTNFTISVTTEILPVSMTKTSVDCTMYICGDSTECSNLLLQYGSFCTQLNRALTGIAVEQDKNTQEVFAQVKQIYKTPPIKDFGGFNFSQILPDSSKPSKRSFIEDLLFNKVTLADAGFIKQYGDCLGDIAARDLICAQKFNGLTVLPPLLTDEMIAQYTSALLAGTITSGWTFGAGAALQIPFAMQMAYRFNGIGVTQNVLYENQKLIANQFNSAIGKIQDSLSSTASALGKLQDVVNQNAQALNTLVKQLSSNFGAISSVLNDILSRLDKVEAEVQIDRLITGRLQSLQTYVTQQLIRAAEIRASANLAATKMSECVLGQSKRVDFCGKGYHLMSFPQSAPHGVVFLHVTYVPAQEKNFTCAPAICHDGKAHFPREGVFVSNGTHWFVTQRNFYEPQIITTDNTFVSGNCDVVIGIVNNTVYDPLQPELDSGGSGYIPEAPRDGQAYVRKDGEWVLLSTFL

SEQ ID NO: 10041 - protein, 1177 aa, Artificial Sequence
  SARS-CoV-2/Iceland/280/2020__EPI_ISL_417608 spike protein (1-1147)(I712C_T1077C) Foldon construct
MFVFLVLLPLVSSQCVNLTTRTQLPPAYTNSFTRGVYYPDKVFRSSVLHSTQDLFLPFFSNVTWFHAIHVSGTNGTKRFDNPVLPFNDGVYFASTEKSNIIRGWIFGTTLDSKTQSLLIVNNATNVVIKVCEFQFCNDPFLGVYYHKNNKSWMESEFRVYSSANNCTFEYVSQPFLMDLEGKQGNFKNLREFVFKNIDGYFKIYSKHTPINLVRDLPQGFSALEPLVDLPIGINITRFQTLLALHRSYLTPGDSSSGWTAGAAAYYVGYLQPRTFLLKYNENGTITDAVDCALDPLSETKCTLKSFTVEKGIYQTSNFRVQPTESIVRFPNITNLCPFGEVFNATRFASVYAWNRKRISNCVADYSVLYNSASFSTFKCYGVSPTKLNDLCFTNVYADSFVIRGDEVRQIAPGQTGKIADYNYKLPDDFTGCVIAWNSNNLDSKVGGNYNYLYRLFRKSNLKPFERDISTEIYQAGSTPCNGVEGFNCYFPLQSYGFQPTNGVGYQPYRVVVLSFELLHAPATVCGPKKSTNLVKNKCVNFNFNGLTGTGVLTESNKKFLPFQQFGRDIADTTDAVRDPQTLEILDITPCSFGGVSVITPGTNTSNQVAVLYQGVNCTEVPVAIHADQLTPTWRVYSTGSNVFQTRAGCLIGAEHVNNSYECDIPIGAGICASYHTQTNSPRRARSVASQSIIAYTMSLGAENSVAYSNNSCAIPTNFTISVTTEILPVSMTKTSVDCTMYICGDSTECSNLLLQYGSFCTQLNRALTGIAVEQDKNTQEVFAQVKQIYKTPPIKDFGGFNFSQILPDPSKPSKRSFIEDLLFNKVTLADAGFIKQYGDCLGDIAARDLICAQKFNGLTVLPPLLTDEMIAQYTSALLAGTITSGWTFGAGAALQIPFAMQMAYRFNGIGVTQNVLYENQKLIANQFNSAIGKIQDSLSSTASALGKLQDVVNQNAQALNTLVKQLSSNFGAISSVLNDILSRLDKVEAEVQIDRLITGRLQSLQTYVTQQLIRAAEIRASANLAATKMSECVLGQSKRVDFCGKGYHLMSFPQSAPHGVVFLHVTYVPAQEKNFTCAPAICHDGKAHFPREGVFVSNGTHWFVTQRNFYEPQIITTDNTFVSGNCDVVIGIVNNTVYDPLQPELDSGGSGYIPEAPRDGQAYVRKDGEWVLLSTFL

SEQ ID NO: 10042 - protein, 1177 aa, Artificial Sequence; identical to SEQ ID NO: 9997
  SARS-CoV-2/Iceland/247/2020__EPI_ISL_417575 spike protein (1-1147)(I712C_T1077C) Foldon construct

SEQ ID NO: 10043 - protein, 1177 aa, Artificial Sequence
  SARS-CoV-2/Iceland/238/2020__EPI_ISL_417566 spike protein (1-1147)(I712C_T1077C) Foldon construct
MFVFLVLLPLVSSQCVNLTTRTQLPPAYTNSFTRGVYYPDKVFRSSVLHSTQDLFLPFFSNVTWFHAIHVSGTNGTKRFDNPVLPFNDGVYFASTEKSNIIRGWIFGTTLDSKTQSLLIVNNATNVVIKVCEFQFCNDPFLGVYYHKNNKSWMESEFRVYSSANNCTFEYVSQPFLMDLEGKQGNFKNLREFVFKNIDGYFKIYSKHTPINLVRDLPQGFSALEPLVDLPIGINITRFQTLLALHRSYLTPGDSSSGWTAGAAAYYVGYLQPRTFLLKYNENGTITDAVDCALDPLSETKCTLKSFTVEKGIYQTSNFRVQPTESIVRFPNITNLCPFGEVFNATRFASVYAWNRKRISNCVADYSVLYNSASFSTFKCYGVSPTKLNDLCFTNVYADSFVIRGDEVRQIAPGQTGKIADYNYKLPDDFTGCVIAWNSNNLDSKVGGNYNYLYRLFRKSNLKPFERDISTEIYQAGSTPCNGVEGFNCYFPLQSYGFQPTNGVGYQPYRVVVLSFELLHAPATVCGPKKSTNLVKNKCVNFNFNGLTGTGVLTESNKKFLPFQQFGRDIADTTDAVRDPQTLEILDITPCSFGGVSVITPGTNTSNQVAVLYQGVNCTEVPVAIHADQLTPTWRVYSTGSNVFQTRAGCLIGAEHVNNSYECDIPIGAGICASYQTQTNSPRRARSVASQSIIAYTMSLGAENSVAYSNNSCAIPTNFTISVTTEILPVSMTKTSVDCTMYICGDSTECSNLLLQYGSFCTQLNRALTGIAVEQDKNTQEVFAQVKQIYKTPPIKDFGGFNFSQILPDPSKPSKRSFIEDLLFNKVTLADVGFIKQYGDCLGDIAARDLICAQKFNGLTVLPPLLTDEMIAQYTSALLAGTITSGWTFGAGAALQIPFAMQMAYRFNGIGVTQNVLYENQKLIANQFNSAIGKIQDSLSSTASALGKLQDVVNQNAQALNTLVKQLSSNFGAISSVLNDILSRLDKVEAEVQIDRLITGRLQSLQTYVTQQLIRAAEIRASANLAATKMSECVLGQSKRVDFCGKGYHLMSFPQSAPHGVVFLHVTYVPAQEKNFTCAPAICHDGKAHFPREGVFVSNGTHWFVTQRNFYEPQIITTDNTFVSGNCDVVIGIVNNTVYDPLQPELDSGGSGYIPEAPRDGQAYVRKDGEWVLLSTFL

SEQ ID NO: 10044 - protein, 1177 aa, Artificial Sequence
  SARS-CoV-2/Greece/16/2020__EPI_ISL_418265 spike protein (1-1147)(I712C_T1077C) Foldon construct
MFVFLVLLPLVSSQCVNLTTRTQLPPAYTNSFTRGVYYPDKVFRSSVLHSTQDLFLPFFSNVTWFHAIHVSGTNGTKRFDNPVLPFNDGVYFASTEKSNIIRGWIFGTTLDSKTQSLLIVNNATNVVIKVCEFQFCNDPFLGVYYHKNNKSWMESEFRVYSSANNCTFEYVSQPFLMDLEGKQGNFKNLREFVFKNVDGYFKIYSKHTPINLVRDLPQGFSALEPLVDLPIGINITRFQTLLALHRSYLTPGDSSSGWTAGAAAYYVGYLQPRTFLLKYNENGTITDAVDCALDPLSETKCTLKSFTVEKGIYQTSNFRVQPTESIVRFPNITNLCPFGEVFNATRFASVYAWNRKRISNCVADYSVLYNSASFSTFKCYGVSPTKLNDLCFTNVYADSFVIRGDEVRQIAPGQTGKIADYNYKLPDDFTGCVIAWNSNNLDSKVGGNYNYLYRLFRKSNLKPFERDISTEIYQAGSTPCNGVEGFNCYFPLQSYGFQPTNGVGYQPYRVVVLSFELLHAPATVCGPKKSTNLVKNKCVNFNFNGLTGTGVLTESNKKFLPFQQFGRDIADTTDAVRDPQTLEILDITPCSFGGVSVITPGTNTSNQVAVLYQDVNCTEVPVAIHADQLTPTWRVYSTGSNVFQTRAGCLIGAEHVNNSYECDIPIGAGICASYQTQTNSPRRARSVASQSIIAYTMSLGAENSVAYSNNSCAIPTNFTISVTTEILPVSMTKTSVDCTMYICGDSTECSNLLLQYGSFCTQLNRALTGIAVEQDKNTQEVFAQVKQIYKTPPIKDFGGFNFSQILPDPSKPSKRSFIEDLLFNKVTLADAGFIKQYGDCLGDIAARDLICAQKFNGLTVLPPLLTDEMIAQYTSALLAGTITSGWTFGAGAALQIPFAMQMAYRFNGIGVTQNVLYENQKLIANQFNSAIGKIQDSLSSTASALGKLQDVVNQNAQALNTLVKQLSSNFGAISSVLNDILSRLDKVEAEVQIDRLITGRLQSLQTYVTQQLIRAAEIRASANLAATKMSECVLGQSKRVDFCGKGYHLMSFPQSAPHGVVFLHVTYVPAQEKNFTCAPAICHDGKAHFPREGVFVSNGTHWFVTQRNFYEPQIITTDNTFVSGNCDVVIGIVNNTVYDPLQPELDSGGSGYIPEAPRDGQAYVRKDGEWVLLSTFL

SEQ ID NO: 10045 - protein, 1177 aa, Artificial Sequence
  SARS-CoV-2/Iceland/319/2020__EPI_ISL_417648 spike protein (1-1147)(I712C_T1077C) Foldon construct
MFVFLVLLPLVSSQCVNLTTRTQLPPAYTNSFTRGVYYPDKVFRSSVLHSTQDLFLPFFSNVTWFHAIHVSGTNGTKRFDNPVLPFNDGVYFASTEKSNIIRGWIFGTTLDSKTQSLLIVNNATNVVIKVCEFQFCNDPFLGVYYHKNNKSWMESEFRVYSSANNCTFEYVSQPFLIDLEGKQGNFKNLREFVFKNIDGYFKIYSKHTPINLVRDLPQGFSALEPLVDLPIGINITRFQTLLALHRSYLTPGDSSSGWTAGAAAYYVGYLQPRTFLLKYNENGTITDAVDCALDPLSETKCTLKSFTVEKGIYQTSNFRVQPTESIVRFPNITNLCPFGEVFNATRFASVYAWNRKRISNCVADYSVLYNSASFSTFKCYGVSPTKLNDLCFTNVYADSFVIRGDEVRQIAPGQTGKIADYNYKLPDDFTGCVIAWNSNNLDSKVGGNYNYLYRLFRKSNLKPFERDISTEIYQAGSTPCNGVEGFNCYFPLQSYGFQPTNGVGYQPYRVVVLSFELLHAPATVCGPKKSTNLVKNKCVNFNFNGLTGTGVLTESNKKFLPFQQFGRDIADTTDAVRDPQTLEILDITPCSFGGVSVITPGTNTSNQVAVLYQGVNCTEVPVAIHADQLTPTWRVYSTGSNVFQTRAGCLIGAEHVNNSYECDIPIGAGICASYQTQTNSPRRARSVASQSIIAYTMSLGAENSVAYSNNSCAIPTNFTISVTTEILPVSMTKTSVDCTMYICGDSTECSNLLLQYGSFCTQLNRALTGIAVEQDKNTQEVFAQVKQIYKTPPIKDFGGFNFSQILPDPSKPSKRSFIEDLLFNKVTLADAGFIKQYGDCLGDIAARDLICAQKFNGLTVLPPLLTDEMIAQYTSALLAGTITSGWTFGAGAALQIPFAMQMAYRFNGIGVTQNVLYENQKLIANQFNSAIGKIQDSLSSTASALGKLQDVVNQNAQALNTLVKQLSSNFGAISSVLNDILSRLDKVEAEVQIDRLITGRLQSLQTYVTQQLIRAAEIRASANLAATKMSECVLGQSKRVDFCGKGYHLMSFPQSAPHGVVFLHVTYVPAQEKNFTCAPAICHDGKAHFPREGVFVSNGTHWFVTQRNFYEPQIITTDNTFVSGNCDVVIGIVNNTVYDPLQPELDSGGSGYIPEAPRDGQAYVRKDGEWVLLSTFL

SEQ ID NO: 10046 - protein, 1177 aa, Artificial Sequence
  SARS-CoV-2/Congo/94/2020__EPI_ISL_417947 spike protein (1-1147)(I712C_T1077C) Foldon construct
MFVFLVLLPLVSSQCVNLTTRTQLPPAYTNSFTRGVYYPDKVFRSSVLHSTQDLFLPFFSNVTWFHAIHVSGTNGTKRFDNPVLPFNDGVYFASTEKSNIIRGWIFGTTLDSKTQSLLIVNNATNVVIKVCEFQFCNDPFLGVYYHKNNKSWMESEFRVYSSANNCTFEYVSQPFLMDLEGKQGNFKNLREFVFKNIDGYFKIYSKHTPINLVRDLPQGFSALEPLVDLPIGINITRFQTLLALHRSYLTPGDSSSGWTAGAAAYYVGYLQPRTFLLKYNENGTITDAVDCALDPLSETKCTLKSFTVEKGIYQTSNFRVQPTESIVRFPNITNLCPFGEVFNATRFASVYAWNRKRISNCVADYSVLYNSASFSTFKCYGVSPTKLNDLCFTNVYADSFVIRGDEVRQIAPGQTGKIADYNYKLPDDFTGCVIAWNSNNLDSKVGGNYNYLYRLFRKSNLKPFERDISTEIYQAGSTPCNGVEGFNCYFPLQSYGFQPTNGVGYQPYRVVVLSFELLHAPATVCGPKKSTNLVKNKCVNFNFNGLTGTGVLTESNKKFLPFQQFGRDIADTTDAVRDPQTLEILDITPCSFGGVSVITPGTNTSNQVAVLYQGVNCTEVPVAIHADQLTPTWRVYSTGSNVFQTRAGCLIGAEHVNNSYECDIPIGAGICASYQTQTNSPRRARSVASQSIIAYTMSLGAENSVAYSNNSCAIPTNFTISVTTEILPVSMTKTSVDCTMYICGDSTECSNLLLQYGSFCTQLNRALTGIAVEQDKNTQEVFAQVKQIYKTPPIKDFGGFNFSQILPDPSKPSKRSFIEDILFNKVTLADAGFIKQYGDCLGDIAARDLICAQKFNGLTVLPPLLTDEMIAQYTSALLAGTITSGWTFGAGAALQIPFAMQMAYRFNGIGVTQNVLYENQKLIANQFNSAIGKIQDSLSSTASALGKLQDVVNQNAQALNTLVKQLSSNFGAISSVLNDILSRLDKVEAEVQIDRLITGRLQSLQTYVTQQLIRAAEIRASANLAATKMSECVLGQSKRVDFCGKGYHLMSFPQSAPHGVVFLHVTYVPAQEKNFTCAPAICHDGKAHFPREGVFVSNGTHWFVTQRNFYEPQIITTDNTFVSGNCDVVIGIVNNTVYDPLQPELDSGGSGYIPEAPRDGQAYVRKDGEWVLLSTFL

SEQ ID NO: 10047 - protein, 1177 aa, Artificial Sequence
  SARS-CoV-2/Congo/158/2020__EPI_ISL_417950 spike protein (1-1147)(I712C_T1077C) Foldon construct
MFVFLVLLPLVSSQCVNLTTRTQLPPAYTNSFTRGVYYPDKVFRSSVLHSTQDLFLPFFSNVTWFHAIHVSGTNGTKRFDNPVLPFNDGVYFASTEKSNIIRGWIFGTTLDSKTQSLLIVNNATNVVIKVCEFQFCNDPFLGVYYHKNNKSWMESEFRVYSSANNCTFEYVSQPFLMDLEGKQGNFKNLREFVFKNIDGYFKIYSKHTPINLVRDLPQGFSALEPLVDLPIGINITRFQTLLALHRSYLTPGDSSSGWTAGAAAYYVGYLQPRTFLLKYNENGTITDAVDCALDPLSETKCTLKSFTVEKGIYQTSNFRVQPTESIVRFPNITNLCPFGEVFNATRFASVYAWNRKRISNCVADYSVLYNSASFSTFKCYGVSPTKLNDLCFTNVYADSFVIRGDEVRQIAPGQTGKIADYNYKLPDDFTGCVIAWNSNNLDSKVGGNYNYLYRLFRKSNLKPFERDISTEIYQAGSTPCNGVEGFNCYFPLQSYGFQPTNGVGYQPYRVVVLSFELLHAPATVCGPKKSTNLVKNKCVNFNFNGLTGTGVLTESNKKFLPFQQFGRDIADTTDAVRDPQTLEILDITPCSFGGVSVITPGTNTSNQVAVLYQDVNCTEVPVAIHADQLTPTWRVYSTGSNVFQTRAGCLIGAEHVNNSYECDIPIGAGICASYQTQTNSPRRARSVASQSIIAYTMSLGAENSVAYSNNSCAIPTNFTISVTTEILPVSMTKTSVDCTMYICGDSTECSNLLLQYGSFCTQLNRALTGIAVEQDKNTQEVFAQVKQIYKTPPIKDFGGFNFSQILPDPSKPSKRSFIEDLLFNKVTLADAGFIKQYGDCLGDIAARDLICAQKFNGLTVLPPLLTDEMIAQYTSALLAGTITSGWTFGAGAALQIPFAMQMAYRFNGIGVTQNVLYENQKLIANQFNSAIGKIQDSLSSTASALGKLQDVVNQNAQALNTLVKQLSSNFGAISSVLNDILSRLDKVEAEVQIDRLITGRLQSLQTYVTQQLIRAAEIRASANLAATKMSECVLGQSKRVDFCGKGYHLMSFPQSAPHGVVFLHVTYVPAQEKNFTCAPAICHDGKAHFPREGVFVSNGTHWFVTQRNFYEPQIITTDNTFLSGNCDVVIGIVNNTVYDPLQPELDSGGSGYIPEAPRDGQAYVRKDGEWVLLSTFL

SEQ ID NO: 10048 - protein, 1177 aa, Artificial Sequence
  SARS-CoV-2/USA/UT-00034/2020__EPI_ISL_417977 spike protein (1-1147)(I712C_T1077C) Foldon construct
MFVFLVLLPLVSSQCVNLTTRTQLPPAYTNSFTRGVYYPDKVFRSSVLHSTQDLFLPFFSNVTWFHAIHVSGTNGTKRFDNPVLPFNDGVYFASTEKSNIIRGWIFGTTLDSKTQSLLIVNNATNVVIKVCEFQFCNDPFLGVYYYKNNKSWMESEFRVYSSANNCTFEYVSQPFLMDLEGKQGNFKNLREFVFKNIDGYFKIYSKHTPINLVRDLPQGFSALEPLVDLPIGINITRFQTLLALHRSYLTPGDSSSGWTAGAAAYYVGYLQPRTFLLKYNENGTITDAVDCALDPLSETKCTLKSFTVEKGIYQTSNFRVQPTESIVRFPNITNLCPFGEVFNATRFASVYAWNRKRISNCVADYSVLYNSASFSTFKCYGVSPTKLNDLCFTNVYADSFVIRGDEVRQIAPGQTGKIADYNYKLPDDFTGCVIAWNSNNLDSKVGGNYNYLYRLFRKSNLKPFERDISTEIYQAGSTPCNGVEGFNCYFPLQSYGFQPTNGVGYQPYRVVVLSFELLHAPATVCGPKKSTNLVKNKCVNFNFNGLTGTGVLTESNKKFLPFQQFGRDIADTTDAVRDPQTLEILDITPCSFGGVSVITPGTNTSNQVAVLYQGVNCTEVPVAIHADQLTPTWRVYSTGSNVFQTRAGCLIGAEHVNNSYECDIPIGAGICASYQTQTNSPRRARSVASQSIIAYTMSLGAENSVAYSNNSCAIPTNFTISVTTEILPVSMTKTSVDCTMYICGDSTECSNLLLQYGSFCTQLNRALTGIAVEQDKNTQEVFAQVKQIYKTPPIKDFGGFNFSQILPDPSKPSKRSFIEDLLFNKVTLADAGFIKQYGDCLGDIAARDLICAQKFNGLTVLPPLLTDEMIAQYTSALLAGTITSGWTFGAGAALQIPFAMQMAYRFNGIGVTQNVLYENQKLIANQFNSAIGKIQDSLSSTASALGKLQDVVNQNAQALNTLVKQLSSNFGAISSVLNDILSRLDKVEAEVQIDRLITGRLQSLQTYVTQQLIRAAEIRASANLAATKMSECVLGQSKRVDFCGKGYHLMSFPQSAPHGVVFLHVTYVPAQEKNFTCAPAICHDGKAHFPREGVFVSNGTHWFVTQRNFYEPQIITTDNTFVSGNCDVVIGIVNNTVYDPLQPELDSGGSGYIPEAPRDGQAYVRKDGEWVLLSTFL

SEQ ID NO: 10049 - protein, 1177 aa, Artificial Sequence
  SARS-CoV-2/USA/UT-00033/2020__EPI_ISL_417976 spike protein (1-1147)(I712C_T1077C) Foldon construct
MFVFLVLLPLVSSQCVNLTTRTQLPPAYTNSFTRGVYYPDKVFRSSVLHSTQDLFLPFFSNVTWFHAIHVSGTNGTKRFDNPVLPFNDGVYFASTEKSNIIRGWIFGTTLDSKTQSLLIVNNATNVVIKVCEFQFCNDPFLGVYYHKNNKSWMESEFRVYSSANNCTFEYVSQPFLMDLEGKQGNFKNLREFVFKNIDGYFKIYSKHTPINLVRDLPQGFSALEPLVDLPIGINITRFQTLLALHRSYLTPGDSSSGLTAGAAAYYVGYLQPRTFLLKYNENGTITDAVDCALDPLSETKCTLKSFTVEKGIYQTSNFRVQPTESIVRFPNITNLCPFGEVFNATRFASVYAWNRKRISNCVADYSVLYNSASFSTFKCYGVSPTKLNDLCFTNVYADSFVIRGDEVRQIAPGQTGKIADYNYKLPDDFTGCVIAWNSNNLDSKVGGNYNYLYRLFRKSNLKPFERDISTEIYQAGSTPCNGVEGFNCYFPLQSYGFQPTNGVGYQPYRVVVLSFELLHAPATVCGPKKSTNLVKNKCVNFNFNGLTGTGVLTESNKKFLPFQQFGRDIADTTDAVRDPQTLEILDITPCSFGGVSVITPGTNTSNQVAVLYQGVNCTEVPVAIHADQLTPTWRVYSTGSNVFQTRAGCLIGAEHVNNSYECDIPIGAGICASYQTQTNSPRRARSVASQSIIAYTMSLGAENSVAYSNNSCAIPTNFTISVTTEILPVSMTKTSVDCTMYICGDSTECSNLLLQYGSFCTQLNRALTGIAVEQDKNTQEVFAQVKQIYKTPPIKDFGGFNFSQILPDPSKPSKRSFIEDLLFNKVTLADAGFIKQYGDCLGDIAARDLICAQKFNGLTVLPPLLTDEMIAQYTSALLAGTITSGWTFGAGAALQIPFAMQMAYRFNGIGVTQNVLYENQKLIANQFNSAIGKIQDSLSSTASALGKLQDVVNQNAQALNTLVKQLSSNFGAISSVLNDILSRLDKVEAEVQIDRLITGRLQSLQTYVTQQLIRAAEIRASANLAATKMSECVLGQSKRVDFCGKGYHLMSFPQSAPHGVVFLHVTYVPAQEKNFTCAPAICHDGKAHFPREGVFVSNGTHWFVTQRNFYEPQIITTDNTFVSGNCDVVIGIVNNTVYDPLQPELDSGGSGYIPEAPRDGQAYVRKDGEWVLLSTFL

SEQ ID NO: 10050 - protein, 1177 aa, Artificial Sequence
  SARS-CoV-2/USA/WI-13/2020__EPI_ISL_417516 spike protein (1-1147)(I712C_T1077C) Foldon construct
MFVFLVLLPLVSSQCVNLTTRTQLPPAYTNSFTRGVYYPDKVFRSSVLHSTQDLFLPFFSNVTWFHAIHVSGTNGTKRFDNPVLPFNDGVYFASTEKSNIIRGWIFGTTLDSKTQSLLIVNNATNVVIKVCEFQFCNDPFLGVYYHKNNKSWMESEFRVYSSANNCTFEYVSQPFLMDLEGKQGNFKNLREFVFKNIDGYFKIYSKHTPINLVRDLPQGFSALEPLVDLPIGINITRFQTLLALHRSYLTPGDSSSGWTAGAAAYYVGYLQPRTFLLKYNENGTITDAVDCALDPLSETKCTLKSFTVEKGIYQTSNFRVLPTESIVRFPNITNLCPFGEVFNATRFASVYAWNRKRISNCVADYSVLYNSASFSTFKCYGVSPTKLNDLCFTNVYADSFVIRGDEVRQIAPGQTGKIADYNYKLPDDFTGCVIAWNSNNLDSKVGGNYNYLYRLFRKSNLKPFERDISTEIYQAGSTPCNGVEGFNCYFPLQSYGFQPTNGVGYQPYRVVVLSFELLHAPATVCGPKKSTNLVKNKCVNFNFNGLTGTGVLTESNKKFLPFQQFGRDIADTTDAVRDPQTLEILDITPCSFGGVSVITPGTNTSNQVAVLYQGVNCTEVPVAIHADQLTPTWRVYSTGSNVFQTRAGCLIGAEHVNNSYECDIPIGAGICASYQTQTNSPRRARSVASQSIIAYTMSLGAENSVAYSNNSCAIPTNFTISVTTEILPVSMTKTSVDCTMYICGDSTECSNLLLQYGSFCTQLNRALTGIAVEQDKNTQEVFAQVKQIYKTPPIKDFGGFNFSQILPDPSKPSKRSFIEDLLFNKVTLADAGFIKQYGDCLGDIAARDLICAQKFNGLTVLPPLLTDEMIAQYTSALLAGTITSGWTFGAGAALQIPFAMQMAYRFNGIGVTQNVLYENQKLIANQFNSAIGKIQDSLSSTASALGKLQDVVNQNAQALNTLVKQLSSNFGAISSVLNDILSRLDKVEAEVQIDRLITGRLQSLQTYVTQQLIRAAEIRASANLAATKMSECVLGQSKRVDFCGKGYHLMSFPQSAPHGVVFLHVTYVPAQEKNFTCAPAICHDGKAHFPREGVFVSNGTHWFVTQRNFYEPQIITTDNTFVSGNCDVVIGIVNNTVYDPLQPELDSGGSGYIPEAPRDGQAYVRKDGEWVLLSTFL

SEQ ID NO: 10051 - protein, 1176 aa, Artificial Sequence
  SARS-CoV-2/India/1-27/2020__EPI_ISL_413522 spike protein (1-1146)(I711C_T1076C) Foldon construct
MFVFLVLLPLVSSQCVNLTTRTQLPPAYTNSFTRGVYYPDKVFRSSVLHSTQDLFLPFFSNVTWFHAIHVSGTNGTKRFDNPVLPFNDGVYFASTEKSNIIRGWIFGTTLDSKTQSLLIVNNATNVVIKVCEFQFCNDPFLGVYHKNNKSWMESEFRVYSSANNCTFEYVSQPFLMDLEGKQGNFKNLREFVFKNIDGYFKIYSKHTPINLVRDLPQGFSALEPLVDLPIGINITRFQTLLALHRSYLTPGDSSSGWTAGAAAYYVGYLQPRTFLLKYNENGTITDAVDCALDPLSETKCTLKSFTVEKGIYQTSNFRVQPTESIVRFPNITNLCPFGEVFNATRFASVYAWNRKRISNCVADYSVLYNSASFSTFKCYGVSPTKLNDLCFTNVYADSFVIRGDEVIQIAPGQTGKIADYNYKLPDDFTGCVIAWNSNNLDSKVGGNYNYLYRLFRKSNLKPFERDISTEIYQAGSTPCNGVEGFNCYFPLQSYGFQPTNGVGYQPYRVVVLSFELLHAPATVCGPKKSTNLVKNKCVNFNFNGLTGTGVLTESNKKFLPFQQFGRDIADTTDAVRDPQTLEILDITPCSFGGVSVITPGTNTSNQVAVLYQDVNCTEVPVAIHADQLTPTWRVYSTGSNVFQTRAGCLIGAEHVNNSYECDIPIGAGICASYQTQTNSPRRARSVASQSIIAYTMSLGAENSVAYSNNSCAIPTNFTISVTTEILPVSMTKTSVDCTMYICGDSTECSNLLLQYGSFCTQLNRALTGIAVEQDKNTQEVFAQVKQIYKTPPIKDFGGFNFSQILPDPSKPSKRSFIEDLLFNKVTLADAGFIKQYGDCLGDIAARDLICAQKFNGLTVLPPLLTDEMIAQYTSALLAGTITSGWTFGAGAALQIPFAMQMAYRFNGIGVTQNVLYENQKLIANQFNSAIGKIQDSLSSTASALGKLQDVVNQNAQALNTLVKQLSSNFGAISSVLNDILSRLDKVEAEVQIDRLITGRLQSLQTYVTQQLIRAAEIRASANLAATKMSECVLGQSKRVDFCGKGYHLMSFPQSAPHGVVFLHVTYVPAQEKNFTCAPAICHDGKAHFPREGVFVSNGTHWFVTQRNFYEPQIITTDNTFVSGNCDVVIGIVNNTVYDPLQPELDSGGSGYIPEAPRDGQAYVRKDGEWVLLSTFL

SEQ ID NO: 10052 - protein, 1171 aa, Artificial Sequence
  SARS-CoV-2/pangolin/Guangxi/P4L/2017__EPI_ISL_410538 spike protein (1-1141)(I706C_T1071C) Foldon construct
MFVFLFVLPLVSSQCVNLTTRTGIPPGYTNSSTRGVYYPDKVFRSSILHLTQDLFLPFFSNVTWFNTINYQGGFKKFDNPVLPFNDGVYFASTEKSNIIRGWIFGTTLDARTQSLLIVNNATNVVIKVCEFQFCTDPFLGVYYHNNNKTWVENEFRVYSSANNCTFEYISQPFLMDLEGKQGNFKNLREFVFKNVDGYFKIYSKHTPIDLVRDLPRGFAALEPLVDLPIGINITRFQTLLALHRSYLTPGNLESGWTTGAAAYYVGYLQQRTFLLSYNQNGTITDAVDCSLDPLSETKCTLKSLTVEKGIYQTSNFRVQPTISIVRFPNITNLCPFGEVFNASKFASVYAWNRKRISNCVADYSVLYNSTSFSTFKCYGVSPTKLNDLCFTNVYADSFVVKGDEVRQIAPGQTGVIADYNYKLPDDFTGCVIAWNSVKQDALTGGNYGYLYRLFRKSKLKPFERDISTEIYQAGSTPCNGQVGLNCYYPLERYGFHPTTGVNYQPFRVVVLSFELLNGPATVCGPKLSTTLVKDKCVNFNFNGLTGTGVLTTSKKQFLPFQQFGRDISDTTDAVRDPQTLEILDITPCSFGGVSVITPGTNTSNQVAVLYQDVNCTEVPMAIHAEQLTPAWRVYSAGANVFQTRAGCLVGAEHVNNSYECDIPVGAGICASYHSMSSLRSVNQRSIIAYTMSLGAENSVAYSNNSCAIPTNFTISVTTEILPVSMTKTSVDCTMYICGDSIECSNLLLQYGSFCTQLNRALTGIAVEQDKNTQEVFAQVKQIYKTPPIKDFGGFNFSQILPDPSKPSKRSFIEDLLFNKVTLADAGFIKQYGDCLGDIAARDLICAQKFNGLTVLPPLLTDEMIAQYTSALLAGTITSGWTFGAGAALQIPFAMQMAYRFNGIGVTQNVLYENQKLIANQFNSAIGKIQDSLSSTASALGKLQDVVNQNAQALNTLVKQLSSNFGAISSVLNDILSRLDKVEAEVQIDRLITGRLQSLQTYVTQQLIRAAEIRASANLAATKMSECVLGQSKRVDFCGKGYHLMSFPQSAPHGVVFLHVTYVPAQEKNFTCAPAICHEGKAHFPREGVFVSNGTHWFITQRNFYEPQIITTDNTFVSGSCDVVIGIVNNTVYDPLQPELDSGGSGYIPEAPRDGQAYVRKDGEWVLLSTFL

SEQ ID NO: 10053 - protein, 1171 aa, Artificial Sequence
  SARS-CoV-2/pangolin/Guangxi/P5L/2017__EPI_ISL_410540 spike protein (1-1141)(I706C_T1071C) Foldon construct
MFVFLFVLPLVSSQCVNLTTRTGIPPGYTNSSTRGVYYPDKVFRSSILHLTQDLFLPFFSNVTWFNTINYQGGFKKFDNPVLPFNDGVYFASTEKSNIIRGWIFGTTLDARTQSLLIVNNATNVVIKVCEFQFCTDPFLGVYYHNNNKTWVENEFRVYSSANNCTFEYISQPFLMDLEGKQGNFKNLREFVFKNVDGYFKIYSKHTPIDLVRDLPRGFAALEPLVDLPIGINITRFQTLLALHRSYLTPGKLESGWTTGAAAYYVGYLQQRTFLLSYNQNGTITDAVDCSLDPLSETKCTLKSLTVEKGIYQTSNFRVQPTISIVRFPNITNLCPFGEVFNASKFASVYAWNRKRISNCVADYSVLYNSTSFSTFKCYGVSPTKLNDLCFTNVYADSFVVKGDEVRQIAPGQTGVIADYNYKLPDDFTGCVIAWNSVKQDALTGGNYGYLYRLFRKSKLKPFERDISTEIYQAGSTPCNGQVGLNCYYPLERYGFHPTTGVNYQPFRVVVLSFELLNGPATVCGPKLSTTLVKDKCVNFNFNGLTGTGVLTTSKKQFLPFQQFGRDISDTTDAVRDPQTLEILDITPCSFGGVSVITPGTNTSNQVAVLYQDVNCTEVPMAIHAEQLTPAWRVYSAGANVFQTRAGCLVGAEHVNNSYECDIPVGAGICASYHSMSSFRSVNQRSIIAYTMSLGAENSVAYSNNSCAIPTNFTISVTTEILPVSMTKTSVDCTMYICGDSIECSNLLLQYGSFCTQLNRALTGIAVEQDKNTQEVFAQVKQIYKTPPIKDFGGFNFSQILPDPSKPSKRSFIEDLLFNKVTLADAGFIKQYGDCLGDIAARDLICAQKFNGLTVLPPLLTDEMIAQYTSALLAGTITSGWTFGAGAALQIPFAMQMAYRFNGIGVTQNVLYENQKLIANQFNSAIGKIQDSLSSTASALGKLQDVVNQNAQALNTLVKQLSSNFGAISSVLNDILSRLDKVEAEVQIDRLITGRLQSLQTYVTQQLIRAAEIRASANLAATKMSECVLGQSKRVDFCGKGYHLMSFPQSAPHGVVFLHVTYVPAQEKNFTCAPAICHEGKAHFPREGVFVSNGTHWFITQRNFYEPQIITTDNTFVSGSCDVVIGIVNNTVYDPLQPELDSGGSGYIPEAPRDGQAYVRKDGEWVLLSTFL

SEQ ID NO: 10054 - protein, 1171 aa, Artificial Sequence
  SARS-CoV-2/pangolin/Guangxi/P5E/2017__EPI_ISL_410541 spike protein (1-1141)(I706C_T1071C) Foldon construct
MFVFLFVLPLVSSQCVNLTTRTGIPPGYTNSSTRGVYYPDKVFRSSILHLTQDLFLPFFSNVTWFNTITYQGGSKKFDNPVLPFNDGVYFASTEKSNIIRGWIFGTTLDARTQSLLIVNNATNVVIKVCEFQFCTDPFLGVYYHNNNKTWVENEFRVYSSANNCTFEYISQPFLMDLEGKQGNFKNLREFVFKNVDGYFKIYSKHTPIDLVRDLPRGFAALEPLVDLPIGINITRFQTLLALHRSYLTPGKLESGWTTGAAAYYVGYLQQRTFLLSYNQNGTITDAVDCSLDPLSETKCTLKSLTVEKGIYQTSNFRVQPTISIVRFPNITNLCPFGEVFNASKFASVYAWNRKRISNCVADYSVLYNSTSFSTFKCYGVSPTKLNDLCFTNVYADSFVVKGDEVRQIAPGQTGVIADYNYKLPDDFTGCVIAWNSVKQDALTGDNYGYLYRLFRKSKLKPFERDISTEIYQAGSTPCNGQVGLNCYYPLERYGFHPTTGVNYQPFRVVVLSFELLNGPATVCGPKLSTTLVKDKCVNFNFNGLTGTGVLTTSKKQFLPFQQFGRDISDTTDAVRDPQTLEILDITPCSFGGVSVITPGTNTSNQVAVLYQDVNCTEVPMAIHAEQLTPAWRVYSAGANVFQTRAGCLVGAEHVNNSYECDIPVGAGICASYHSMSSFRSVNQRSIIAYTMSLGAENSVAYSNNSCAIPTNFTISVTTEILPVSMTKTSVDCTMYICGDSIECSNLLLQYGSFCTQLNRALTGIAVEQDKNTQEVFAQVKQIYKTPPIKDFGGFNFSQILPDPSKPSKRSFIEDLLFNKVTLADAGFIKQYGDCLGDIAARDLICAQKFNGLTVLPPLLTDEMIAQYTSALLAGTITSGWTFGAGAALQIPFAMQMAYRFNGIGVTQNVLYENQKLIANQFNSAIGKIQDSLSSTASALGKLQDVVNQNAQALNTLVKQLSSNFGAISSVLNDILSRLDKVEAEVQIDRLITGRLQSLQTYVTQQLIRAAEIRASANLAATKMSECVLGQSKRVDFCGKGYHLMSFPQSAPHGVVFLHVTYVPAQEKNFTCAPAICHEGKAHFPREGVFVSNGTHWFITQRNFYEPQIITTDNTFVSGSCDVVIGIVNNTVYDPLQPELDSGGSGYIPEAPRDGQAYVRKDGEWVLLSTFL

SEQ ID NO: 10055 - protein, 1169 aa, Artificial Sequence
  SARS-CoV-2/pangolin/Guangxi/P1E/2017__EPI_ISL_410539 spike protein (1-1139)(I704C_T1069C) Foldon construct
MFVFLFVLPLVSSQCVNLTTRTGIQPGYTNSSTRGVYYPDKVFRSSILHLTQDLFLPFFSNVTWFNTINYQGGFKKFDNPVLPFNDGVYFASTEKSNIIRGWIFGTTLDARTQSLLIVNNATNVVIKVCEFQFCTDPFLGVYYHNNNKTWVENEFRVYSSANNCTFEYISQPFLMDLEGKQGNFKNLREFVFKNVDGYFKIYSKHTPIDLVRDLPRGFAALEPLVDLPIGINITRFQTLLALHRSYLTPGKLESGWTTGAAAYYVGYLQQRTFLLSYNQNGTITDAVDCSLDPLSETKCTLKSLTVEKGIYQTSNFRVQPTISIVRFPNITNLCPFGEVFNASKFASVYAWNRKRISNCVADYSVLYNSTSFSTFKCYGVSPTKLNDLCFTNVYADSFVVKGDEVRQIAPGQTGVIADYNYKLPDDFTGCVIAWNSVKQDALTGGNYLYRLFRKSKLKPFERDISTEIYQAGSTPCNGQVGLNCYYPLERYGFHPTTGVNYQPFRVVVLSFELLNGPATVCGPKLSTTLVKDKCVNFNFNGLTGTGVLTTSKKQFLPFQQFGRDISDTTDAVRDPQTLEILDITPCSFGGVSVITPGTNTSNQVAVLYQDVNCTEVPMAIHAEQLTPAWRVYSAGANVFQTRAGCLVGAEHVNNSYECDIPVGAGICASYHSMSSLRSVNQRSIIAYTMSLGAENSVAYSNNSCAIPTNFTISVTTEILPVSMTKTSVDCTMYICGDSIECSNLLLQYGSFCTQLNRALTGIAVEQDKNTQEVFAQVKQIYKTPPIKDFGGFNFSQILPDPSKPSKRSFIEDLLFNKVTLADAGFIKQYGDCLGDIAARDLICAQKFNGLTVLPPLLTDEMIAQYTSALLAGTITSGWTFGAGAALQIPFAMQMAYRFNGIGVTQNVLYENQKLIANQFNSAIGKIQDSLSSTASALGKLQDVVNQNAQALNTLVKQLSSNFGAISSVLNDILSRLDKVEAEVQIDRLITGRLQSLQTYVTQQLIRAAEIRASANLAATKMSECVLGQSKRVDFCGKGYHLMSFPQSAPHGVVFLHVTYVPAQEKNFTCAPAICHEGKAHFPREGVFVSNGTHWFITQRNFYEPQIITTDNTFVSGSCDVVIGIVNNTVYDPLQPELDSGGSGYIPEAPRDGQAYVRKDGEWVLLSTFL

SEQ ID NO: 10056 - protein, 1177 aa, Artificial Sequence
  SARS-CoV-2/Wuhan/WIV05/2019__EPI_ISL_402128 spike protein (1-1147)(I714C_Y1110C) Foldon construct
MFVFLVLLPLVSSQCVNLTTRTQLPPAYTNSFTRGVYYPDKVFRSSVLHSTQDLFLPFFSNVTWFHAIHVSGTNGTKRFDNPVLPFNDGVYFASTEKSNIIRGWIFGTTLDSKTQSLLIVNNATNVVIKVCEFQFCNDPFLGVYYHKNNKSWMESEFRVYSSANNCTFEYVSQPFLMDLEGKQGNFKNLREFVFKNIDGYFKIYSKHTPINLVRDLPQGFSALEPLVDLPIGINITRFQTLLALHRSYLTPGDSSSGWTAGAAAYYVGYLQPRTFLLKYNENGTITDAVDCALDPLSETKCTLKSFTVEKGIYQTSNFRVQPTESIVRFPNITNLCPFGEVFNATRFASVYAWNRKRISNCVADYSVLYNSASFSTFKCYGVSPTKLNDLCFTNVYADSFVIRGDEVRQIAPGQTGKIADYNYKLPDDFTGCVIAWNSNNLDSKVGGNYNYLYRLFRKSNLKPFERDISTEIYQAGSTPCNGVEGFNCYFPLQSYGFQPTNGVGYQPYRVVVLSFELLHAPATVCGPKKSTNLVKNKCVNFNFNGLTGTGVLTESNKKFLPFQQFGRDIADTTDAVRDPQTLEILDITPCSFGGVSVITPGTNTSNQVAVLYQDVNCTEVPVAIHADQLTPTWRVYSTGSNVFQTRAGCLIGAEHVNNSYECDIPIGAGICASYQTQTNSPRRARSVASQSIIAYTMSLGAENSVAYSNNSIACPTNFTISVTTEILPVSMTKTSVDCTMYICGDSTECSNLLLQYGSFCTQLNRALTGIAVEQDKNTQEVFAQVKQIYKTPPIKDFGGFNFSQILPDPSKPSKRSFIEDLLFNKVTLADAGFIKQYGDCLGDIAARDLICAQKFNGLTVLPPLLTDEMIAQYTSALLAGTITSGWTFGAGAALQIPFAMQMAYRFNGIGVTQNVLYENQKLIANQFNSAIGKIQDSLSSTASALGKLQDVVNQNAQALNTLVKQLSSNFGAISSVLNDILSRLDKVEAEVQIDRLITGRLQSLQTYVTQQLIRAAEIRASANLAATKMSECVLGQSKRVDFCGKGYHLMSFPQSAPHGVVFLHVTYVPAQEKNFTTAPAICHDGKAHFPREGVFVSNGTHWFVTQRNFCEPQIITTDNTFVSGNCDVVIGIVNNTVYDPLQPELDSGGSGYIPEAPRDGQAYVRKDGEWVLLSTFL

SEQ ID NO: 10057 - protein, 1173 aa, Artificial Sequence
  SARS-CoV-2/bat/Yunnan/RaTG13/2013__EPI_ISL_402131 spike protein (1-1143)(I710C_Y1106C) Foldon construct
MFVFLVLLPLVSSQCVNLTTRTQLPPAYTNSSTRGVYYPDKVFRSSVLHLTQDLFLPFFSNVTWFHAIHVSGTNGIKRFDNPVLPFNDGVYFASTEKSNIIRGWIFGTTLDSKTQSLLIVNNATNVVIKVCEFQFCNDPFLGVYYHKNNKSWMESEFRVYSSANNCTFEYVSQPFLMDLEGKQGNFKNLREFVFKNIDGYFKIYSKHTPINLVRDLPPGFSALEPLVDLPIGINITRFQTLLALHRSYLTPGDSSSGWTAGAAAYYVGYLQPRTFLLKYNENGTITDAVDCALDPLSETKCTLKSFTVEKGIYQTSNFRVQPTDSIVRFPNITNLCPFGEVFNATTFASVYAWNRKRISNCVADYSVLYNSTSFSTFKCYGVSPTKLNDLCFTNVYADSFVITGDEVRQIAPGQTGKIADYNYKLPDDFTGCVIAWNSKHIDAKEGGNFNYLYRLFRKANLKPFERDISTEIYQAGSKPCNGQTGLNCYYPLYRYGFYPTDGVGHQPYRVVVLSFELLNAPATVCGPKKSTNLVKNKCVNFNFNGLTGTGVLTESNKKFLPFQQFGRDIADTTDAVRDPQTLEILDITPCSFGGVSVITPGTNASNQVAVLYQDVNCTEVPVAIHADQLTPTWRVYSTGSNVFQTRAGCLIGAEHVNNSYECDIPIGAGICASYQTQTNSRSVASQSIIAYTMSLGAENSVAYSNNSIACPTNFTISVTTEILPVSMTKTSVDCTMYICGDSTECSNLLLQYGSFCTQLNRALTGIAVEQDKNTQEVFAQVKQIYKTPPIKDFGGFNFSQILPDPSKPSKRSFIEDLLFNKVTLADAGFIKQYGDCLGDIAARDLICAQKFNGLTVLPPLLTDEMIAQYTSALLAGTITSGWTFGAGAALQIPFAMQMAYRFNGIGVTQNVLYENQKLIANQFNSAIGKIQDSLSSTASALGKLQDVVNQNAQALNTLVKQLSSNFGAISSVLNDILSRLDKVEAEVQIDRLITGRLQSLQTYVTQQLIRAAEIRASANLAATKMSECVLGQSKRVDFCGKGYHLMSFPQSAPHGVVFLHVTYVPAQEKNFTTAPAICHDGKAHFPREGVFVSNGTHWFVTQRNFCEPQIITTDNTFVSGSCDVVIGIVNNTVYDPLQPELDSGGSGYIPEAPRDGQAYVRKDGEWVLLSTFL

SEQ ID NO: 10058 - protein, 1177 aa, Artificial Sequence
  SARS-CoV-2/Wuhan/HBCDC-HB-01/2019__EPI_ISL_402132 spike protein (1-1147)(I714C_Y1110C) Foldon construct
MFVFLVLLPLVSSQCVNLTTRTQLPPAYTNSITRGVYYPDKVFRSSVLHSTQDLFLPFFSNVTWFHAIHVSGTNGTKRFDNPVLPFNDGVYFASTEKSNIIRGWIFGTTLDSKTQSLLIVNNATNVVIKVCEFQFCNDPFLGVYYHKNNKSWMESEFRVYSSANNCTFEYVSQPFLMDLEGKQGNFKNLREFVFKNIDGYFKIYSKHTPINLVRDLPQGFSALEPLVDLPIGINITRFQTLLALHRSYLTPGDSSSGWTAGAAAYYVGYLQPRTFLLKYNENGTITDAVDCALDPLSETKCTLKSFTVEKGIYQTSNFRVQPTESIVRFPNITNLCPFGEVFNATRFASVYAWNRKRISNCVADYSVLYNSASFSTFKCYGVSPTKLNDLCFTNVYADSFVIRGDEVRQIAPGQTGKIADYNYKLPDDFTGCVIAWNSNNLDSKVGGNYNYLYRLFRKSNLKPFERDISTEIYQAGSTPCNGVEGFNCYFPLQSYGFQPTNGVGYQPYRVVVLSFELLHAPATVCGPKKSTNLVKNKCVNFNFNGLTGTGVLTESNKKFLPFQQFGRDIADTTDAVRDPQTLEILDITPCSFGGVSVITPGTNTSNQVAVLYQDVNCTEVPVAIHADQLTPTWRVYSTGSNVFQTRAGCLIGAEHVNNSYECDIPIGAGICASYQTQTNSPRRARSVASQSIIAYTMSLGAENSVAYSNNSIACPTNFTISVTTEILPVSMTKTSVDCTMYICGDSTECSNLLLQYGSFCTQLNRALTGIAVEQDKNTQEVFAQVKQIYKTPPIKDFGGFNFSQILPDPSKPSKRSFIEDLLFNKVTLADAGFIKQYGDCLGDIAARDLICAQKFNGLTVLPPLLTDEMIAQYTSALLAGTITSGWTFGAGAALQIPFAMQMAYRFNGIGVTQNVLYENQKLIANQFNSAIGKIQDSLSSTASALGKLQDVVNQNAQALNTLVKQLSSNFGAISSVLNDILSRLDKVEAEVQIDRLITGRLQSLQTYVTQQLIRAAEIRASANLAATKMSECVLGQSKRVDFCGKGYHLMSFPQSAPHGVVFLHVTYVPAQEKNFTTAPAICHDGKAHFPREGVFVSNGTHWFVTQRNFCEPQIITTDNTFVSGNCDVVIGIVNNTVYDPLQPELDSGGSGYIPEAPRDGQAYVRKDGEWVLLSTFL

SEQ ID NO: 10059 - protein, 1177 aa, Artificial Sequence
  SARS-CoV-2/Guangdong/20SF028/2020__EPI_ISL_403936 spike protein (1-1147)(I714C_Y1110C) Foldon construct
MFVFLVLLPLVSSQCVNLTTRTQLPPAYTNSFTRGVYYPDKVFRSSVLYSTQDLFLPFFSNVTWFHAIHVSGTNGTKRFDNPVLPFNDGVYFASTEKSNIIRGWIFGTTLDSKTQSLLIVNNATNVVIKVCEFQFCNDPFLGVYYHKNNKSWMESEFRVYSSANNCTFEYVSQPFLMDLEGKQGNFKNLREFVFKNIDGYFKIYSKHTPINLVRDLPQGFSALEPLVDLPIGINITRFQTLLALHRSYLTPGDSSSGWTAGAAAYYVGYLQPRTFLLKYNENGTITDAVDCALDPLSETKCTLKSFTVEKGIYQTSNFRVQPTESIVRFPNITNLCPFGEVFNATRFASVYAWNRKRISNCVADYSVLYNSASFSTFKCYGVSPTKLNDLCFTNVYADSFVIRGDEVRQIAPGQTGKIADYNYKLPDDFTGCVIAWNSNNLDSKVGGNYNYLYRLFRKSNLKPFERDISTEIYQAGSTPCNGVEGFNCYFPLQSYGFQPTNGVGYQPYRVVVLSFELLHAPATVCGPKKSTNLVKNKCVNFNFNGLTGTGVLTESNKKFLPFQQFGRDIADTTDAVRDPQTLEILDITPCSFGGVSVITPGTNTSNQVAVLYQDVNCTEVPVAIHADQLTPTWRVYSTGSNVFQTRAGCLIGAEHVNNSYECDIPIGAGICASYQTQTNSPRRARSVASQSIIAYTMSLGAENSVAYSNNSIACPTNFTISVTTEILPVSMTKTSVDCTMYICGDSTECSNLLLQYGSFCTQLNRALTGIAVEQDKNTQEVFAQVKQIYKTPPIKDFGGFNFSQILPDPSKPSKRSFIEDLLFNKVTLADAGFIKQYGDCLGDIAARDLICAQKFNGLTVLPPLLTDEMIAQYTSALLAGTITSGWTFGAGAALQIPFAMQMAYRFNGIGVTQNVLYENQKLIANQFNSAIGKIQDSLSSTASALGKLQDVVNQNAQALNTLVKQLSSNFGAISSVLNDILSRLDKVEAEVQIDRLITGRLQSLQTYVTQQLIRAAEIRASANLAATKMSECVLGQSKRVDFCGKGYHLMSFPQSAPHGVVFLHVTYVPAQEKNFTTAPAICHDGKAHFPREGVFVSNGTHWFVTQRNFCEPQIITTDNTFVSGNCDVVIGIVNNTVYDPLQPELDSGGSGYIPEAPRDGQAYVRKDGEWVLLSTFL

SEQ ID NO: 10060 - protein, 1177 aa, Artificial Sequence
  SARS-CoV-2/Shenzhen/SZTH-001/2020__EPI_ISL_406592 spike protein (1-1147)(I714C_Y1110C) Foldon construct
MFVFLVLLPLVSSQCVNLTTRTQLPPAYTNSFTRGVYYPDKVFRSSVLHSTQDLFLPFFSNVTWFHAIHVSGTNGTKRFDNPVLPFNDGVYFASTEKSNIIRGWIFGTTLDSKTQSLLIVNNATNVVIKVCEFQFCNDPFLGVYYHKNNKSWMESEFRVYSSANNCTFEYVSQPFLMDLEGKQGNFKNLREFVFKNIDGYFKIYSKHTPINLVRDLPQGFSALEPLVDLPIGINITRFQTLLALHRSYLTPGDSSSGWTAGAAAYYVGYLQPRTFLLKYNENGTITDAVDCALDPLSETKCTLKSFTVEKGIYQTSNFRVQPTESIVRFPNITNLCPFGEVFNATRFASVYAWNRKRISNCVADYSVLYNSASFSTFKCYGVSPTKLNDLCFTNVYADSFVIRGDEVRQIAPGQTGKIADYNYKLPDDFTGCVIAWNSNNLDSKVGGNYNYLYRLFRKSNLKPFERDISTEIYQAGSTPCNGVEGFNCYFPLQSYGFQPTNGVGYQPYRVVVLSFELLHAPATVCGPKKSTNLVKNKCVNFNFNGLTGTGVLTESNKKFLPFQQFGRDIADTTDAVRDPQTLEILDITPCSFGGVSVITPGTNTSNQVAVLYQDVNCTEVPVAIHADQLTPTWRVYSTGSNVFQTRAGCLIGAEHVNNSYECDIPIGAGICASYQTQTNSPRRARSVASQSIIAYTMSLGAENSVAYSNNSIACPTNFTISVTTEILPVSMTKTSVDCTMYICGDSTECSNLLLQYGSFCTQLNRALTGIAVEQDKNTQEVFAQVKQIYKTPPIKDFGGFNFSQILPDPSKPSKRSFIEDLLFNKVTLADAGFIKQYGDCLGDIAARDLICAQKFNGLTVLPPLLTDEMIAQYTSALLAGTITSGWTFGAGAALQIPFAMQMAYRFNGIGVTQNVLYENQKLIANQFNSAIGKIQDSLSSTASALGKLQDVVNQNAQALNTLVKQLSSNFGAISSVLNDILSRLDKVEAEVQIDRLITGRLQSLQTYVTQQLIRAAEIRASANLAATKMSECVLGQSKRVDFCGKGYHLMSFPQSAPHGVVFLHVTYVPAQEKNFTTAPAICHDGKAHFPREGVFVSNGTHWFVTQRNFCEPQIITTDNTFVSGNCDVLIGIVNNTVYDPLQPELDSGGSGYIPEAPRDGQAYVRKDGEWVLLSTFL

SEQ ID NO: 10061 - protein, 1177 aa, Artificial Sequence
  SARS-CoV-2/Shenzhen/SZTH-004/2020__EPI_ISL_406595 spike protein (1-1147)(I714C_Y1110C) Foldon construct
MFVFLVLLPLVSSQCVNLTTRTQLPPAYTNSFTRGVYYPDKVFRSSVLHSTQDLFLPFFSNVTWFHAIHVSGTNGTKRFDNPVLPFNDGVYFASTEKSNIIRGWIFGTTLDSKTQSLLIVNNATNVVIKVCEFQFCNDPFLGVYYHKNNKSWMESEFRVYSSANNCTFEYVSQPFLMDLEGKQGNFKNLREFVFKNIDGYFKIYSKHTPINLVRDLPQGFSALEPLVDLPIGINITRFQTLLALHRSYLTPGDSSSGWTAGAAAYYVGYLQPRTFLLKYNENGTITDAVDCALDPLSETKCTLKSFTVEKGIYQTSNFRVQPTESIVRFPNITNLCPFGEVFNATRFASVYAWDRKRISNCVAYYSVLYNSASFSTFKCYGVSPTKLNDLCFTNVYADSFVIRGDEVRQIAPGQTGKIADYNYKLPDDFTGCVIAWNSNNLDSKVGGNYNYLYRLFRKSNLKPFERDISTEIYQAGSTPCNGVEGFNCYFPLQSYGFQPTNGVGYQPYRVVVLSFELLHAPATVCGPKKSTNLVKNKCVNFNFNGLTGTGVLTESNKKFLPFQQFGRDIADTTDAVRDPQTLEILDITPCSFGGVSVITPGTNTSNQVAVLYQDVNCTEVPVAIHADQLTPTWRVYSTGSNVFQTRAGCLIGAEHVNNSYECDIPIGAGICASYQTQTNSPRRARSVASQSIIAYTMSLGAENSVAYSNNSIACPTNFTISVTTEILPVSMTKTSVDCTMYICGDSTECSNLLLQYGSFCTQLNRALTGIAVEQDKNTQEVFAQVKQIYKTPPIKDFGGFNFSQILPDPSKPSKRSFIEDLLFNKVTLADAGFIKQYGDCLGDIAARDLICAQKFNGLTVLPPLLTDEMIAQYTSALLAGTITSGWTFGAGAALQIPFAMQMAYRFNGIGVTQNVLYENQKLIANQFNSAIGKIQDSLSSTASALGKLQDVVNQNAQALNTLVKQLSSNFGAISSVLNDILSRLDKVEAEVQIDRLITGRLQSLQTYVTQQLIRAAEIRASANLAATKMSECVLGQSKRVDFCGKGYHLMSFPQSAPHGVVFLHVTYVPAQEKNFTTAPAICHDGKAHFPREGVFVSNGTHWFVTQRNFCEPQIITTDNTFVSGNCDVVIGIVNNTVYDPLQPELDSGGSGYIPEAPRDGQAYVRKDGEWVLLSTFL

SEQ ID NO: 10062 - protein, 1177 aa, Artificial Sequence
  SARS-CoV-2/France/IDF0372/2020__EPI_ISL_406596 spike protein (1-1147)(I714C_Y1110C) Foldon construct
MFVFLVLLPLVSSQCVNLTTRTQLPPAYTNSFTRGVYYPDKVFRSSVLHSTQDLFLPFFSNVTWFHAIHVSGTNGTKRFDNPVLPFNDGVYFASTEKSNIIRGWIFGTTLDSKTQSLLIVNNATNVVIKVCEFQFCNDPFLGVYYHKNNKSWMESEFRVYSSANNCTFEYVSQPFLMDLEGKQGNFKNLREFVFKNIDGYFKIYSKHTPINLVRDLPQGFSALEPLVDLPIGINITRFQTLLALHRSYLTPGDSSSGWTAGAAAYYVGYLQPRTFLLKYNENGTITDAVDCALDPLSETKCTLKSFTVEKGIYQTSNFRVQPTESIVRFPNITNLCPFGEVFNATRFASVYAWNRKRISNCVADYSFLYNSASFSTFKCYGVSPTKLNDLCFTNVYADSFVIRGDEVRQIAPGQTGKIADYNYKLPDDFTGCVIAWNSNNLDSKVGGNYNYLYRLFRKSNLKPFERDISTEIYQAGSTPCNGVEGFNCYFPLQSYGFQPTNGVGYQPYRVVVLSFELLHAPATVCGPKKSTNLVKNKCVNFNFNGLTGTGVLTESNKKFLPFQQFGRDIADTTDAVRDPQTLEILDITPCSFGGVSVITPGTNTSNQVAVLYQDVNCTEVPVAIHADQLTPTWRVYSTGSNVFQTRAGCLIGAEHVNNSYECDIPIGAGICASYQTQTNSPRRARSVASQSIIAYTMSLGAENSVAYSNNSIACPTNFTISVTTEILPVSMTKTSVDCTMYICGDSTECSNLLLQYGSFCTQLNRALTGIAVEQDKNTQEVFAQVKQIYKTPPIKDFGGFNFSQILPDPSKPSKRSFIEDLLFNKVTLADAGFIKQYGDCLGDIAARDLICAQKFNGLTVLPPLLTDEMIAQYTSALLAGTITSGWTFGAGAALQIPFAMQMAYRFNGIGVTQNVLYENQKLIANQFNSAIGKIQDSLSSTASALGKLQDVVNQNAQALNTLVKQLSSNFGAISSVLNDILSRLDKVEAEVQIDRLITGRLQSLQTYVTQQLIRAAEIRASANLAATKMSECVLGQSKRVDFCGKGYHLMSFPQSAPHGVVFLHVTYVPAQEKNFTTAPAICHDGKAHFPREGVFVSNGTHWFVTQRNFCEPQIITTDNTFVSGNCDVVIGIVNNTVYDPLQPELDSGGSGYIPEAPRDGQAYVRKDGEWVLLSTFL

SEQ ID NO: 10063 - protein, 1177 aa, Artificial Sequence
  SARS-CoV-2/Australia/VIC01/2020__EPI_ISL_406844 spike protein (1-1147)(I714C_Y1110C) Foldon construct
MFVFLVLLPLVSSQCVNLTTRTQLPPAYTNSFTRGVYYPDKVFRSSVLHSTQDLFLPFFSNVTWFHAIHVSGTNGTKRFDNPVLPFNDGVYFASTEKSNIIRGWIFGTTLDSKTQSLLIVNNATNVVIKVCEFQFCNDPFLGVYYHKNNKSWMESEFRVYSSANNCTFEYVSQPFLMDLEGKQGNFKNLREFVFKNIDGYFKIYSKHTPINLVRDLPQGFSALEPLVDLPIGINITRFQTLLALHRRYLTPGDSSSGWTAGAAAYYVGYLQPRTFLLKYNENGTITDAVDCALDPLSETKCTLKSFTVEKGIYQTSNFRVQPTESIVRFPNITNLCPFGEVFNATRFASVYAWNRKRISNCVADYSVLYNSASFSTFKCYGVSPTKLNDLCFTNVYADSFVIRGDEVRQIAPGQTGKIADYNYKLPDDFTGCVIAWNSNNLDSKVGGNYNYLYRLFRKSNLKPFERDISTEIYQAGSTPCNGVEGFNCYFPLQSYGFQPTNGVGYQPYRVVVLSFELLHAPATVCGPKKSTNLVKNKCVNFNFNGLTGTGVLTESNKKFLPFQQFGRDIADTTDAVRDPQTLEILDITPCSFGGVSVITPGTNTSNQVAVLYQDVNCTEVPVAIHADQLTPTWRVYSTGSNVFQTRAGCLIGAEHVNNSYECDIPIGAGICASYQTQTNSPRRARSVASQSIIAYTMSLGAENSVAYSNNSIACPTNFTISVTTEILPVSMTKTSVDCTMYICGDSTECSNLLLQYGSFCTQLNRALTGIAVEQDKNTQEVFAQVKQIYKTPPIKDFGGFNFSQILPDPSKPSKRSFIEDLLFNKVTLADAGFIKQYGDCLGDIAARDLICAQKFNGLTVLPPLLTDEMIAQYTSALLAGTITSGWTFGAGAALQIPFAMQMAYRFNGIGVTQNVLYENQKLIANQFNSAIGKIQDSLSSTASALGKLQDVVNQNAQALNTLVKQLSSNFGAISSVLNDILSRLDKVEAEVQIDRLITGRLQSLQTYVTQQLIRAAEIRASANLAATKMSECVLGQSKRVDFCGKGYHLMSFPQSAPHGVVFLHVTYVPAQEKNFTTAPAICHDGKAHFPREGVFVSNGTHWFVTQRNFCEPQIITTDNTFVSGNCDVVIGIVNNTVYDPLQPELDSGGSGYIPEAPRDGQAYVRKDGEWVLLSTFL

SEQ ID NO: 10064 - protein, 1177 aa, Artificial Sequence
  SARS-CoV-2/Germany/BavPat1/2020__EPI_ISL_406862 spike protein (1-1147)(I714C_Y1110C) Foldon construct
MFVFLVLLPLVSSQCVNLTTRTQLPPAYTNSFTRGVYYPDKVFRSSVLHSTQDLFLPFFSNVTWFHAIHVSGTNGTKRFDNPVLPFNDGVYFASTEKSNIIRGWIFGTTLDSKTQSLLIVNNATNVVIKVCEFQFCNDPFLGVYYHKNNKSWMESEFRVYSSANNCTFEYVSQPFLMDLEGKQGNFKNLREFVFKNIDGYFKIYSKHTPINLVRDLPQGFSALEPLVDLPIGINITRFQTLLALHRSYLTPGDSSSGWTAGAAAYYVGYLQPRTFLLKYNENGTITDAVDCALDPLSETKCTLKSFTVEKGIYQTSNFRVQPTESIVRFPNITNLCPFGEVFNATRFASVYAWNRKRISNCVADYSVLYNSASFSTFKCYGVSPTKLNDLCFTNVYADSFVIRGDEVRQIAPGQTGKIADYNYKLPDDFTGCVIAWNSNNLDSKVGGNYNYLYRLFRKSNLKPFERDISTEIYQAGSTPCNGVEGFNCYFPLQSYGFQPTNGVGYQPYRVVVLSFELLHAPATVCGPKKSTNLVKNKCVNFNFNGLTGTGVLTESNKKFLPFQQFGRDIADTTDAVRDPQTLEILDITPCSFGGVSVITPGTNTSNQVAVLYQGVNCTEVPVAIHADQLTPTWRVYSTGSNVFQTRAGCLIGAEHVNNSYECDIPIGAGICASYQTQTNSPRRARSVASQSIIAYTMSLGAENSVAYSNNSIACPTNFTISVTTEILPVSMTKTSVDCTMYICGDSTECSNLLLQYGSFCTQLNRALTGIAVEQDKNTQEVFAQVKQIYKTPPIKDFGGFNFSQILPDPSKPSKRSFIEDLLFNKVTLADAGFIKQYGDCLGDIAARDLICAQKFNGLTVLPPLLTDEMIAQYTSALLAGTITSGWTFGAGAALQIPFAMQMAYRFNGIGVTQNVLYENQKLIANQFNSAIGKIQDSLSSTASALGKLQDVVNQNAQALNTLVKQLSSNFGAISSVLNDILSRLDKVEAEVQIDRLITGRLQSLQTYVTQQLIRAAEIRASANLAATKMSECVLGQSKRVDFCGKGYHLMSFPQSAPHGVVFLHVTYVPAQEKNFTTAPAICHDGKAHFPREGVFVSNGTHWFVTQRNFCEPQIITTDNTFVSGNCDVVIGIVNNTVYDPLQPELDSGGSGYIPEAPRDGQAYVRKDGEWVLLSTFL

SEQ ID NO: 10065 - protein, 1177 aa, Artificial Sequence
  SARS-CoV-2/Wuhan/HBCDC-HB-02/2020__EPI_ISL_412978 spike protein (1-1147)(I714C_Y1110C) Foldon construct
MFVFLVLLPLVSSQCVNLTTRTQLPPAYTNSFTRGVYYPDKVFRSSVLHSTQDLFLPFFSNVTWFHAIHVSGTNGTKRFDNPVLPFNDGVYFASTEKSNIIRGWIFGTTLDSKTQSLLIVNNATNVVIKVCEFQFCNDPFLGVYYHKNNKSWMESEFRVYSSANNCTFEYVSQPFLMDLEGKQGNFKNLREFVFKNIDGYFKIYSKHTPINLVRDLPQGFSALEPLVDLPIGINITRFQTLLALHRSYLTPGDSSSGWTAGAAAYYVGYLQPRTFLLKYNENGTITDAVDCALDPLSETKCTLKSFTVEKGIYQTSNFRVQPTESIVRFPNITNLCPFGEVFNATRFASVYAWNRKRISNCVADYSVLYNSASFSTFKCYGVSPTKLNDLCFTNVYADSFVIRGDEVRQIAPGQTGKIADYNYKLPDDFTGCVIAWNSNNLDSKVGGNYNYLYRLFRKSNLKPFERDISTEIYQAGSTPCNGVEGFNCYFPLQSYGFQPTNGVGYQPYRVVVLSFELLHAPATVCGPKKSTNLVKNKCVNFNFNGLTGTGVLTESNKKFLPFQQFGRDIADTTDAVRDPQTLEILDITPCSFGGVSVITPGTNTSNQVAVLYQDVNCTEVPVAIHADQLTPTWRVYSTGSNVFQTRAGCLIGAEHVNNSYECDIPIGAGICASYQTQTNSPRRARSVASQSIIAYTMSLGAENSVAYSNNSIACPTNFTISVTTEILPVSMTKTSVDCTMYICGDSTECSNFLLQYGSFCTQLNRALTGIAVEQDKNTQEVFAQVKQIYKTPPIKDFGGFNFSQILPDPSKPSKRSFIEDLLFNKVTLADAGFIKQYGDCLGDIAARDLICAQKFNGLTVLPPLLTDEMIAQYTSALLAGTITSGWTFGAGAALQIPFAMQMAYRFNGIGVTQNVLYENQKLIANQFNSAIGKIQDSLSSTASALGKLQDVVNQNAQALNTLVKQLSSNFGAISSVLNDILSRLDKVEAEVQIDRLITGRLQSLQTYVTQQLIRAAEIRASANLAATKMSECVLGQSKRVDFCGKGYHLMSFPQSAPHGVVFLHVTYVPAQEKNFTTAPAICHDGKAHFPREGVFVSNGTHWFVTQRNFCEPQIITTDNTFVSGNCDVVIGIVNNTVYDPLQPELDSGGSGYIPEAPRDGQAYVRKDGEWVLLSTFL

SEQ ID NO: 10066 - protein, 1177 aa, Artificial Sequence
  SARS-CoV-2/Australia/QLD02/2020__EPI_ISL_407896 spike protein (1-1147)(I714C_Y1110C) Foldon construct
MFVFLVLLPLVSSQCVNLTTRTQLPPAYTNSFTRGVYYPDKVFRSSVLHSTQDLFLPFFSNVTWFHAIHVSGTNGTKRFDNPVLPFNDGVYFASTEKSNIIRGWIFGTTLDSKTQSLLIVNNATNVVIKVCEFQFCNDPFLGVYYHKNNKSWMESEFRVYSSANNCTFEYVSQPFLMDLEGKQGNFKNLREFVFKNIDGYFKIYSKHTPINLVRDLPQGFSALEPLVDLPIGINITRFQTLLALHRSYLTPGDSSSGWTAGAAAYYVGYLQPRTFLLKYNENGTITDAVDCALDPLSETKCTLKSFTVEKGIYQTSNFRVQPTESIVRFPNITNLCPFGEVFNATRFASVYAWNRKRISNCVADYSVLYNSASFSTFKCYGVSPTKLNDLCFTNVYADSFVIRGDEVRQIAPGQTGKIADYNYKLPDDFTGCVIAWNSNNLDSKVGGNYNYLYRLFRKSNLKPFERDISTEIYQAGSTPCNGVEGFNCYFPLQSYGFQPTNGVGYQPYRVVVLSFELLHAPATVCGPKKSTNLVKNKCVNFNFNGLTGTGVLTESNKKFLPFQQFGRDIADTTDAVRDPQTLEILDITPCSFGGVSVITPGTNTSNQVAVLYQDVNCTEVPVAIHADQLTPTWRVYSTGSNVFQTRAGCLIGAEHVNNSYECDIPIGAGICASYQTQTNSPRRARSVASQSIIAYTMSLGAENSVAYSNNSIACPTNFTISVTTEILPVSMTKTSVDCTMYICGDSTECSNLLLQYGSFCTQLNRALTGIAVEQDKNTQEVFAQVKQIYKTPPIKDFGGFNFSQILPDPSKPSKRSFIEDLLFNKVTLADAGFIKQYGDCLGDIAARDLICAQKFNGLTVLPPLLTDEMIAQYTSALLAGTITSGWTFGAGAALQIPFAMQMAYRFNGIGVTQNVLYENQKLIANQFNSAIGKIQDSLSSTASALGKLQDVVNQNAQALNTLVKQLSSNFGAISSVLNDILSRLDKVEAEVQIDRLITGRLQSLQTYVTQQLIRAAEIRASANLAATKMSECVLGQSKRVDFCGKGYHLMSFPQSAPHGVVFLHVTYVPAQEKNFTTAPAICHDGKAHFPREGVFVSNGTHWFVTQRNFCEPQIITTDNTFVSGNCDVVIGIVNNTVYDPLQLELDSGGSGYIPEAPRDGQAYVRKDGEWVLLSTFL

SEQ ID NO: 10067 - protein, 1177 aa, Artificial Sequence
  SARS-CoV-2/India/1-31/2020__EPI_ISL_413523 spike protein (1-1147)(I714C_Y1110C) Foldon construct
MFVFLVLLPLVSSQCVNLTTRTQLPPAYTNSFTRGVYYPDKVFRSSVLHSTQDLFLPFFSNVTWFHAIHVSGTNGTKRFDNPVLPFNDGVYFASTEKSNIIRGWIFGTTLDSKTQSLLIVNNATNVVIKVCEFQFCNDPFLGVYYHKNNKSWMESEFRVYSSANNCTFEYVSQPFLMDLEGKQGNFKNLREFVFKNIDGYFKIYSKHTPINLVRDLPQGFSALEPLVDLPIGINITRFQTLLALHRSYLTPGDSSSGWTAGAAAYYVGYLQPRTFLLKYNENGTITDAVDCALDPLSETKCTLKSFTVEKGIYQTSNFRVQPTESIVRFPNITNLCPFGEVFNATRFASVYAWNRKRISNCVADYSVLYNSASFSTFKCYGVSPTKLNDLCFTNVYADSFVIRGDEVRQIAPGQTGKIADYNYKLPDDFTGCVIAWNSNNLDSKVGGNYNYLYRLFRKSNLKPFERDISTEIYQAGSTPCNGVEGFNCYFPLQSYGFQPTNGVGYQPYRVVVLSFELLHAPATVCGPKKSTNLVKNKCVNFNFNGLTGTGVLTESNKKFLPFQQFGRDIADTTDAVRDPQTLEILDITPCSFGGVSVITPGTNTSNQVAVLYQDVNCTEVPVAIHADQLTPTWRVYSTGSNVFQTRAGCLIGAEHVNNSYECDIPIGAGICASYQTQTNSPRRARSVASQSIIAYTMSLGAENSVAYSNNSIACPTNFTISVTTEILPVSMTKTSVDCTMYICGDSTECSNLLLQYGSFCTQLNRALTGIAVEQDKNTQEVFAQVKQIYKTPPIKDFGGFNFSQILPDPSKPSKRSFIEDLLFNKVTLADAGFIKQYGDCLGDIAARDLICAQKFNGLTVLPPLLTDEMIAQYTSALLAGTITSGWTFGAGAALQIPFAMQMAYRFNGIGVTQNVLYENQKLIANQFNSVIGKIQDSLSSTASALGKLQDVVNQNAQALNTLVKQLSSNFGAISSVLNDILSRLDKVEAEVQIDRLITGRLQSLQTYVTQQLIRAAEIRASANLAATKMSECVLGQSKRVDFCGKGYHLMSFPQSAPHGVVFLHVTYVPAQEKNFTTAPAICHDGKAHFPREGVFVSNGTHWFVTQRNFCEPQIITTDNTFVSGNCDVVIGIVNNTVYDPLQPELDSGGSGYIPEAPRDGQAYVRKDGEWVLLSTFL

SEQ ID NO: 10068 - protein, 1177 aa, Artificial Sequence
  SARS-CoV-2/Guangdong/GD2020087-P0008/2020__EPI_ISL_413863 spike protein (1-1147)(I714C_Y1110C) Foldon construct
MFVFLVLLPLVSSQCVNLTTRTQLPPAYTNSFTRGVYYPDKVFRSSVLHSTQDLFLPFFSNVTWFHAIHVSGTNGTKRFDNPVLPFNDGVYFASTEKSNIIRGWIFGTTLDSKTQSLLIVNNATNVVIKVCEFQFCNDPFLGVYYHKNNKSWMESEFRVYSSANNCTFEYVSQPFLMDLEGKQGNFKNLREFVFKNIDGYFKIYSKHTPINLVRDLPQGFSALEPLVDLPIGINITRFQTLLALHRSYLTPGDSSSGWTAGAAAYYVGYLQPRTFLLKYNENGTITDAVDCALDPLSETKCTLKSFTVEKGIYQTSNFRVQPTESIVRFPNITNLCPFGEVFNATRFASVYAWNRKRISNCVADYSVLYNSASFSTFKCYGVSPTKLNDLCFTNVYADSFVIRGDEVREIAPGQTGKIADYNYKLPDDFTGCVIAWNSNNLDSKVGGNYNYLYRLFRKSNLKPFERDISTEIYQAGSTPCNGVEGFNCYFPLQSYGFQPTNGVGYQPYRVVVLSFELLHAPATVCGPKKSTNLVKNKCVNFNFNGLTGTGVLTESNKKFLPFQQFGRDIADTTDAVRDPQTLEILDITPCSFGGVSVITPGTNTSNQVAVLYQDVNCTEVPVAIHADQLTPTWRVYSTGSNVFQTRAGCLIGAEHVNNSYECDIPIGAGICASYQTQTNSPRRARSVASQSIIAYTMSLGAENSVAYSNNSIACPTNFTISVTTEILPVSMTKTSVDCTMYICGDSTECSNLLLQYGSFCTQLNRALTGIAVEQDKNTQEVFAQVKQIYKTPPIKDFGGFNFSQILPDPSKPSKRSFIEDLLFNKVTLADAGFIKQYGDCLGDIAARDLICAQKFNGLTVLPPLLTDEMIAQYTSALLAGTITSGWTFGAGAALQIPFAMQMAYRFNGIGVTQNVLYENQKLIANQFNSAIGKIQDSLSSTASALGKLQDVVNQNAQALNTLVKQLSSNFGAISSVLNDILSRLDKVEAEVQIDRLITGRLQSLQTYVTQQLIRAAEIRASANLAATKMSECVLGQSKRVDFCGKGYHLMSFPQSAPHGVVFLHVTYVPAQEKNFTTAPAICHDGKAHFPREGVFVSNGTHWFVTQRNFCEPQIITTDNTFVSGNCDVVIGIVNNTVYDPLQPELDSGGSGYIPEAPRDGQAYVRKDGEWVLLSTFL

SEQ ID NO: 10069 - protein, 1177 aa, Artificial Sequence
  SARS-CoV-2/Sweden/01/2020__EPI_ISL_411951 spike protein (1-1147)(I714C_Y1110C) Foldon construct
MFVFLVLLPLVSSQCVNLTTRTQLPPAYTNSFTRGVYYPDKVFRSSVLHSTQDLFLPFFSNVTWFHAIHVSGTNGTKRFDNPVLPFNDGVYFASTEKSNIIRGWIFGTTLDSKTQSLLIVNNATNVVIKVCEFQFCNDPFLGVYYHKNNKSWMESEFRVYSSANNCTFEYVSQPFLMDLEGKQGNFKNLREFVFKNIDGYFKIYSKHTPINLVRDLPQGFSALEPLVDLPIGINITRFQTLLALHRSYLTPGDSSSGWTAGAAAYYVGYLQPRTFLLKYNENGTITDAVDCALDPLSETKCTLKSFTVEKGIYQTSNFRVQPTESIVRFPNITNLCPFGEVFNATRFASVYAWNRKRISNCVADYSVLYNSASFSTFKCYGVSPTKLNDLCFTNVYADSFVIRGDEVRQIAPGQTGKIADYNYKLPDDFTGCVIAWNSNNLDSKVGGNYNYLYRLFRKSNLKPFERDISTEIYQAGSTPCNGVEGFNCYFPLQSYGFQPTNGVGYQPYRVVVLSFELLHAPATVCGPKKSTNLVKNKCVNFNFNGLTGTGVLTESNKKFLPFQQFGRDIADTTDAVRDPQTLEILDITPCSFGGVSVITPGTNTSNQVAVLYQDVNCTEVPVAIHADQLTPTWRVYSTGSNVFQTRAGCLIGAEHVNNSYECDIPIGAGICASYQTQTNSPRRARSVASQSIIAYTMSLGAENSVAYSNNSIACPTNFTISVTTEILPVSMTKTSVDCTMYICGDSTECSNLLLQYGSFCTQLNRALTGIAVEQDKNTQEVFAQVKQIYKTPPIKDCGGFNFSQILPDPSKPSKRSFIEDLLFNKVTLADAGFIKQYGDCLGDIAARDLICAQKFNGLTVLPPLLTDEMIAQYTSALLAGTITSGWTFGAGAALQIPFAMQMAYRFNGIGVTQNVLYENQKLIANQFNSAIGKIQDSLSSTASALGKLQDVVNQNAQALNTLVKQLSSNFGAISSVLNDILSRLDKVEAEVQIDRLITGRLQSLQTYVTQQLIRAAEIRASANLAATKMSECVLGQSKRVDFCGKGYHLMSFPQSAPHGVVFLHVTYVPAQEKNFTTAPAICHDGKAHFPREGVFVSNGTHWFVTQRNFCEPQIITTDNTFVSGNCDVVIGIVNNTVYDPLQPELDSGGSGYIPEAPRDGQAYVRKDGEWVLLSTFL

SEQ ID NO: 10070 - protein, 1177 aa, Artificial Sequence
  SARS-CoV-2/Tianmen/HBCDC-HB-07/2020__EPI_ISL_412983 spike protein (1-1147)(I714C_Y1110C) Foldon construct
MFVFLVLLPLVSSQCVNLTTRTQLPPAYTNSFTRGVYYPDKVFRSSVLHSTQDLFLPFFSNVTWFHAIHVSGTNGTKRFDNPVLPFNDGVYFASTEKSNIIRGWIFGTTLDSKTQSLLIVNNATNVVIKVCEFQFCNDPFLGVYYHKNNKSWMESEFRVYSSANNCTFEYVSQPFLMDLEGKQGNFKNLREFVFKNIDGYFKIYSKHTPINLVRDLPQGFSALEPLVDLPIGINITRFQTLLALHRSYLTPGDSSSGWTAGAAAYYVGYLQPRTFLLKYNENGTITDAVDCALDPLSETKCTLKSFTVEKGIYQTSNFRVQPTESIVRFPNITNLCPFGEVFNATRFASVYAWNRKRISNCVADYSVLYNSASFSTFKCYGVSPTKLNDLCFTNVYADSFVIRGDEVRQIAPGQTGKIADYNYKLPDDFTGCVIAWNSNNLDSKVGGNYNYLYRLFRKSNLKPFERDISTEIYQAGSTPCNGVEGFNCYFPLQSYGFQPTNGVGYQPYRVVVLSFELLHAPATVCGPKKSTNLVKNKCVNFNFNGLTGTGVLTESNKKFLPFQQFGRDIADTTDAVRDPQTLEILDITPCSFGGVSVITPGTNTSNQVAVLYQDLNCTEVPVAIHADQLTPTWRVYSTGSNVFQTRAGCLIGAEHVNNSYECDIPIGAGICASYQTQTNSPRRARSVASQSIIAYTMSLGAENSVAYSNNSIACPTNFTISVTTEILPVSMTKTSVDCTMYICGDSTECSNLLLQYGSFCTQLNRALTGIAVEQDKNTQEVFAQVKQIYKTPPIKDFGGFNFSQILPDPSKPSKRSFIEDLLFNKVTLADAGFIKQYGDCLGDIAARDLICAQKFNGLTVLPPLLTDEMIAQYTSALLAGTITSGWTFGAGAALQIPFAMQMAYRFNGIGVTQNVLYENQKLIANQFNSAIGKIQDSLSSTASALGKLQDVVNQNAQALNTLVKQLSSNFGAISSVLNDILSRLDKVEAEVQIDRLITGRLQSLQTYVTQQLIRAAEIRASANLAATKMSECVLGQSKRVDFCGKGYHLMSFPQSAPHGVVFLHVTYVPAQEKNFTTAPAICHDGKAHFPREGVFVSNGTHWFVTQRNFCEPQIITTDNTFVSGNCDVVIGIVNNTVYDPLQPELDSGGSGYIPEAPRDGQAYVRKDGEWVLLSTFL

SEQ ID NO: 10071 - protein, 1177 aa, Artificial Sequence
  SARS-CoV-2/Hong Kong/case42_VM20002493/2020__EPI_ISL_414527 spike protein (1-1147)(I714C_Y1110C) Foldon construct
MFVFLVLLPLVSSQCVNLTTRTQLPPAYTNSFTRGVYYPDKVFRSSVLHSTQDLFLPFFSNVTWFHAIHVSGTNGTKRFDNPVLPFNDGVYFASTEKSNIIRGWIFGTTLDSKTQSLLIVNNATNVVIKVCEFQFCNDPFLGVYYHKNNKSWMESEFRVYSSANNCTFEYVSQPFLMDLEGKQGNFKNLREFVFKNIDGYFKIYSKHTPINLVRDLPQGFSALEPLVDLPIGINITRFQTLLALHRSYLTPGDSSSGWTAGAAAYYVGYLQPRTFLLKYNENGTITDAVDCALDPLSETKCTLKSFTVEKGIYQTSNFRVQPTESIVRFPNITNLCPFGEVFNATRFASVYAWNRKRISNCVADYSVLYNSASFSTFKCYGVSPTKLNDLCFTNVYADSFVIRGDEVRQIAPGQTGKIADYNYKLPDDFTGCVIAWNSNNLDSKVGGNYNYLYRLFRKSNLKPFERDISTEIYQAGSTPCNGVEGFNCYFPLQSYGFQPTNGVGYQPYRVVVLSFELLHAPATVCGPKKSTNLVKNKCVNFNFNGLTGTGVLTESNKKFLPFQQFGRDIADTTDAVRDPQTLEILDITPCSFGGVSVITPGTNTSNQVAVLYQDVNCTEVPVAIHADQLTPTWRVYSTGSNVFQTRAGCLIGAEHVNNSYECDIPIGAGICASYQTQTNSPRRARSVASQSIIAYTMSLGAENSVAYSNNSIACPTNFAISVTTEILPVSMTKTSVDCTMYICGDSTECSNLLLQYGSFCTQLNRALTGIAVEQDKNTQEVFAQVKQIYKTPPIKDFGGFNFSQILPDPSKPSKRSFIEDLLFNKVTLADAGFIKQYGDCLGDIAARDLICAQKFNGLTVLPPLLTDEMIAQYTSALLAGTITSGWTFGAGAALQIPFAMQMAYRFNGIGVTQNVLYENQKLIANQFNSAIGKIQDSLSSTASALGKLQDVVNQNAQALNTLVKQLSSNFGAISSVLNDILSRLDKVEAEVQIDRLITGRLQSLQTYVTQQLIRAAEIRASANLAATKMSECVLGQSKRVDFCGKGYHLMSFPQSAPHGVVFLHVTYVPAQEKNFTTAPAICHDGKAHFPREGVFVSNGTHWFVTQRNFCEPQIITTDNTFVSGNCDVVIGIVNNTVYDPLQPELDSGGSGYIPEAPRDGQAYVRKDGEWVLLSTFL

SEQ ID NO: 10072 - protein, 1177 aa, Artificial Sequence
  SARS-CoV-2/USA/CruiseA-23/2020__EPI_ISL_414482 spike protein (1-1147)(I714C_Y1110C) Foldon construct
MFVFLVLLPLVSSQCVNLTTRTQLPPAYTNSFTRGVYYPDKVFRSSVLHSTQDLFLPFFSNVTWFHAIHVSGTNGTKRFDNPVLPFNDGVYFASTEKSNIIRGWIFGTTLDSKTQSLLIVNNATNVVIKVCEFQFCNDPFLGVYYHKNNKSWMESEFRVYSSANNCTFEYVSQPFLMDLEVKQGNFKNLREFVFKNIDGYFKIYSKHTPINLVRDLPQGFSALEPLVDLPIGINITRFQTLLALHRSYLTPGDSSSGWTAGAAAYYVGYLQPRTFLLKYNENGTITDAVDCALDPLSETKCTLKSFTVEKGIYQTSNFRVQPTESIVRFPNITNLCPFGEVFNATRFASVYAWNRKRISNCVADYSVLYNSASFSTFKCYGVSPTKLNDLCFTNVYADSFVIRGDEVRQIAPGQTGKIADYNYKLPDDFTGCVIAWNSNNLDSKVGGNYNYLYRLFRKSNLKPFERDISTEIYQAGSTPCNGVEGFNCYFPLQSYGFQPTNGVGYQPYRVVVLSFELLHAPATVCGPKKSTNLVKNKCVNFNFNGLTGTGVLTESNKKFLPFQQFGRDIADTTDAVRDPQTLEILDITPCSFGGVSVITPGTNTSNQVAVLYQDVNCTEVPVAIHADQLTPTWRVYSTGSNVFQTRAGCLIGAEHVNNSYECDIPIGAGICASYQTQTNSPRRARSVASQSIIAYTMSLGAENSVAYSNNSIACPTNFTISVTTEILPVSMTKTSVDCTMYICGDSTECSNLLLQYGSFCTQLNRALTGIAVEQDKNTQEVFAQVKQIYKTPPIKDFGGFNFSQILPDPSKPSKRSFIEDLLFNKVTLADAGFIKQYGDCLGDIAARDLICAQKFNGLTVLPPLLTDEMIAQYTSALLAGTITSGWTFGAGAALQIPFAMQMAYRFNGIGVTQNVLYENQKLIANQFNSAIGKIQDSLSSTASALGKLQDVVNQNAQALNTLVKQLSSNFGAISSVLNDILSRLDKVEAEVQIDRLITGRLQSLQTYVTQQLIRAAEIRASANLAATKMSECVLGQSKRVDFCGKGYHLMSFPQSAPHGVVFLHVTYVPAQEKNFTTAPAICHDGKAHFPREGVFVSNGTHWFVTQRNFCEPQIITTDNTFVSGNCDVVIGIVNNTVYDPLQPELDSGGSGYIPEAPRDGQAYVRKDGEWVLLSTFL

SEQ ID NO: 10073 - protein, 1177 aa, Artificial Sequence
  SARS-CoV-2/Hong Kong/case85_VM20002868/2020__EPI_ISL_414519 spike protein (1-1147)(I714C_Y1110C) Foldon construct
MFVFLVLVPLVSSQCVNLTTRTQLPPAYTNSFTRGVYYPDKVFRSSVLHSTQDLFLPFFSNVTWFHAIHVSGTNGTKRFDNPVLPFNDGVYFASTEKSNIIRGWIFGTTLDSKTQSLLIVNNATNVVIKVCEFQFCNDPFLGVYYHKNNKSWMESEFRVYSSANNCTFEYVSQPFLMDLEGKQGNFKNLREFVFKNIDGYFKIYSKHTPINLVRDLPQGFSALEPLVDLPIGINITRFQTLLALHRSYLTPGDSSSGWTAGAAAYYVGYLQPRTFLLKYNENGTITDAVDCALDPLSETKCTLKSFTVEKGIYQTSNFRVQPTESIVRFPNITNLCPFGEVFNATRFASVYAWNRKRISNCVADYSVLYNSASFSTFKCYGVSPTKLNDLCFTNVYADSFVIRGDEVRQIAPGQTGKIADYNYKLPDDFTGCVIAWNSNNLDSKVGGNYNYLYRLFRKSNLKPFERDISTEIYQAGSTPCNGVEGFNCYFPLQSYGFQPTNGVGYQPYRVVVLSFELLHAPATVCGPKKSTNLVKNKCVNFNFNGLTGTGVLTESNKKFLPFQQFGRDIADTTDAVRDPQTLEILDITPCSFGGVSVITPGTNTSNQVAVLYQDVNCTEVPVAIHADQLTPTWRVYSTGSNVFQTRAGCLIGAEHVNNSYECDIPIGAGICASYQTQTNSPRRARSVASQSIIAYTMSLGAENSVAYSNNSIACPTNFTISVTTEILPVSMTKTSVDCTMYICGDSTECSNLLLQYGSFCTQLNRALTGIAVEQDKNTQEVFAQVKQIYKTPPIKDFGGFNFSQILPDPSKPSKRSFIEDLLFNKVTLADAGFIKQYGDCLGDIAARDLICAQKFNGLTVLPPLLTDEMIAQYTSALLAGTITSGWTFGAGAALQIPFAMQMAYRFNGIGVTQNVLYENQKLIANQFNSAIGKIQDSLSSTASALGKLQDVVNQNAQALNTLVKQLSSNFGAISSVLNDILSRLDKVEAEVQIDRLITGRLQSLQTYVTQQLIRAAEIRASANLAATKMSECVLGQSKRVDFCGKGYHLMSFPQSAPHGVVFLHVTYVPAQEKNFTTAPAICHDGKAHFPREGVFVSNGTHWFVTQRNFCEPQIITTDNTFVSGNCDVVIGIVNNTVYDPLQPELDSGGSGYIPEAPRDGQAYVRKDGEWVLLSTFL

SEQ ID NO: 10074 - protein, 1177 aa, Artificial Sequence; identical to SEQ ID NO: 10064
  SARS-CoV-2/England/200990660/2020__EPI_ISL_414523 spike protein (1-1147)(I714C_Y1110C) Foldon construct

SEQ ID NO: 10075 - protein, 1177 aa, Artificial Sequence
  SARS-CoV-2/Australia/NSW09/2020__EPI_ISL_413595 spike protein (1-1147)(I714C_Y1110C) Foldon construct
MFVFLVLLPLVSSQCVNLTTRTQLPPAYTNSFTRGVYYPDKVFRSSVLHSTQDLFLPFFSNVTWFHAIHVSGTNGTKRFDNPVLPFNDGVYFASTEKSNIIRGWIFGTTLDSKTQSLLIVNNATNVVIKVCEFQFCNDPFLGVYYHKNNKSWMESEFRVYSSANNCTFEYVSQPFLMDLEGKQGNFKNLREFVFKNIDGYFKIYSKHTPINLVRDLPQGFSALEPLVDLPIGINITRFQTLLALHRSYLTPGDSSSGWTAGAAAYYVGYLQPRTFLLKYNENGTITDAVDCALDPLSETKCTLKSFTVEKGIYQTSNFRVQPTESIVRFPNITNLCPFGEVFNATRFASVYAWNRKRISNCVADYSVLYNSASFSTFKCYGVSPTKLNDLCFTNVYADSFVIRGDEVRQIAPGQTGKIADYNYKLPDDFTGCVIAWNSNNLDSKVGGNYNYLYRLFRKSNLKPFERDISTEIYQAGSTPCNGVEGFNCYFPLQSYGFQPTNGVGYQPYRVVVLSFELLHAPATVCGPKKSTNLVKNKCVNFNFNGLTGTGVLTESNKKFLPFQQFGRDIADTTDAVRDPQTLEILDITPCSFGGVSVITPGTNTSNQVAVLYQDVNCTEVPVAIHADQLTPTWRVYSTGSNVFQTRAGCLIGAEHVNNSYECDIPIGAGICASYQTQTNSPRRARSVASQSIIAYTMSLGAENSVAYSNNSIACPTNFTISVTTEILPVSMTKTSVDCTMYICGDSTECSNLLLQYGSFCTQLNRALTGIAVEQDKNTQEVFAQVKQIYKTPPIKDFGGFNFSQILPDPSKPSKRSFIEDLLFNKVTLADAGFIKQYGDCLGDIAARDLICAQKFNGLTVLPPLLTDEMIAQYTSALLAGTITSGWTFGAGAALQIPFAMQMAYRFNGIGVTQNVLYENQKLIANQFNSAIGKIQDSLSFTASALGKLQDVVNQNAQALNTLVKQLSSNFGAISSVLNDILSRLDKVEAEVQIDRLITGRLQSLQTYVTQQLIRAAEIRASANLAATKMSECVLGQSKRVDFCGKGYHLMSFPQSAPHGVVFLHVTYVPAQEKNFTTAPAICHDGKAHFPREGVFVSNGTHWFVTQRNFCEPQIITTDNTFVSGNCDVVIGIVNNTVYDPLQPELDSGGSGYIPEAPRDGQAYVRKDGEWVLLSTFL

SEQ ID NO: 10076 - protein, 1177 aa, Artificial Sequence; identical to SEQ ID NO: 10056
  SARS-CoV-2/Australia/NSW10/2020__EPI_ISL_413596 spike protein (1-1147)(I714C_Y1110C) Foldon construct

SEQ ID NO: 10077 - protein, 1177 aa, Artificial Sequence
  SARS-CoV-2/Switzerland/1000477797/2020__EPI_ISL_413023 spike protein (1-1147)(I714C_Y1110C) Foldon construct
MFVFLVLLPLVSSQCVNLTTRTQLPPAYTNSFTRGVYYPDKVFRSSVLHSTQDLFLPFFSNVTWFHAIHVSGTNGTKRFDNPVLPFNDGVYFASTEKSNIIRGWIFGTTLDSKTQSLLIVNNATNVVIKVCEFQFCNDPFLGVYYHKNNKSWMESEFRVYSSANNCTFEYVSQPFLMDLEGKQGNFKNLREFVFKNIDGYFNIYSKHTPINLVRDLPQGFSALEPLVDLPIGINITRFQTLLALHRSYLTPGDSSSGWTAGAAAYYVGYLQPRTFLLKYNENGTITDAVDCALDPLSETKCTLKSFTVEKGIYQTSNFRVQPTESIVRFPNITNLCPFGEVFNATRFASVYAWNRKRISNCVADYSVLYNSASFSTFKCYGVSPTKLNDLCFTNVYADSFVIRGDEVRQIAPGQTGKIADYNYKLPDDFTGCVIAWNSNNLDSKVGGNYNYLYRLFRKSNLKPFERDISTEIYQAGSTPCNGVEGFNCYFPLQSYGFQPTNGVGYQPYRVVVLSFELLHAPATVCGPKKSTNLVKNKCVNFNFNGLTGTGVLTESNKKFLPFQQFGRDIADTTDAVRDPQTLEILDITPCSFGGVSVITPGTNTSNQVAVLYQGVNCTEVPVAIHADQLTPTWRVYSTGSNVFQTRAGCLIGAEHVNNSYECDIPIGAGICASYQTQTNSPRRARSVASQSIIAYTMSLGAENSVAYSNNSIACPTNFTISVTTEILPVSMTKTSVDCTMYICGDSTECSNLLLQYGSFCTQLNRALTGIAVEQDKNTQEVFAQVKQIYKTPPIKDFGGFNFSQILPDPSKPSKRSFIEDLLFNKVTLADAGFIKQYGDCLGDIAARDLICAQKFNGLTVLPPLLTDEMIAQYTSALLAGTITSGWTFGAGAALQIPFAMQMAYRFNGIGVTQNVLYENQKLIANQFNSAIGKIQDSLSSTASALGKLQDVVNQNAQALNTLVKQLSSNFGAISSVLNDILSRLDKVEAEVQIDRLITGRLQSLQTYVTQQLIRAAEIRASANLAATKMSECVLGQSKRVDFCGKGYHLMSFPQSAPHGVVFLHVTYVPAQEKNFTTAPAICHDGKAHFPREGVFVSNGTHWFVTQRNFCEPQIITTDNTFVSGNCDVVIGIVNNTVYDPLQPELDSGGSGYIPEAPRDGQAYVRKDGEWVLLSTFL

SEQ ID NO: 10078 - protein, 1177 aa, Artificial Sequence
  SARS-CoV-2/Belgium/BA-02291/2020__EPI_ISL_415159 spike protein (1-1147)(I714C_Y1110C) Foldon construct
MFVFLVLLPLVSSQCVNLTTRTQLPPAYTNSFTRGVYYPDKVFRSSVLHSTQDLFLPFFSNVTWFHAIHVSGTNGTKRFDNPVLPFNDGVYFASTEKSNIIRGWIFGTTLDSKTQSLLIVNNATNVVIKVCEFQFCNDPFLGVYYHKNNKSWMESEFRVYSSANNCTFEYVSQPFLMDLEGKQGNFKNLREFVFKNIDGYFKIYSKHTPINLVRDLPQGFSALEPLVDLPIGINITRFQTLLALHRSYLTPGDSSSGWTAGAAAYYVGYLQPRTFLLKYNENGTITDAVDCALDPLSETKCTLKSFTVEKGIYQTSNFRVQPTESIVRFPNITNLCPFGEVFNATRFASVYAWNRKRISNCVADYSVLYNSASFSTFKCYGVSPTKLNDLCFTNVYADSFVIRGDEVRQIAPGQTGKIADYNYKLPDDFTGCVIAWNSNNLDSKVGGNYNYLYRLFRRSNLKPFERDISTEIYQAGSTPCNGVEGFNCYFPLQSYGFQPTNGVGYQPYRVVVLSFELLPAPATVCGPKKSTNLVKNKCVNFNFNGLTGTGVLTESNKKFLPFQQFGRDIADTTDAVRDPQTLEILDITPCSFGGVSVITPGTNTSNQVAVLYQGVNCTEVPVAIHADQLTPTWRVYSTGSNVFQTRAGCLIGAEHVNNSYECDIPIGAGICASYQTQTNSPRRARSVASQSIIAYTMSLGAENSVAYSNNSIACPTNFTISVTTEILPVSMTKTSVDCTMYICGDSTECSNLLLQYGSFCTQLNRALTGIAVEQDKNTQEVFAQVKQIYKTPPIKDFGGFNFSQILPDPSKPSKRSFIEDLLFNKVTLADAGFIKQYGDCLGDIAARDLICAQKFNGLTVLPPLLTDEMIAQYTSALLAGTITSGWTFGAGAALQIPFAMQMAYRFNGIGVTQNVLYENQKLIANQFNSAIGKIQDSLSSAAPALGKLQDVVNQNAQALNTLVKQLSSNFGAISSVLNDILSRLDKVEAEVQIDRLITGRLQSLQTYVTQQLIRAAEIRASANLAATKMSECVLGQSKRVDFCGKGYHLMSFPQSAPHGVVFLHVTYVPAQEKNFTTAPAICHDGKAHFPREGVFVSNGTHWFVTQRNFCEPQIITTDNTFVSGNCDVVIGIVNNTVYDPLQPELDSGGSGYIPEAPRDGQAYVRKDGEWVLLSTFL

SEQ ID NO: 10079 - protein, 1177 aa, Artificial Sequence
  SARS-CoV-2/USA/WA8-UW5/2020__EPI_ISL_413486 spike protein (1-1147)(I714C_Y1110C) Foldon construct
MFVFLVLLPLVSSQCVNLTTRTQLPPAYTNSFTRGVYYPDKVFRSSVLHSTQDLFLPFFSNVTWFHAIHVSGTNGTKRFDNPVLPFNDGVYFASTEKSNIIRGWIFGTTLDSKTQSLLIVNNATNVVIKVCEFQFCNDPFLGVYYHKNNKSWMESEFRVYSSANNCTFEYVSQPFLMDLEGKQGNFKNLREFVFKNIDGYFKIYSKHTPINLVRDLPQGFSALEPLVDLPIGINITRFQTLLALHRSYLTPGDSSSGWTAGAAAYYVGYLQPRTFLLKYNENGTITDAVDCALDPLSETKCTLKSFTVEKGIYQTSNFRVQPTESIVRFPNITNLCPFGEVFNATRFASVYAWNRKRISNCVADYSVLYNSASFSTFKCYGVSPTKLNDLCFTNVYADSFVIRGDEVRQIAPGQTGKIADYNYKLPDDFTGCVIAWNSNNLDSKVGGNYNYLYRLFRKSNLKPFERDISTEIYQAGSTPCNGVEGFNCYFPLQSYGFQPTNGVGYQPYRVVVLSFELLHAPATVCGPKKSTNLVKNKCVNFNFNGLTGTGVLTESNKKFLPFQQFGRDIADTTDAVRDPQTLEILDITPCSFGGVSVITPGTNTSNQVAVLYQDVNCTEVPVAIHADQLTPTWRVYSTGSNVFQTRAGCLIGAEYVNNSYECDIPIGAGICASYQTQTNSPRRARSVASQSIIAYTMSLGAENSVAYSNNSIACPTNFTISVTTEILPVSMTKTSVDCTMYICGDSTECSNLLLQYGSFCTQLNRALTGIAVEQDKNTQEVFAQVKQIYKTPPIKDFGGFNFSQILPDPSKPSKRSFIEDLLFNKVTLADAGFIKQYGDCLGDIAARDLICAQKFNGLTVLPPLLTDEMIAQYTSALLAGTITSGWTFGAGAALQIPFAMQMAYRFNGIGVTQNVLYENQKLIANQFNSAIGKIQDSLSSTASALGKLQDVVNQNAQALNTLVKQLSSNFGAISSVLNDILSRLDKVEAEVQIDRLITGRLQSLQTYVTQQLIRAAEIRASANLAATKMSECVLGQSKRVDFCGKGYHLMSFPQSAPHGVVFLHVTYVPAQEKNFTTAPAICHDGKAHFPREGVFVSNGTHWFVTQRNFCEPQIITTDNTFVSGNCDVVIGIVNNTVYDPLQPELDSGGSGYIPEAPRDGQAYVRKDGEWVLLSTFL

SEQ ID NO: 10080 - protein, 1177 aa, Artificial Sequence
  SARS-CoV-2/England/20102000506/2020__EPI_ISL_415147 spike protein (1-1147)(I714C_Y1110C) Foldon construct
MFVFLVLLPLVSSQCVNLTTRTQLPPAYTNSFTRGVYYPDKVFRSSVLHSTQDLFLPFFSNVTWFHAIHVSGTNGTKRFDNPVLPFNDGVYFASTEKSNIIRGWIFGTTLDSKTQSLLIVNNATNVVIKVCEFQFCNDPFLGVYYHKNNKSWMESEFRVYSSANNCTFEYVSQPFLMDLEGKQGNFKNLREFVFKNIDGYFKIYSKHTPINLVRDLPQGFSALEPLVDLPIGINITRFQTLLALHRSYLTPGDSSSGWTAGAAAYYVGYLQPRTFLLKYNENGTITDAVDCALDPLSETKCTLKSFTVEKGIYQTSNFRVQPTESIVRFPNITNLCPFGEVFNATRFASVYAWNRKRISNCVADYSVLYNSASFSTFKCYGVSPTKLNDLCFTNVYADSFVIRGDEVRQIAPGQTGKIADYNYKLPDDFTGCVIAWNSNNLDSKVGGNYNYLYRLFRKSNLKPFERDISTEIYQAGSTPCNGVEGFNCYFPLQSYGFQPTNGVGYQPYRVVVLSFELLHAPATVCGPKKSTNLVKNKCVNFNFNGLTGTGVLTESNKKFLPFQQFGRDIADTTDAVRDPQTLEILDITPCSFGGVSVITPGTNTSNQVAVLYQGVNCTEVPVAIHADQLTPTWRVYSTGSNVFQTRAGCLIGAEHVNNSYECDIPIGAGICASYQTQTNSPRRARSVASQSIIAYTMSLGAENSVAYSNNSIACPTNFTISVTTEILPVSMTKTSVDCTMYICGDSTECSNLLLQYGSFCTQLNRALTGIAVEQDKNTQEVFAQVKQIYKTPPIKDFGGFNFSQILPDPSKPSKRSFIEDLLFNKVTLADAGFIKQYGYCLGDIAARDLICAQKFNGLTVLPPLLTDEMIAQYTSALLAGTITSGWTFGAGAALQIPFAMQMAYRFNGIGVTQNVLYENQKLIANQFNSAIGKIQDSLSSTASALGKLQDVVNQNAQALNTLVKQLSSNFGAISSVLNDILSRLDKVEAEVQIDRLITGRLQSLQTYVTQQLIRAAEIRASANLAATKMSECVLGQSKRVDFCGKGYHLMSFPQSAPHGVVFLHVTYVPAQEKNFTTAPAICHDGKAHFPREGVFVSNGTHWFVTQRNFCEPQIITTDNTFVSGNCDVVIGIVNNTVYDPLQPELDSGGSGYIPEAPRDGQAYVRKDGEWVLLSTFL

SEQ ID NO: 10081 - protein, 1177 aa, Artificial Sequence
  SARS-CoV-2/Belgium/VAG-03013/2020__EPI_ISL_415155 spike protein (1-1147)(I714C_Y1110C) Foldon construct
MFVFLVLLPLVSSQCVNLTTRTQLPPAYTNSFTRGVYYPDKVFRSSVLHSTQDLFLPFFSNVTWFHAIHVSGTNGTKRFDNPVLPFNDGVYFASTEKSNIIRGWIFGTTLDSKTQSLLIVNNATNVVIKVCEFQFCNDPFLGVYYHKNNKSWMESEFRVYSSANNCTFEYVSQPFLMDLEGKQGNFKNLREFVFKNIDGYFKIYSKHTPINLVRDLPQGFSALEPLVDLPIGINITRFQTLLALHRSYLTPGDSSSGWTAGAAAYYVGYLQPRTFLLKYNENGTITDAVDCALDPLSETKCTLKSFTVEKGIYQTSNFRVQPTESIVRFPNITNLCPFGEVFNATRFASVYAWNRKRISNCVADYSVLYNSASFSTFKCYGVSPTKLNDLCFTNVYADSFVIRGDEVRQIAPGQTGKIADYNYKLPDDFTGCVIAWNSNNLDSKVGGNYNYLYRLFRKSNLKPFERDISTEIYQAGSTPCNGVEGFNCYFPLQSYGFQPTNGVGYQPYRVVVLSFELLHAPATVCGPKKSTNLVKNKCVNFNFNGLTGTGVLTESNKKFLPFQQFGRDIADTTDAVRDPQTLEILDITPCSFGGVSVITPGTNTSNQVAVLYQGVNCTEVPVAIHADQLTPTWRVYSTGSNVFQTRAGCLIGAEHVNNSYECDIPIGAGICASYQTQTNSPRRARSVASQSIIAYTMSLGAENSVAYSNNSIACPTNFTISVTTEILPVSMTKTSVDCTMYICGDSTECSNLLLQYGSFCTQLNRALTGIAVEQDKNTQEVFAQVKQIYKTPPIKDFGGFNFSQILPDPSKPSKRSFIEDLLFNKVTLADAGFIKQYGDCLGDIAARDLICAQKFNGLTVLPPLLTDEMIAQYTSALLAGTITSGWTFGAGAALQIPFAMQMAYRFNGIGVTQNVLYENQKLIANQFNSAIGKIQDSLSSTATALGKLQDVVNQNAQALNTLVKQLSSNFGAISSVLNDILSRLDKVEAEVQIDRLITGRLQSLQTYVTQQLIRAAEIRASANLAATKMSECVLGQSKRVDFCGKGYHLMSFPQSAPHGVVFLHVTYVPAQEKNFTTAPAICHDGKAHFPREGVFVSNGTHWFVTQRNFCEPQIITTDNTFVSGNCDVVIGIVNNTVYDPLQPELDSGGSGYIPEAPRDGQAYVRKDGEWVLLSTFL

SEQ ID NO: 10082 - protein, 1177 aa, Artificial Sequence
  SARS-CoV-2/Belgium/BC-03016/2020__EPI_ISL_415157 spike protein (1-1147)(I714C_Y1110C) Foldon construct
MFVFLVLLPLVSSQCVNLTTRTQLPPAYTNSFTRGVYYPDKVFRSSVLHSTQDLFLPFFSNVTWFHAIHVSGTNGTKRFDNPVLPFNDGVYFASTEKSNIIRGWIFGTTLDSKTQSLLIVNNATNVVIKVCEFQFCNDPFLGVYYHKNNKSWMESEFRVYSSANNCTFEYVSQPFLMDLEGKQGNFKNLREFVFKNIDGYFKIYSKHTPINLVRDLPQGFSALEPLVDLPIGINITRFQTLLALHRSYLTPGDSSSGWTAGAAAYYVGYLQPRTFLLKYNENGTITDAVDCALDPLSETKCTLKSFTVEKGIYQTSNFRVQPTESIVRFPNITNLCPFGEVFNATRFASVYAWNRKRISNCVADYSVLYNSASFSTFKCYGVSPTKLNDLCFTNVYADSFVIRGDEVRQIAPGQTGKIADYNYKLPDDFTGCVIAWNSNNLDSKVGGNYNYLYRLFRKSNLKPFERDISTEIYQAGSTPCNGVEGFNCYFPLQSYGFQPTNGVGYQPYRVVVLSFELLHAPATVCGPKKSTNLVKNKCVNFNFNGLTGTGVLTESNKKFLPFQQFGRDIADTTDAVRDPQTLEILDITPCSFGGVSVITPGTNTSNQVAVLYQGVNCTEVPVAIHADQLTPTWRVYSTGSNVFQTRAGCLIGAEHVNNSYECDIPIGAGICASYQTQTNSPRRARSVASQSIIAYTMSLGAENSVAYSNNSIACPTNFTISVTTEILPVSMTKTSVDCTMYICGDSTECSNLLLQYGSFCTQLNRALTGIAVEQDKNTQEVFAQVKQIYKTPPIKDFGGFNFSQILPDPSKPSKRSFIEDLLFNKVTLADAGFIKQYGDCLGDIAARDLICAQKFNGLTVLPPLLTDEMIAQYTSALLAGTITSGWTFGAGAALQIPFAMQMAYRFNGIGVTQNVLYENQKLIANQFNSAIGKIQDSLSSTAPALGKLQDVVNQNAQALNTLVKQLSSNFGAISSVLNDILSRLDKVEAEVQIDRLITGRLQSLQTYVTQQLIRAAEIRASANLAATKMSECVLGQSKRVDFCGKGYHLMSFPQSAPHGVVFLHVTYVPAQEKNFTTAPAICHDGKAHFPREGVFVSNGTHWFVTQRNFCEPQIITTDNTFVSGNCDVVIGIVNNTVYDPLQPELDSGGSGYIPEAPRDGQAYVRKDGEWVLLSTFL

SEQ ID NO: 10083 - protein, 1177 aa, Artificial Sequence
  SARS-CoV-2/Germany/BavPat3/2020__EPI_ISL_414521 spike protein (1-1147)(I714C_Y1110C) Foldon construct
MFVFLVLLPLVSSQCVNLTTRTQLPPAYTNSFTRGVYYPDKVFRSSVLHSTQDLFLPFFSNVTWFHAIHVSGTNGTKRFDNPVLPFNDGVYFASTEKSNIIRGWIFGTTLDSKTQSLLIVNNATNVVIKVCEFQFCNDPFLGVYYHKNNKSWMESEFRVYSSANNCTFEYVSQPFLMDLEGKQGNFKNLREFVFKNIDGYFKIYSKHTPINLVRDLPQGFSALEPLVDLPIGINITRFQTLLALHRSYLTPGDSSSGWTAGAAAYYVGYLQPRTFLLKYNENGTITDAVDCALDPLSETKCTLKSFTVEKGIYQTSNFRVQPTESIVRFPNITNLCPFGEVFNATRFASVYAWNRKRISNCVADYSVLYNSASFSTFKCYGVSPTKLNDLCFTNVYADSFVIRGDEVRQIAPGQTGKIADYNYKLPDDFTGCVIAWNSNNLDSKVGGNYNYLYRLFRKSNLKPFERDISTEIYQAGSTPCNGVEGFNCYFPLQSYGFQPTNGVGYQPYRVVVLSFELLHAPATVCGPKKSTNLVKNKCVNFNFNGLTGTGVLTESNKKFLPFQQFGRDIADTTDAVRDPQTLEILDITPCSFGGVSVITPGTNTSNQVAVLYQDVNCTEVPVAIHADQLTPTWRVYSTGSNVFQTRAGCLIGAEHVNNSYECDIPIGAGICASYQTQTNSPRRARSVASQSIIAYTMSLGAENSVAYSNNSIACPTNFTISVTTEILPVSMTKTSVDCTMYICGDSTECSNLLLQYGSFCTQLNRALTGIAVEQDKNTQQVFAQVKQIYKTPPIKDFGGFNFSQILPDPSKPSKRSFIEDLLFNKVTLADAGFIKQYGDCLGDIAARDLICAQKFNGLTVLPPLLTDEMIAQYTSALLAGTITSGWTFGAGAALQIPFAMQMAYRFNGIGVTQNVLYENQKLIANQFNSAIGKIQDSLSSTASALGKLQDVVNQNAQALNTLVKQLSSNFGAISSVLNDILSRLDKVEAEVQIDRLITGRLQSLQTYVTQQLIRAAEIRASANLAATKMSECVLGQSKRVDFCGKGYHLMSFPQSAPHGVVFLHVTYVPAQEKNFTTAPAICHDGKAHFPREGVFVSNGTHWFVTQRNFCEPQIITTDNTFVSGNCDVVIGIVNNTVYDPLQPELDSGGSGYIPEAPRDGQAYVRKDGEWVLLSTFL

SEQ ID NO: 10084 - protein, 1177 aa, Artificial Sequence
  SARS-CoV-2/France/HF1805/2020__EPI_ISL_414628 spike protein (1-1147)(I714C_Y1110C) Foldon construct
MFVFLVLLPLVSSQCVNLTTRTQLPPAYTNSFTRGVYYPDKVFRSSVLHSTQDLFLPFFSNVTWFHAIHVSGTNGTKRFDNPVLPFNDGVYFASTEKSNIIRGWIFGTTLDSKTQSLLIVNNATNVVIKVCEFQFCNDPFLGVYYHKNNKSWMESEFRVYSSANNCTFEYVSQPFLMDLEGKQGNFKNLREFVFKNIDGYFKIYSKHTPINLVRDLPQGFSALEPLVDLPIGINITRFQTLLALHRSYLTPGDSSSGWTAGAAAYYVGYLQPRTFLLKYNENGTITDAVDCALDPLSETKCTLKSFTVEKGIYQTSNFRVQPTESIVRFPNITNLCPFGEVFNATRFASVYAWNRKRISNCVADYSVLYNSASFSTFKCYGVSPTKLNDLCFTNVYADSFVIRGDEVRQIAPGQTGKIADYNYKLPDDFTGCVIAWNSNNLDSKVGGNYNYLYRLFRKSNLKPFERDISTEIYQAGSTPCNGVEGFNCYFPLQSYGFQPTNGVGYQPYRVVVLSFELLHAPATVCGPKKSTNLVKNKCVNFNFNGLTGTGVLTESNKKFLPFQQFGRDIADTTDAVRDPQTLEILDITPCSFGGVSVITPGTNTSNQVAVLYQGVNCTEVPVAIHADQLTPTWRVYSTGSNVFQTRAGCLIGAEHVNNSYECDIPIGAGICASYQTQTNSPRRARSVASQSIIAYTMSLGAENSVAYSNNSIACPTNFTISVTTEILPVSMTKTSVDCTMYICGDSTECSNLLLQYGSFCTQLNRALTGIAVEQDKNTQEVFAQVKQIYKTPPIKDFGGFNFSQILPDPSKPSKRSFIEDLLFNKVTLADAGFIKQYGDCLGDIAARDLICAQKFNGLTVLPPLLTDEMIAQYTSALLAGTITSGWTFGAGAALQIPFAMQMAYRFNGIGVTQNVLYENQKLIANQFNSAIGKIQDSLSSTASALGKLQDVVNQNAQALNTLVKQLSSNFGAISSVLNDILSRLDKVEAEVQIDRLITGRLQSLQTYVTQQLIRAAEIRASANLAATKMSECVLGQSKRVDFCGKGYHLMSFPQSAPHGVVFLHVTYVPAQEKNFTTAPAICHDGKAHFPREGVFVSNGTHWFVTQRNFCEPQIITTDNTFVSGNCDVVIGVVNNTVYDPLQPELDSGGSGYIPEAPRDGQAYVRKDGEWVLLSTFL

SEQ ID NO: 10085 - protein, 1177 aa, Artificial Sequence
  SARS-CoV-2/Netherlands/ZuidHolland_9/2020__EPI_ISL_414445 spike protein (1-1147)(I714C_Y1110C) Foldon construct
MFVFLVLLPLVSSQCVNLTTRTQLPPAYTNSFTRGVYYPDKVFRSSVLHSTQDLFLPFFSNVTWFHAIHVSGTNGTKRFDNPVLPFNDGVYFASTEKSNIIRGWIFGTTLDSKTQSLLIVNNATNVVIKVCEFQFCNDPFLGVYYHKNNKSWMESEFRVYSSANNCTFEYVSQPFLMDLEGKQGNFKNLREFVFKNIDGYFKIYSKHTPINLVRDLPQGFSALEPLVDLPIGINITRFQTLLALHRSYLTPGDSSSGWTAGAAAYYVGYLQPRTFLLKYNENGTITDAVDCALDPLSETKCTLKSFTVEKGIYQTSNFRVQPTESIVRFPNITNLCPFGEVFNATRFASVYAWNRKRISNCVADYSVLYNSASFSTFKCYGVSPTKLNDLCFTNVYADSFVIRGDEVRQIAPGQTGKIADYNYKLPDDFTGCVIAWNSNNLDSKVGGNYNYLYRLFRKSNLKPFERDISTEIYQAGSTPCNGVEGFNCYFPLQSYGFQPTNGVGYQPYRVVVLSFELLHAPATVCGPKKSTNLVKNKCVNFNFNGLTGTGVLTESNKKFLPFQQFGRDIADTTDAVRDPQTLEILDITPCSFGGVSVITPGTNTSNQVAVLYQGVNCTEVPVAIHADQLTPTWRVYSTGSNVFQTRAGCLIGAEHVNNSYECDIPIGAGICASYQTQTNSPRRARSVASQSIIAYTMSLGAENSVAYSNNSIACPTNFTISVTTEILPVSMTKTSVDCTMYICGDSTECSNLLLQYGSFCTQLNRALTGIAVEQDKNTQEVFAQVKQIYKTPPIKDFGGFNFSQILPDPSKPSKRSFIEDLLFNKVTLADAGFIKQYGDCLGDIAARDLICVQKFNGLTVLPPLLTDEMIAQYTSALLAGTITSGWTFGAGAALQIPFAMQMAYRFNGIGVTQNVLYENQKLIANQFNSAIGKIQDSLSSTASALGKLQDVVNQNAQALNTLVKQLSSNFGAISSVLNDILSRLDKVEAEVQIDRLITGRLQSLQTYVTQQLIRAAEIRASANLAATKMSECVLGQSKRVDFCGKGYHLMSFPQSAPHGVVFLHVTYVPAQEKNFTTAPAICHDGKAHFPREGVFVSNGTHWFVTQRNFCEPQIITTDNTFVSGNCDVVIGIVNNTVYDPLQPELDSGGSGYIPEAPRDGQAYVRKDGEWVLLSTFL

SEQ ID NO: 10086 - protein, 1177 aa, Artificial Sequence
  SARS-CoV-2/Finland/FIN03032020A/2020__EPI_ISL_413602 spike protein (1-1147)(I714C_Y1110C) Foldon construct
MFVFLVLLPLVSSQCVNLTTRTQLPPAYTNSFTRGVYYPDKVFRSSVLHSTQDLFLPFFSNVTWFHAIHVSGTNGTKRFDNPVLPFNDGVYFASTEKSNIIRGWIFGTTLDSKTQSLLIVNNATNVVIKVCEFQFCNDPFLGVYYHKNNKSWMESEFRVYSSANNCTFEYVSQPFLMDLEGKQGNFKNLREFVFKNIDGYFKIYSKHTPINLVRDLPQGFSALEPLVDLPIGINITRFQTLLALHRSYLTPGDSSSGWTAGAAAYYVGYLQPRTFLLKYNENGTITDAVDCALDPLSETKCTLKSFTVEKGIYQTSNFRVQPTESIVRFPNITNLCPFGEVFNATRFASVYAWNRKRISNCVADYSVLYNSASFSTFKCYGVSPTKLNDLCFTNVYADSFVIRGDEVRQIAPGQTGKIADYNYKLPDDFTGCVISWNSNNLDSKVGGNYNYLYRLFRKSNLKPFERDISTEIYQAGSTPCNGVEGFNCYFPLQSYGFQPTNGVGYQPYRVVVLSFELLHAPATVCGPKKSTNLVKNKCVNFNFNGLTGTGVLTESNKKFLPFQQFGRDIADTTDAVRDPQTLEILDITPCSFGGVSVITPGTNTSNQVAVLYQGVNCTEVPVAIHADQLTPTWRVYSTGSNVFQTRAGCLIGAEHVNNSYECDIPIGAGICASYQTQTNSPRRARSVASQSIIAYTMSLGAENSVAYSNNSIACPTNFTISVTTEILPVSMTKTSVDCTMYICGDSTECSNLLLQYGSFCTQLNRALTGIAVEQDKNTQEVFAQVKQIYKTPPIKDFGGFNFSQILPDPSKPSKRSFIEDLLFNKVTLADAGFIKQYGDCLGDIAARDLICAQKFNGLTVLPPLLTDEMIAQYTSALLAGTITSGWTFGAGAALQIPFAMQMAYRFNGIGVTQNVLYENQKLIANQFNSAIGKIQDSLSSTASALGKLQDVVNQNAQALNTLVKQLSSNFGAISSVLNDILSRLDKVEAEVQIDRLITGRLQSLQTYVTQQLIRAAEIRASANLAATKMSECVLGQSKRVDFCGKGYHLMSFPQSAPHGVVFLHVTYVPAQEKNFTTAPAICHDGKAHFPREGVFVSNGTHWFVTQRNFCEPQIITTDNTFVSGNCDVVIGIVNNTVYDPLQPELDSGGSGYIPEAPRDGQAYVRKDGEWVLLSTFL

SEQ ID NO: 10087 - protein, 1177 aa, Artificial Sequence
  SARS-CoV-2/France/GE1977/2020__EPI_ISL_414632 spike protein (1-1147)(I714C_Y1110C) Foldon construct
MFVFLVLLPLVSSQCVNLTTRTQLPPAYTNSFTRGVYYPDKVFRSSVLHSTQDLFLPFFSNVTWFHAIHVSGTNGTKRFDNPVLPFNDGVYFASTEKSNIIRGWIFGTTLDSKTQSLLIVNNATNVVIKVCEFQFCNDPFLGVYYHKNNKSWMESEFRVYSSANNCTFEYVSQPFLMDLEGKQGNFKNLREFVFKNIDGYFKIYSKHTPINLVRDLPQGFSALEPLVDLPIGINITRFQTLLALHRSYLTPGDSSSGWTAGAAAYYVGYLQPRTFLLKYNENGTITDAVDCALDPLSETKCTLKSFTVEKGIYQTSNFRVQPTESIVRFPNITNLCPFGEVFNATRFASVYAWNRKRISNCVADYSVLYNSASFSTFKCYGVSPTKLNDLCFTNVYADSFVIRGDEVRQIAPGQTGKIADYNYKLPDDFTGCVIAWNSNNLDSKVGGNYNYLYRLFRKSNLKPFERDISTEIYQAGSTPCNGVEGFNCYFPLQSYGFQPTNGVGYQPYRVVVLSFELLHAPATVCGPKKSTNLVKNKCVNFNFNGLTGTGVLTESNKKFLPFQQFGRDIADTTDAVRDPQTLEILDITPCSFGGVSVITPGTNTSNQVAVLYQGVNCTEVPVAIHADQLTPTWRVYSTGSNVFQTRAGCLIGAEHVNNSYECDIPIGAGICASYQTQTNSPRRARSVASQSIIAYTMSLGAENSVAYSNNSIACPTNFTISVTTEILPVSMTKTSVDCTMYICGDSTECSNLLLQYGSFCTQLNRALTGIAVEQDKNTQEVFAQVKQIYKTPPIKDFGGFNFSQILPDPSKPSKRSFIEDLLFNKVTLADAGFIKQYGDCLGDIAARDLICAQKFNGLTVLPPLLTDEMIAQYTSALLAGTITSGWTFGAGAALQIPFAMQMAYRFNGIGVTQNVLYENQKLIANQFNSAIGKIQDSLFSTASALGKLQDVVNQNAQALNTLVKQLSSNFGAISSVLNDILSRLDKVEAEVQIDRLITGRLQSLQTYVTQQLIRAAEIRASANLAATKMSECVLGQSKRVDFCGKGYHLMSFPQSAPHGVVFLHVTYVPAQEKNFTTAPAICHDGKAHFPREGVFVSNGTHWFVTQRNFCEPQIITTDNTFVSGNCDVVIGIVNNTVYDPLQPELDSGGSGYIPEAPRDGQAYVRKDGEWVLLSTFL

SEQ ID NO: 10088 - protein, 1177 aa, Artificial Sequence
  SARS-CoV-2/Finland/FIN-313/2020__EPI_ISL_414641 spike protein (1-1147)(I714C_Y1110C) Foldon construct
MFVFLVLLPLVSSQCVNLTTRTQLPPAYTNSFTRGVYYPDKVFRSSVLHSTQDLFLPFFSNVTWFHAIHVSGTNGTKRFDNPVLPFNDGVYFASTEKSNIIRGWIFGTTLDSKTQSLLIVNNATNVVIKVCEFQFCNDPFLGVYYHKNNKSWMESEFRVYSSANNCTFEYVSQPFLMDLEGKQGNFKNLREFVFKNIDGYFKIYSKHTPINLVRDLPQGFSALEPLVDLPIGINITRFKTLLALHRSYLTPGDSSSGWTAGAAAYYVGYLQPRTFLLKYNENGTITDAVDCALDPLSETKCTLKSFTVEKGIYQTSNFRVQPTESIVRFPNITNLCPFGEVFNATRFASVYAWNRKRISNCVADYSVLYNSASFSTFKCYGVSPTKLNDLCFTNVYADSFVIRGDEVRQIAPGQTGKIADYNYKLPDDFTGCVIAWNSNNLDSKVGGNYNYLYRLFRKSNLKPFERDISTEIYQAGSTPCNGVEGFNCYFPLQSYGFQPTNGVGYQPYRVVVLSFELLHAPATVCGPKKSTNLVKNKCVNFNFNGLTGTGVLTESNKKFLPFQQFGRDIADTTDAVRDPQTLEILDITPCSFGGVSVITPGTNTSNQVAVLYQGVNCTEVPVAIHADQLTPTWRVYSTGSNVFQTRAGCLIGAEHVNNSYECDIPIGAGICASYQTQTNSPRRARSVASQSIIAYTMSLGAENSVAYSNNSIACPTNFTISVTTEILPVSMTKTSVDCTMYICGDSTECSNLLLQYGSFCTQLNRALTGIAVEQDKNTQEVFAQVKQIYKTPPIKDFGGFNFSQILPDPSKPSKRSFIEDLLFNKVTLADAGFIKQYGDCLGDIAARDLICAQKFNGLTVLPPLLTDEMIAQYTSALLAGTITSGWTFGAGAALQIPFAMQMAYRFNGIGVTQNVLYENQKLIANQFNSAIGKIQDSLSSTASALGKLQDVVNQNAQALNTLVKQLSSNFGAISSVLNDILSRLDKVEAEVQIDRLITGRLQSLQTYVTQQLIRAAEIRASANLAATKMSECVLGQSKRVDFCGKGYHLMSFPQSAPHGVVFLHVTYVPAQEKNFTTAPAICHDGKAHFPREGVFVSNGTHWFVTQRNFCEPQIITTDNTFVSGNCDVVIGIVNNTVYDPLQPELDSGGSGYIPEAPRDGQAYVRKDGEWVLLSTFL

SEQ ID NO: 10089 - protein, 1177 aa, Artificial Sequence
  SARS-CoV-2/Netherlands/ZuidHolland_2/2020__EPI_ISL_414556 spike protein (1-1147)(I714C_Y1110C) Foldon construct
MFVFLVLLPLVSSQCVNLTTRTQLPPAYTNSFTRGVYYPDKVFRSSVLHSTQDLFLPFFSNVTWFHAIHVSGTNGTKRFDNPVLPFNDGVYFASTEKSNIIRGWIFGTTLDSKTQSLLIVNNATNVVIKVCEFQFCNDPFLGVYYHKNNKSWMESEFRVYSSANNCTFEYVSQPFLMDLEGKQGNFKNLREFVFKNIDGYFKIYSKHTPINLVRDLPQGFSALEPLVDLPIGINITRFQTLLALHRSYLTPGDSSSGWTAGAAAYYVGYLQPRTFLLKYNENGTITDAVDCALDPLSETKCTLKSFTVEKGIYQTSNFRVQPTESIVRFPNITNLCPFGEVFNATRFASVYAWNRKRISNCVADYSVLYNSASFSTFKCYGVSPTKLNDLCFTNVYADSFVIRGDEVRQIAPGQTGKIADYNYKLPDDFTGCVIAWNSNNLDSKVGGNYNYLYRLFRKSNLKPFERDISTEIYQAGSTPCNGVEGFNCYFPLQSYGFQPTNGVGYQPYRVVVLSFELLHAPATVCGPKKSTNLVKNKCVNFNFNGLTGTGVLTESNKKFLPFQQFGRDIADTTDAVRDPQTLEILDITPCSFGGVSVITPGTNTSNQVAVLYQGVNCTEVPVAIHADQLTPTWRVYSTGSNVFQTRAGCLIGAEHVNNSYECDIPIGAGICASYQTQTNSPRRARSVASQSIIAYTMSLGAENSVAYSNNSIACPTNFTISVTTEILPVSMTKTSVDCTMYICGDSTECSNLLLQYGSFCTQLNRALTGIALEQDKNTQEVFAQVKQIYKTPPIKDFGGFNFSQILPDPSKPSKRSFIEDLLFNKVTLADAGFIKQYGDCLGDIAARDLICAQKFNGLTVLPPLLTDEMIAQYTSALLAGTITSGWTFGAGAALQIPFAMQMAYRFNGIGVTQNVLYENQKLIANQFNSAIGKIQDSLSSTASALGKLQDVVNQNAQALNTLVKQLSSNFGAISSVLNDILSRLDKVEAEVQIDRLITGRLQSLQTYVTQQLIRAAEIRASANLAATKMSECVLGQSKRVDFCGKGYHLMSFPQSAPHGVVFLHVTYVPAQEKNFTTAPAICHDGKAHFPREGVFVSNGTHWFVTQRNFCEPQIITTDNTFVSGNCDVVIGIVNNTVYDPLQPELDSGGSGYIPEAPRDGQAYVRKDGEWVLLSTFL

SEQ ID NO: 10090 - protein, 1177 aa, Artificial Sequence
  SARS-CoV-2/USA/WA-UW31/2020__EPI_ISL_414618 spike protein (1-1147)(I714C_Y1110C) Foldon construct
MFVFLVLLPLVSSQCVNLTTRTQLPPAYTNSFTRGVYYPDKVFRSSVLHSTQDLFLPFFSNVTWFHAIHVSGTNGTKRFDNPVLPFNDGVYFASTEKSNIIRGWIFGTTLDSKTQSLLIVNNATNVVIKVCEFQFCNDPFLGVYYHKNNKSWMESEFRVYSSANNCTFEYVSQPFLMDLEGKQGNFKNLREFVFKNIDGYFKIYSKHTPINLVRDLPQGFSALEPLVDLPIGINITRFQTLLALHRSYLTPGDSSSGWTAGAAAYYVGYLQPRTFLLKYNENGTITDAVDCALDPLSETKCTLKSFTVEKGIYQTSNFRVQPTESIVRFPNITNLCPFGEVFNATRFASVYAWNRKRISNCVADYSVLYNSASFSTFKCYGVSPTKLNDLCFTNVYADSFVIRGDEVRQIAPGQTGKIADYNYKLPDDFTGCVIAWNSNNLDSKVGGNYNYLYRLFRKSNLKPFERDISTEIYQAGSTPCNGAEGFNCYFPLQSYGFQPTNGVGYQPYRVVVLSFELLHAPATVCGPKKSTNLVKNKCVNFNFNGLTGTGVLTESNKKFLPFQQFGRDIADTTDAVRDPQTLEILDITPCSFGGVSVITPGTNTSNQVAVLYQDVNCTEVPVAIHADQLTPTWRVYSTGSNVFQTRAGCLIGAEHVNNSYECDIPIGAGICASYQTQTNSPRRARSVASQSIIAYTMSLGAENSVAYSNNSIACPTNFTISVTTEILPVSMTKTSVDCTMYICGDSTECSNLLLQYGSFCTQLNRALTGIAVEQDKNTQEVFAQVKQIYKTPPIKDFGGFNFSQILPDPSKPSKRSFIEDLLFNKVTLADAGFIKQYGDCLGDIAARDLICAQKFNGLTVLPPLLTDEMIAQYTSALLAGTITSGWTFGAGAALQIPFAMQMAYRFNGIGVTQNVLYENQKLIANQFNSAIGKIQDSLSSTASALGKLQDVVNQNAQALNTLVKQLSSNFGAISSVLNDILSRLDKVEAEVQIDRLITGRLQSLQTYVTQQLIRAAEIRASANLAATKMSECVLGQSKRVDFCGKGYHLMSFPQSAPHGVVFLHVTYVPAQEKNFTTAPAICHDGKAHFPREGVFVSNGTHWFVTQRNFCEPQIITTDNTFVSGNCDVVIGIVNNTVYDPLQPELDSGGSGYIPEAPRDGQAYVRKDGEWVLLSTFL

SEQ ID NO: 10091 - protein, 1177 aa, Artificial Sequence
  SARS-CoV-2/South Korea/SNU01/2020__EPI_ISL_411929 spike protein (1-1147)(I714C_Y1110C) Foldon construct
MFVFLVLLPLVSSQCVNLTTRTQLPPAYTNSFTRGVYYPDKVFRSSVLHSTQDLFLPFFSNVTWFHAIHVSGTNGTKRFDNPVLPFNDGVYFASTEKSNIIRGWIFGTTLDSKTQSLLIVNNATNVVIKVCEFQFCNDPFLGVYYHKNNKSWMESEFRVYSSANNCTFEYVSQPFLMDLEGKQGNFKNLREFVFKNIDGYFKIYSKHTPINLVRDLPQGFWALEPLVDLPIGINITRFQTLLALHRSYLTPGDSSSGWTAGAAAYYVGYLQPRTFLLKYNENGTITDAVDCALDPLSETKCTLKSFTVEKGIYQTSNFRVQPTESIVRFPNITNLCPFGEVFNATRFASVYAWNRKRISNCVADYSVLYNSASFSTFKCYGVSPTKLNDLCFTNVYADSFVIRGDEVRQIAPGQTGKIADYNYKLPDDFTGCVIAWNSNNLDSKVGGNYNYLYRLFRKSNLKPFERDISTEIYQAGSTPCNGVEGFNCYFPLQSYGFQPTNGVGYQPYRVVVLSFELLHAPATVCGPKKSTNLVKNKCVNFNFNGLTGTGVLTESNKKFLPFQQFGRDIADTTDAVRDPQTLEILDITPCSFGGVSVITPGTNTSNQVAVLYQDVNCTEVPVAIHADQLTPTWRVYSTGSNVFQTRAGCLIGAEHVNNSYECDIPIGAGICASYQTQTNSPRRARSVASQSIIAYTMSLGAENSVAYSNNSIACPTNFTISVTTEILPVSMTKTSVDCTMYICGDSTECSNLLLQYGSFCTQLNRALTGIAVEQDKNTQEVFAQVKQIYKTPPIKDFGGFNFSQILPDPSKPSKRSFIEDLLFNKVTLADAGFIKQYGDCLGDIAARDLICAQKFNGLTVLPPLLTDEMIAQYTSALLAGTITSGWTFGAGAALQIPFAMQMAYRFNGIGVTQNVLYENQKLIANQFNSAIGKIQDSLSSTASALGKLQDVVNQNAQALNTLVKQLSSNFGAISSVLNDILSRLDKVEAEVQIDRLITGRLQSLQTYVTQQLIRAAEIRASANLAATKMSECVLGQSKRVDFCGKGYHLMSFPQSAPHGVVFLHVTYVPAQEKNFTTAPAICHDGKAHFPREGVFVSNGTHWFVTQRNFCEPQIITTDNTFVSGNCDVVIGIVNNTVYDPLQPELDSGGSGYIPEAPRDGQAYVRKDGEWVLLSTFL

SEQ ID NO: 10092 - protein, 1177 aa, Artificial Sequence
  SARS-CoV-2/China/WF0004/2020__EPI_ISL_413694 spike protein (1-1147)(I714C_Y1110C) Foldon construct
MFVFLVLLPLVSSQCVNLTTRTQLPPAYTNSFTRGVYYPDKVFRSSVLHSTQDLFLPFFSNVTWFHAIHVSGTNGTKRFDNPVLPFNDGVYFASTEKSNIIRGWIFGTTLDSKTQSLLIVNNATNVVIKVCEFQFCNDPFLGVYYHKNNKSWTESEFRVYSSANNCTFEYVSQPFLMDLEGKQGNFKNLREFVFKNIDGYFKIYSKHTPINLVRDLPQGFSALEPLVDLPIGINITRFQTLLALHRSYLTPGDSSSGWTAGAAAYYVGYLQPRTFLLKYNENGTITDAVDCALDPLSETKCTLKSFTVEKGIYQTSNFRVQPTESIVRFPNITNLCPFGEVFNATRFASVYAWNRKRISNCVADYSVLYNSASFSTFKCYGVSPTKLNDLCFTNVYADSFVIRGDEVRQIAPGQTGKIADYNYKLPDDFTGCVIAWNSNNLDSKVGGNYNYLYRLFRKSNLKPFERDISTEIYQAGSTPCNGVEGFNCYFPLQSYGFQPTNGVGYQPYRVVVLSFELLHAPATVCGPKKSTNLVKNKCVNFNFNGLTGTGVLTESNKKFLPFQQFGRDIADTTDAVRDPQTLEILDITPCSFGGVSVITPGTNTSNQVAVLYQDVNCTEVPVAIHADQLTPTWRVYSTGSNVFQTRAGCLIGAEHVNNSYECDIPIGAGICASYQTQTNSPRRARSVASQSIIAYTMSLGAENSVAYSNNSIACPTNFTISVTTEILPVSMTKTSVDCTMYICGDSTECSNLLLQYGSFCTQLNRALTGIAVEQDKNTQEVFAQVKQIYKTPPIKDFGGFNFSQILPDPSKPSKRSFIEDLLFNKVTLADAGFIKQYGDCLGDIAARDLICAQKFNGLTVLPPLLTDEMIAQYTSALLAGTITSGWTFGAGAALQIPFAMQMAYRFNGIGVTQNVLYENQKLIANQFNSAIGKIQDSLSSTASALGKLQDVVNQNAQALNTLVKQLSSNFGAISSVLNDILSRLDKVEAEVQIDRLITGRLQSLQTYVTQQLIRAAEIRASANLAATKMSECVLGQSKRFDFCGKGYHLMSFPQSAPHGVVFLHVTYVPAQEKNFTTAPAICHDGKAHFPREGVFVSNGTHWFVTQRNFCEPQIITTDNTFVSGNCDVVIGIVNNTVYDPLQPELDSGGSGYIPEAPRDGQAYVRKDGEWVLLSTFL

SEQ ID NO: 10093 - protein, 1177 aa, Artificial Sequence
  SARS-CoV-2/China/WF0028/2020__EPI_ISL_413791 spike protein (1-1147)(I714C_Y1110C) Foldon construct
MFVFLVLLPLVSSQCVNLTTRTQLPPAYTNSFTRGVYYPDKVFRSSVLHSTQDLFLPFFSNVTWFHAIHVSGTNGTKRFDNPVLPFNDGVYFASTEKSNIIRGWIFGTTLDSKTQSLLIVNNATNVVIKVCEFQFCNDPFLGVYYHKNNKSWMESEFRVYSSANNCTFEYVSQPFLMDLEGKQGNFKNLREFVFKNIDGYFKIYSKHTPINLVRDLPQGFSALEPLVDLPIGINITRFQTLLALHRSYLTPGDSSSGWTAGAAAYYVGYLQPRTFLLKYNENGTITDAVDCALDPLSETKCTLKSFTVEKGIYQTSNFRVQPTESIVRFPNITNLCPFGEVFNATRFASVYAWNRKRISNCVADYSVLYNSASFSTFKCYGVSPTKLNDLCFTNVYADSFVIRGDEVRQIAPGQTGKIADYNYKLPDDFTGCVIAWNSNNLDSKVGGNYNYLYRLFRKSNLKPFERDISTEIYQAGSTPCNGVEGFNCYFPLQSYGFQPTNGVGYQPYRVVVLSFELLHAPATVCGPKKSTNLVKNKCVNFNFNGLTGTGVLTESNKKFLPFQQFGRDIADTTDAVRDPQTLEILDITPCSFGGVSVITPGTNTSNQVAVLYQDVNCTEVPVAIHADQLTPTWRVYSTGSNVFQTRAGCLIGAEHVNNSYECDIPIGAGICASYQTQTNSPRRARSVASQSIIAYTMSLGAENSVAYSNNSIACPTNFTISVTTEILPVSMTKTSVDCTMYICGDSTECSNLLLQYGSFCTQLNRALTGIAVEQDKNTQEVFAQVKQIYKTPPIKDFGGFNFSQILPDPSKPSKRSFIEDLLFNKVTLADAGFIKQYGDCLGDIAARDLICAQKFNGLTVLPPLLTDEMIAQYTSALLAGTITSGWTFGAGAALQIPFAMQMAYRFNGIGVTQNVLYENQKLIANQFNSAIGKIQDSLSSTASALGKLQDVVNQNAQALNTLVKQLSSNFGAISSVLNDILSRLDKVEAEVQIDRLITGRLQSLQTYVTQQLIRAAEIRASANLAATKMSECVLGQSKRVDFCGKGYHLMSFPQSAPHGVVFLHVTYVPAQEKNFTTAPAICHDGKAHFPREGVFVSNGTHWFVTQRNFCEPQIITTDNTFVSGNCDVVIGIVNNTVYDPLQPELESGGSGYIPEAPRDGQAYVRKDGEWVLLSTFL

SEQ ID NO: 10094 - protein, 1177 aa, Artificial Sequence
  SARS-CoV-2/2019-nCoV/USA-CruiseA-18/2020__MT159716.1 spike protein (1-1147)(I714C_Y1110C) Foldon construct
MFVFLVLLPLVSSQCVNLTTRTQLPPAYTNSFTRGVYYPDKVFRSSVLHSTQDLFLPFFSNVTWFHAIHVSGTNGTKRFDNPVLPFNDGVYFASTEKSNIIRGWIFGTTLDSKTQSLLIVNNATNVVIKVCEFQFCNDPFLGVYYHKNNKSWMESELRVYSSANNCTFEYVSQPFLMDLEGKQGNFKNLREFVFKNIDGYFKIYSKHTPINLVRDLPQGFSALEPLVDLPIGINITRFQTLLALHRSYLTPGDSSSGWTAGAAAYYVGYLQPRTFLLKYNENGTITDAVDCALDPLSETKCTLKSFTVEKGIYQTSNFRVQPTESIVRFPNITNLCPFGEVFNATRFASVYAWNRKRISNCVADYSVLYNSASFSTFKCYGVSPTKLNDLCFTNVYADSFVIRGDEVRQIAPGQTGKIADYNYKLPDDFTGCVIAWNSNNLDSKVGGNYNYLYRLFRKSNLKPFERDISTEIYQAGSTPCNGVEGFNCYFPLQSYGFQPTNGVGYQPYRVVVLSFELLHAPATVCGPKKSTNLVKNKCVNFNFNGLTGTGVLTESNKKFLPFQQFGRDIADTTDAVRDPQTLEILDITPCSFGGVSVITPGTNTSNQVAVLYQDVNCTEVPVAIHADQLTPTWRVYSTGSNVFQTRAGCLIGAEHVNNSYECDIPIGAGICASYQTQTNSPRRARSVASQSIIAYTMSLGAENSVAYSNNSIACPTNFTISVTTEILPVSMTKTSVDCTMYICGDSTECSNLLLQYGSFCTQLNRALTGIAVEQDKNTQEVFAQVKQIYKTPPIKDFGGFNFSQILPDPSKPSKRSFIEDLLFNKVTLADAGFIKQYGDCLGDIAARDLICAQKFNGLTVLPPLLTDEMIAQYTSALLAGTITSGWTFGAGAALQIPFAMQMAYRFNGIGVTQNVLYENQKLIANQFNSAIGKIQDSLSSTASALGKLQDVVNQNAQALNTLVKQLSSNFGAISSVLNDILSRLDKVEAEVQIDRLITGRLQSLQTYVTQQLIRAAEIRASANLAATKMSECVLGQSKRVDFCGKGYHLMSFPQSAPHGVVFLHVTYVPAQEKNFTTAPAICHDGKAHFPREGVFVSNGTHWFVTQRNFCEPQIITTDNTFVSGNCDVVIGIVNNTVYDPLQPELDSGGSGYIPEAPRDGQAYVRKDGEWVLLSTFL

SEQ ID NO: 10095 - protein, 1177 aa, Artificial Sequence
  SARS-CoV-2/SARS-CoV-2/Yunnan-01/human/2020/CHN__MT049951.1 spike protein (1-1147)(I714C_Y1110C) Foldon construct
MFVFLVLLPLVSSQCVNLTTRTQLPPANTNSFTRGVYYPDKVFRSSVLHSTQDLFLPFFSNVTWFHAIHVSGTNGTKRFDNPVLPFNDGVYFASTEKSNIIRGWIFGTTLDSKTQSLLIVNNATNVVIKVCEFQFCNDPFLGVYYHKNNKSWMESEFRVYSSANNCTFEYVSQPFLMDLEGKQGNFKNLREFVFKNIDGYFKIYSKHTPINLVRDLPQGFSALEPLVDLPIGINITRFQTLLALHRSYLTPGDSSSGWTAGAAAYYVGYLQPRTFLLKYNENGTITDAVDCALDPLSETKCTLKSFTVEKGIYQTSNFRVQPTESIVRFPNITNLCPFGEVFNATRFASVYAWNRKRISNCVADYSVLYNSASFSTFKCYGVSPTKLNDLCFTNVYADSFVIRGDEVRQIAPGQTGKIADYNYKLPDDFTGCVIAWNSNNLDSKVGGNYNYLYRLFRKSNLKPFERDISTEIYQAGSTPCNGVEGFNCYFPLQSYGFQPTNGVGYQPYRVVVLSFELLHAPATVCGPKKSTNLVKNKCVNFNFNGLTGTGVLTESNKKFLPFQQFGRDIADTTDAVRDPQTLEILDITPCSFGGVSVITPGTNTSNQVAVLYQDVNCTEVPVAIHADQLTPTWRVYSTGSNVFQTRAGCLIGAEHVNNSYECDIPIGAGICASYQTQTNSPRRARSVASQSIIAYTMSLGAENSVAYSNNSIACPTNFTISVTTEILPVSMTKTSVDCTMYICGDSTECSNLLLQYGSFCTQLNRALTGIAVEQDKNTQEVFAQVKQIYKTPPIKDFGGFNFSQILPDPSKPSKRSFIEDLLFNKVTLADAGFIKQYGDCLGDIAARDLICAQKFNGLTVLPPLLTDEMIAQYTSALLAGTITSGWTFGAGAALQIPFAMQMAYRFNGIGVTQNVLYENQKLIANQFNSAIGKIQDSLSSTASALGKLQDVVNQNAQALNTLVKQLSSNFGAISSVLNDILSRLDKVEAEVQIDRLITGRLQSLQTYVTQQLIRAAEIRASANLAATKMSECVLGQSKRVDFCGKGYHLMSFPQSAPHGVVFLHVTYVPAQEKNFTTAPAICHDGKAHFPREGVFVSNGTHWFVTQRNFCEPQIITTDNTFVSGNCDVVIGIVNNTVYDPLQPELDSGGSGYIPEAPRDGQAYVRKDGEWVLLSTFL

SEQ ID NO: 10096 - protein, 1177 aa, Artificial Sequence
  SARS-CoV-2/USA/WA-UW292/2020__EPI_ISL_418077 spike protein (1-1147)(I714C_Y1110C) Foldon construct
MFVFLVLLPLVSSQCVNLTTRTQLPPAYTNSFTRGVYYPDKVFRSSVLHSTQDLFLPFFSNVTWFHAIHVSGTNGTKRFDNPVLPFNDGVYFASTEKSNIIRGWIFGTTLDSKTQSLLIVNNATNVVIKVCEFQFCNDPFLGVYYHKNNKSWMESEFRVYSSANNCTFEYVSQPFLMDLEGKQGNFKNLREFVFKNIDGYFKIYSKHTPINLVRDLPQGFSALEPLVDLPIGINITRFQTLLALHRSYLTPGDSSSGWTAGAAAYYVGYLQPRTFLLKYNENGTITDAVDCALDPLSETKCTLKSFTVEKGIYQTSNFRVQPTESIVRFPNITNLCPFGEVFNATRFASVYAWNRKRISNCVADYSVLYNSASFSTFKCYGVSPTKLNDLCFTNVYADSFVIRGDEVRQIAPGQTGKIADYNYKLPDDFTGCVIAWNSNNLDSKVGGNYNYLYRLFRKSNLKPFERDISTEIYQASSTPCNGVEGFNCYFPLQSYGFQPTNGVGYQPYRVVVLSFELLHAPATVCGPKKSTNLVKNKCVNFNFNGLTGTGVLTESNKKFLPFQQFGRDIADTTDAVRDPQTLEILDITPCSFGGVSVITPGTNTSNQVAVLYQDVNCTEVPVAIHADQLTPTWRVYSTGSNVFQTRAGCLIGAEHVNNSYECDIPIGAGICASYQTQTNSPRRARSVASQSIIAYTMSLGAENSVAYSNNSIACPTNFTISVTTEILPVSMTKTSVDCTMYICGDSTECSNLLLQYGSFCTQLNRALTGIAVEQDKNTQEVFAQVKQIYKTPPIKDFGGFNFSQILPDPSKPSKRSFIEDLLFNKVTLADAGFIKQYGDCLGDIAARDLICAQKFNGLTVLPPLLTDEMIAQYTSALLAGTITSGWTFGAGAALQIPFAMQMAYRFNGIGVTQNVLYENQKLIANQFNSAIGKIQDSLSSTASALGKLQDVVNQNAQALNTLVKQLSSNFGAISSVLNDILSRLDKVEAEVQIDRLITGRLQSLQTYVTQQLIRAAEIRASANLAATKMSECVLGQSKRVDFCGKGYHLMSFPQSAPHGVVFLHVTYVPAQEKNFTTAPAICHDGKAHFPREGVFVSNGTHWFVTQRNFCEPQIITTDNTFVSGNCDVVIGIVNNTVYDPLQPELDSGGSGYIPEAPRDGQAYVRKDGEWVLLSTFL

SEQ ID NO: 10097 - protein, 1177 aa, Artificial Sequence
  SARS-CoV-2/Iceland/192/2020__EPI_ISL_417819 spike protein (1-1147)(I714C_Y1110C) Foldon construct
MFVFFVLLPLVSSQCVNLTTRTQLPPAYTNSFTRGVYYPDKVFRSSVLHSTQDLFLPFFSNVTWFHAIHVSGTNGTKRFDNPVLPFNDGVYFASTEKSNIIRGWIFGTTLDSKTQSLLIVNNATNVVIKVCEFQFCNDPFLGVYYHKNNKSWMESEFRVYSSANNCTFEYVSQPFLMDLEGKQGNFKNLREFVFKNIDGYFKIYSKHTPINLVRDLPQGFSALEPLVDLPIGINITRFQTLLALHRSYLTPGDSSSGWTAGAAAYYVGYLQPRTFLLKYNENGTITDAVDCALDPLSETKCTLKSFTVEKGIYQTSNFRVQPTESIVRFPNITNLCPFGEVFNATRFASVYAWNRKRISNCVADYSVLYNSASFSTFKCYGVSPTKLNDLCFTNVYADSFVIRGDEVRQIAPGQTGKIADYNYKLPDDFTGCVIAWNSNNLDSKVGGNYNYLYRLFRKSNLKPFERDISTEIYQAGSTPCNGVEGFNCYFPLQSYGFQPTNGVGYQPYRVVVLSFELLHAPATVCGPKKSTNLVKNKCVNFNFNGLTGTGVLTESNKKFLPFQQFGRDIADTTDAVRDPQTLEILDITPCSFGGVSVITPGTNTSNQVAVLYQGVNCTEVPVAIHADQLTPTWRVYSTGSNVFQTRAGCLIGAEHVNNSYECDIPIGAGICASYQTQTNSPRRARSVASQSIIAYTMSLGAENSVAYSNNSIACPTNFTISVTTEILPVSMTKTSVDCTMYICGDSTECSNLLLQYGSFCTQLNRALTGIAVEQDKNTQEVFAQVKQIYKTPPIKDFGGFNFSQILPDPSKPSKRSFIEDLLFNKVTLADAGFIKQYGDCLGDIAARDLICAQKFNGLTVLPPLLTDEMIAQYTSALLAGTITSGWTFGAGAALQIPFAMQMAYRFNGIGVTQNVLYENQKLIANQFNSAIGKIQDSLSSTASALGKLQDVVNQNAQALNTLVKQLSSNFGAISSVLNDILSRLDKVEAEVQIDRLITGRLQSLQTYVTQQLIRAAEIRASANLAATKMSECVLGQSKRVDFCGKGYHLMSFPQSAPHGVVFLHVTYVPAQEKNFTTAPAICHDGKAHFPREGVFVSNGTHWFVTQRNFCEPQIITTDNTFVSGNCDVVIGIVNNTVYDPLQPELDSGGSGYIPEAPRDGQAYVRKDGEWVLLSTFL

SEQ ID NO: 10098 - protein, 1177 aa, Artificial Sequence
  SARS-CoV-2/Belgium/ULG-6939/2020__EPI_ISL_417020 spike protein (1-1147)(I714C_Y1110C) Foldon construct
MFVFLVLLPLVSSQCVNLTTRTQLPPAYTNSFTRGVYYPDKVFRSSVLHSTQDLFLPFFSNVTWFHAIHVSGTNGTKRFDNPVLPFNDGVYFASTEKSNIIRGWIFGTTLDSKTQSLLIVNNATNVVIKVCEFQFCNDPFLGVYYHKNNKSWMESEFRVYSSANNCTFEYVSQPFLMDLEGKQGNFKNLREFVFKNIDGYFKIYSKHTPINLVRDLPQGFSALEPLVDLPIGINITRFQTLLALHRSYLTPGDSSSGWTAGAAAYYVGYLQPRTFLLKYNENGTITDAVDCALDPLSETKCTLKSFTVEKGIYQTSNFRVQPTESIVRFPNITNLCPFGEVFNATRFASVYAWNRKRISNCVADYSVLYNSASFSTFKCYGVSPTKLNDLCFTNVYADSFVIRGDEVRQIAPGQTGKIADYNYKLPDDFTGCVIAWNSNNLDSKVGGNYNYLYRLFRKSNLKPFERDISTEIYQAGSTPCNGVEGFNCYFPLQSYGFQPTNGVGYQPYRVVVLSFELLHAPATVCGPKKSTNLVKNKCVNFNFNGLTGTGVLTESNKKFLPFQQFGRDIADTTDAVRDPQTLEILDITPCSFGGVSVITPGTNTSNQVAVLYQGVNCTEVPVAIHADQLTPTWRVYSTGSNVFQTRAGCLIGAEHVNNSYECDIPIGAGICASYQTQTNSPRRARSVASQSIIAYTMSLGAENSVVYSNNSIACPTNFTISVTTEILPVSMTKTSVDCTMYICGDSTECSNLLLQYGSFCTQLNRALTGIAVEQDKNTQEVFAQVKQIYKTPPIKDFGGFNFSQILPDPSKPSKRSFIEDLLFNKVTLADAGFIKQYGDCLGDIAARDLICAQKFNGLTVLPPLLTDEMIAQYTSALLAGTITSGWTFGAGAALQIPFAMQMAYRFNGIGVTQNVLYENQKLIANQFNSAIGKIQDSLSSTASALGKLQDVVNQNAQALNTLVKQLSSNFGAISSVLNDILSRLDKVEAEVQIDRLITGRLQSLQTYVTQQLIRAAEIRASANLAATKMSECVLGQSKRVDFCGKGYHLMSFPQSAPHGVVFLHVTYVPAQEKNFTTAPAICHDGKAHFPREGVFVSNGTHWFVTQRNFCEPQIITTDNTFVSGNCDVVIGIVNNTVYDPLQPELDSGGSGYIPEAPRDGQAYVRKDGEWVLLSTFL

SEQ ID NO: 10099 - protein, 1177 aa, Artificial Sequence
  SARS-CoV-2/France/HF2496/2020__EPI_ISL_418231 spike protein (1-1147)(I714C_Y1110C) Foldon construct
MFVFLVLLPLVSSQCVNLTTRTQLPPAYTNSFTRGVYYPDKVFRSSVLHSTQDLFLPFFSNVTWFHAIHVSGTNGTKRFDNPVLPFNDGVYFASTEKSNIIRGWIFGTTLDSKTQSLLIVNNATNVVIKVCEFQFCNDPFLGVYYHKNNKSWMESEFRVYSSANNCTFEYVSQPFLMDLEGKQGNFKNLREFVFKNIDGYFKIYSKHTPINLVRDLPQGFSALEPLVDLPIGINITRFQTLLALHRSYLTPGDSSSGWTAGAAAYYVGYLQPRTFLLKYNENGTITDAVDCALDPLSETKCTLKSFTVEKGIYQTSNFRVQPTESIVRFPNITNLCPFGEVFNATRFASVYAWNRKRISNCVADYSVLYNSASFSTFKCYGVSPTKLNDLCFTNVYADSFVIRGDEVRQIAPGQTGKIADYNYKLPDDFTGCVIAWNSNNLDSKVGGNYNYLYRLFRKSNLKPFERDISTEIYQAGSTPCNGVEGFNCYFPLQSYGFQPTNGVGYQPYRVVVLSFELLHAPATVCGPKKSTNLVKNKCVNFNFNGLTGTGVLTESNKKFLPFQQFGRDIADTTDAVRDPQTLEILDITPCSFGGVSVITPGTNTSNQVAVLYQGVNCTEVPVAIHADQLTPTWRVYSTGSNVFQTRAGCLIGAEHVNNSYECDIPIGAGICASYQTQTNSPRRARSVASQSIIAYTMSLGAENSVAYSNNSIACPTNFTISVTTEILPVSMTKTSVDCTMYICGDSTECSNLLLQYGSFCTQLNRALTGIAVEQDKNTQEVFAQVKQIYKTPPIKDFGGFNFSQILPDPSKPSKRSFIEDLLFNKVTLADAGFIKQYGDCLGDIVARDLICAQKFNGLTVLPPLLTDEMIAQYTSALLAGTITSGWTFGAGAALQIPFAMQMAYRFNGIGVTQNVLYENQKLIANQFNSAIGKIQDSLSSTASALGKLQDVVNQNAQALNTLVKQLSSNFGAISSVLNDILSRLDKVEAEVQIDRLITGRLQSLQTYVTQQLIRAAEIRASANLAATKMSECVLGQSKRVDFCGKGYHLMSFPQSAPHGVVFLHVTYVPAQEKNFTTAPAICHDGKAHFPREGVFVSNGTHWFVTQRNFCEPQIITTDNTFVSGNCDVVIGIVNNTVYDPLQPELDSGGSGYIPEAPRDGQAYVRKDGEWVLLSTFL

SEQ ID NO: 10100 - protein, 1177 aa, Artificial Sequence
  SARS-CoV-2/USA/WA-UW291/2020__EPI_ISL_418076 spike protein (1-1147)(I714C_Y1110C) Foldon construct
MFVFLVLLPLVSSQCVNLTTRTQLPPAYTNSFTRGVYYPDKVFRSSVLHSTQDLFLPFFSNVTWFHAIHVSGTNGTKRFDNPVLPFNDGVYFASTEKSNIIRGWIFGTTLDSKTQSLLIVNNATNVVIKVCEFQFCNDPFLGVYYHKNNKSWMESEFRVYSSANNCTFEYVSQPFLMDLEGKQGNFKNLREFVFKNIDGYFKIYSKHTPINLVRDLPQGFSALEPLVDLPIGINITRFQTLLALHRSYLTPGDSSSGWTAGAAAYYVGYLQPRTFLLKYNENGTITDAVDCALDPLSETKCTLKSFTVEKGIYQTSNFRVQPTESIVRFPNITNLCPFGEVFNATRFASVYAWNRKRISNCVADYSVLYNSASFSTFKCYGVSPTKLNDLCFTNVYADSFVIRGDEVRQIAPGQTGKIADYNYKLPDDFTGCVIAWNSNNLDSKVGGNYNYLYRLFRKSNLKPFERDISTEIYQAGSTPCNGVEGFNCYFPLQSYGFQPTNGVGYQPYRVVVLSFELLHAPATVCGPKKSTNLVKNKCVNFNFNGLTGTGVLTESNKKFLPFQQFGRDIADTTDAVRDPQTLEILDITPCSFGGVSVITPGTNTSNQVAVLYQGVNCTEVPVAIHADQLTPTWRVYSTGSNVFQTRAGCLIGAEHVNNSYECDIPIGAGICASYQTQTNSPRRARSVASQSIIAYTMSLGAENSVAYSNNSIACPTNFTISVTTEILPVSMTKTSVDCTMYICGDSTECSNLLLQYGSFCTQLNRALTGIAVEQDKNTQEVFAQVKQIYKTPPIKDFGGFNFSQILPDPSKPSKRSFIEDLLFNKVTLADAGFIKQYGDCLGDIAARDLICAQKFNGLTVLPPLLTDEMIAQYTSALLAGTITSGWTFGAGAALQIPFAMQMAYRFNGIGVTQNVLYENQKLIANQFNSAIGKIQYSLSSTASALGKLQDVVNQNAQALNTLVKQLSSNFGAISSVLNDILSRLDKVEAEVQIDRLITGRLQSLQTYVTQQLIRAAEIRASANLAATKMSECVLGQSKRVDFCGKGYHLMSFPQSAPHGVVFLHVTYVPAQEKNFTTAPAICHDGKAHFPREGVFVSNGTHWFVTQRNFCEPQIITTDNTFVSGNCDVVIGIVNNTVYDPLQPELDSGGSGYIPEAPRDGQAYVRKDGEWVLLSTFL

SEQ ID NO: 10101 - protein, 1177 aa, Artificial Sequence; identical to SEQ ID NO: 10064
  SARS-CoV-2/Portugal/PT0034/2020__EPI_ISL_418019 spike protein (1-1147)(I714C_Y1110C) Foldon construct

SEQ ID NO: 10102 - protein, 1177 aa, Artificial Sequence; identical to SEQ ID NO: 10056
  SARS-CoV-2/Iceland/202/2020__EPI_ISL_417750 spike protein (1-1147)(I714C_Y1110C) Foldon construct

SEQ ID NO: 10103 - protein, 1177 aa, Artificial Sequence
  SARS-CoV-2/USA/WA-UW261/2020__EPI_ISL_418046 spike protein (1-1147)(I714C_Y1110C) Foldon construct
MFVFLVLLPLVSSQCVNLTTRTQLPPAYTNSFTRGVYYPDKVFRSSVLHSTQDLFLPFFSNVTWFHAIHVSGTNGTKRFDNPVLPFNDGVYFASTEKSNIIRGWIFGTTLDSKTQSLLIVNNATNVVIKVCEFQFCNDPFLGVYYHKNNKSWMESEFRVYSSANNCTFEYVSQPFLMDLEGKQGNFKNLREFVFKNIDGYFKIYSKHTPINLVRDLPQGFSALEPLVDLPIGINITRFQTLLALHRSYLTPGDSSSGWTAGAAAYYVGYLQPRTFLLKYNENGTITDAVDCALDPLSETKCTLKSFTVEKGIYQTSNFRVQPTESIVRFPNITNLCPFGEVFNATRFTSVYAWNRKRISNCVADYSVLYNSASFSTFKCYGVSPTKLNDLCFTNVYADSFVIRGDEVRQIAPGQTGKIADYNYKLPDDFTGCVIAWNSNNLDSKVGGNYNYLYRLFRKSNLKPFERDISTEIYQAGSTPCNGVEGFNCYFPLQSYGFQPTNGVGYQPYRVVVLSFELLHAPATVCGPKKSTNLVKNKCVNFNFNGLTGTGVLTESNKKFLPFQQFGRDIADTTDAVRDPQTLEILDITPCSFGGVSVITPGTNTSNQVAVLYQDVNCTEVPVAIHADQLTPTWRVYSTGSNVFQTRAGCLIGAEHVNNSYECDIPIGAGICASYQTQTNSPRRARSVASQSIIAYTMSLGAENSVAYSNNSIACPTNFTISVTTEILPVSMTKTSVDCTMYICGDSTECSNLLLQYGSFCTQLNRALTGIAVEQDKNTQEVFAQVKQIYKTPPIKDFGGFNFSQILPDPSKPSKRSFIEDLLFNKVTLADAGFIKQYGDCLGDIAARDLICAQKFNGLTVLPPLLTDEMIAQYTSALLAGTITSGWTFGAGAALQIPFAMQMAYRFNGIGVTQNVLYENQKLIANQFNSAIGKIQDSLSSTASALGKLQDVVNQNAQALNTLVKQLSSNFGAISSVLNDILSRLDKVEAEVQIDRLITGRLQSLQTYVTQQLIRAAEIRASANLAATKMSECVLGQSKRVDFCGKGYHLMSFPQSAPHGVVFLHVTYVPAQEKNFTTAPAICHDGKAHFPREGVFVSNGTHWFVTQRNFCEPQIITTDNTFVSGNCDVVIGIVNNTVYDPLQPELDSGGSGYIPEAPRDGQAYVRKDGEWVLLSTFL

SEQ ID NO: 10104 - protein, 1177 aa, Artificial Sequence
  SARS-CoV-2/Portugal/PT0035/2020__EPI_ISL_418020 spike protein (1-1147)(I714C_Y1110C) Foldon construct
MFVFLVLLPLVSSQCVNLTTRTQLPPAYTNSFTRGVYYPDKVFRSSVLHSTQDLFLPFFSNVTWFHAIHVSGTNGTKRFDNPVLPFNDGVYFASTEKSNIIRGWIFGTTLDSKTQSLLIVNNATNVVIKVCEFQFCNDPFLGVYYHKNNKSWMESEFRVYSSANNCTFEYVSQPFLMDLEGKQGNFKNLREFVFKNIDGYFKIYSKHTPINLVRDLPQGFSALEPLVDLPIGINITRFQTLLALHRSYLTPGDSSSGWTAGAAAYYVGYLQPRTFLLKYNENGTITDAVDCALDPLSETKCTLKSFTVEKGIYQTSNFRVQPTESIVRFPNITNLCPFGEVFNATRFASVYAWNRKRISNCVADYSVLYNSASFSTFKCYGVSPTKLNDLCFTNVYADSFVIRGDEVRQIAPGQTGKIADYNYKLPDDFTGCVIAWNSNNLDSKVGGNYNYLYRLFRKSNLKPFERDISTEIYQAGSTPCNGVEGFNCYFPLQSYGFQPTNGVGYQPYRVVVLSFELLHAPATVCGPKKSTNLVKNKCVNFNFNGLTGTGVLTESNKKFLPFQQFGRDIADTTDAVRDPQTLEILDITPCSFGGVSVITPGTNTSNQVAVLYQDVNCTEVPVAIHADQLTPTWRVYSTGSNVFQTRAGCLIGAEHVNNSYECDIPIGAGICASYQTQTNSPRRARSVASQSIIAYTMSLGAENSVAYSNNSIACPTNFTISVTTEILPVSMTKTSVDCTMYICGDSTECSNLLLQYGSFCTQLNRALTGIAVEQDKNTQEVFAQVKQIYKTPPIKDFGGFNFSQILPDPSKPSKRSFIEDLLFNKVTLADAGFIKQYGDCLGDISARDLICAQKFNGLTVLPPLLTDEMIAQYTSALLAGTITSGWTFGAGAALQIPFAMQMAYRFNGIGVTQNVLYENQKLIANQFNSAIGKIQDSLSSTASALGKLQDVVNQNAQALNTLVKQLSSNFGAISSVLNDILSRLDKVEAEVQIDRLITGRLQSLQTYVTQQLIRAAEIRASANLAATKMSECVLGQSKRVDFCGKGYHLMSFPQSAPHGVVFLHVTYVPAQEKNFTTAPAICHDGKAHFPREGVFVSNGTHWFVTQRNFCEPQIITTDNTFVSGNCDVVIGIVNNTVYDPLQPELDSGGSGYIPEAPRDGQAYVRKDGEWVLLSTFL

SEQ ID NO: 10105 - protein, 1177 aa, Artificial Sequence
  SARS-CoV-2/USA/NY-NYUMC7/2020__EPI_ISL_418192 spike protein (1-1147)(I714C_Y1110C) Foldon construct
MFVFLVLLPLVSSQCVNLTTRTQLPPAYTNSFTRGVYYPDKVFRSSVLHSTQDLFLPFFSNVTWFHAIHVSGTNGTKRFDNPVLPFNDGVYFASTEKSNIIRGWIFGTTLDSKTQSLLIVNNATNVVIKVCEFQFCNDPFLGVYHHKNNKSWMESEFRVYSSANNCTFEYVSQPFLMDLEGKQGNFKNLREFVFKNIDGYFKIYSKHTPINLVRDLPQGFSALEPLVDLPIGINITRFQTLLALHRSYLTPGDSSSGWTAGAAAYYVGYLQPRTFLLKYNENGTITDAVDCALDPLSETKCTLKSFTVEKGIYQTSNFRVQPTESIVRFPNITNLCPFGEVFNATRFASVYAWNRKRISNCVADYSVLYNSASFSTFKCYGVSPTKLNDLCFTNVYADSFVIRGDEVRQIAPGQTGKIADYNYKLPDDFTGCVIAWNSNNLDSKVGGNYNYLYRLFRKSNLKPFERDISTEIYQAGSTPCNGVEGFNCYFPLQSYGFQPTNGVGYQPYRVVVLSFELLHAPATVCGPKKSTNLVKNKCVNFNFNGLTGTGVLTESNKKFLPFQQFGRDIADTTDAVRDPQTLEILDITPCSFGGVSVITPGTNTSNQVAVLYQGVNCTEVPVAIHADQLTPTWRVYSTGSNVFQTRAGCLIGAEHVNNSYECDIPIGAGICASYQTQTNSPRRARSVASQSIIAYTMSLGAENSVAYSNNSIACPTNFTISVTTEILPVSMTKTSVDCTMYICGDSTECSNLLLQYGSFCTQLNRALTGIAVEQDKNTQEVFAQVKQIYKTPPIKDFGGFNFSQILPDPSKPSKRSFIEDLLFNKVTLADAGFIKQYGDCLGDIAARDLICAQKFNGLTVLPPLLTDEMIAQYTSALLAGTITSGWTFGAGAALQIPFAMQMAYRFNGIGVTQNVLYENQKLIANQFNSAIGKIQDSLSSTASALGKLQDVVNQNAQALNTLVKQLSSNFGAISSVLNDILSRLDKVEAEVQIDRLITGRLQSLQTYVTQQLIRAAEIRASANLAATKMSECVLGQSKRVDFCGKGYHLMSFPQSAPHGVVFLHVTYVPAQEKNFTTAPAICHDGKAHFPREGVFVSNGTHWFVTQRNFCEPQIITTDNTFVSGNCDVVIGIVNNTVYDPLQPELDSGGSGYIPEAPRDGQAYVRKDGEWVLLSTFL

SEQ ID NO: 10106 - protein, 1177 aa, Artificial Sequence
  SARS-CoV-2/Iceland/189/2020__EPI_ISL_417709 spike protein (1-1147)(I714C_Y1110C) Foldon construct
MFVFLVLLPLVSSQCVNLTTRTQLPPAYTNSFTRGVYYPDKVFRSSVLHSTQDLFLPFFSNVTWFHAIHVSGTNGTKRFDNPVLPFNDGVYFASTEKSNIIRGWIFGTTLDSKTQSLLIVNNATNVVIKVCEFQFCNDPFLGVYYHKNNKSWMESEFRVYSSANNCTFEYVSQPFLMDLEGKQGNFKNLREFVFKNIDGYFKIYSKHTPINLVRDLPQGFSALEPLVDLPIGINITRFQTLLALHRSYLTPGDSSSGWTAGAAAYYVGYLQPRTFLLKYNENGTITDAVDCALDPLSETKCTLKSFTVEKGIYQTSNFRVQPTESIVRFPNITNLCPFGEVFNATRFASVYAWNRKRISNCVADYSVLYNSASFSTFKCYGVSPTKLNDLCFTNVYADSFVIRGDEVRQIAPGQTGKIADYNYKLPDDFTGCVIAWNSNNLDSKVGGNYNYLYRLFRKSNLKPFERDISTEIYQAGSTPCNGVEGFNCYFPLQSYGFQPTNGVGYQPYRVVVLSFELLHAPATVCGPKKSTNLVKNKCVNFNFNGLTGTGVLTESNKKFLPFQQFGRDIADTTDAVRDPQTLEILDITPCSFGGVSVITPGTNTSNQVAVLYQGVNCTEVPVAIHADQLTPTWRVYSTGSNVFQTRAGCLIGAEHVNNSYECDIPIGAGICASYQTQTNSPRRARSVASQSIIAYTMSLGAENSVAYSNNSIACPTNFTISVTTEILPVSMTKTSVDCTMYICGDSTECSNLLLQYGSFCTQLNRALTGIAVEQDKNTQEVFAQVKQIYKTPPIKDFGGFNFSQILPDPSKPSKRSFIEDLLFNKVTLADAGFTKQYGDCLGDIAARDLICAQKFNGLTVLPPLLTDEMIAQYTSALLAGTITSGWTFGAGAALQIPFAMQMAYRFNGIGVTQNVLYENQKLIANQFNSAIGKIQDSLSSTASALGKLQDVVNQNAQALNTLVKQLSSNFGAISSVLNDILSRLDKVEAEVQIDRLITGRLQSLQTYVTQQLIRAAEIRASANLAATKMSECVLGQSKRVDFCGKGYHLMSFPQSAPHGVVFLHVTYVPAQEKNFTTAPAICHDGKAHFPREGVFVSNGTHWFVTQRNFCEPQIITTDNTFVSGNCDVVIGIVNNTVYDPLQPELDSGGSGYIPEAPRDGQAYVRKDGEWVLLSTFL

SEQ ID NO: 10107 - protein, 1177 aa, Artificial Sequence
  SARS-CoV-2/Australia/NSW56/2020__EPI_ISL_417408 spike protein (1-1147)(I714C_Y1110C) Foldon construct
MFVFLVLLPLVSSQCVNLTTRTQLPPAYTNSFTRGVYYPDKVFRSSVLHSTQDLFLPFFSNVTWFHAIHVSGTNGTKRFDNPVLPFNDGVYFASTEKSNIIRGWIFGTTLDSKTQSLLIVNNATNVVIKVCEFQFCNDPFLGVYYHKNNKSWMESEFRVYSSANNCTFEYVSQPFLMDLEGKQGNFKNLREFVFKNIDGYFKIYSKHTPINLVRDLPQGFSALEPLVDLPIGINITRFQTLLALHRSYLTPGDSSSGWTAGAAAYYVGYLQPRTFLLKYNENGTITDAVDCALDPLSETKCTLKSFTVEKGIYQTSNFRVQPTESIVRFPNITNLCPFGEVFNATRFASVYAWNRKRISNCVADYSVLYNSASFSTFKCYGVSPTKLNDLCFTNVYADSFVIRGDEVRQIAPGQTGKIADYNYKLPDDFTGCVIAWNSNNLDSKVGGNYNYLYRLFRKSNLKPFERDISTEIYQAGSTPCNGVEGFNCYFPLQSYGFQPTNGVGYQPYRVVVLSFELLHAPATVCGPKKSTNLVKNKCVNFNFNGLTGTGVLTESNKKFLPFQQFGRDIADTTDAVRDPQTLEILDITPCSFGGVSVITPGTNTSNQVAVLYQDVNCTEVPVAIHADQLTPTWRVYSTGSNVFQTRAGCLIGAEHVNNSYECDIPIGAGICASYQTQTNSPRRARSVASQSIIAYTMSLGAENSVAYSNNSIACPTNFTISVTTEILPVSMTKTSVDCTMYICGDSTECSNLLLQYGSFCTQLNRALTGIAVEQDKNTQEVFAQVKQIYKTPPIKDFGGFNFSQILPDSSKPSKRSFIEDLLFNKVTLADAGFIKQYGDCLGDIAARDLICAQKFNGLTVLPPLLTDEMIAQYTSALLAGTITSGWTFGAGAALQIPFAMQMAYRFNGIGVTQNVLYENQKLIANQFNSAIGKIQDSLSSTASALGKLQDVVNQNAQALNTLVKQLSSNFGAISSVLNDILSRLDKVEAEVQIDRLITGRLQSLQTYVTQQLIRAAEIRASANLAATKMSECVLGQSKRVDFCGKGYHLMSFPQSAPHGVVFLHVTYVPAQEKNFTTAPAICHDGKAHFPREGVFVSNGTHWFVTQRNFCEPQIITTDNTFVSGNCDVVIGIVNNTVYDPLQPELDSGGSGYIPEAPRDGQAYVRKDGEWVLLSTFL

SEQ ID NO: 10108 - protein, 1177 aa, Artificial Sequence
  SARS-CoV-2/Iceland/280/2020__EPI_ISL_417608 spike protein (1-1147)(I714C_Y1110C) Foldon construct
MFVFLVLLPLVSSQCVNLTTRTQLPPAYTNSFTRGVYYPDKVFRSSVLHSTQDLFLPFFSNVTWFHAIHVSGTNGTKRFDNPVLPFNDGVYFASTEKSNIIRGWIFGTTLDSKTQSLLIVNNATNVVIKVCEFQFCNDPFLGVYYHKNNKSWMESEFRVYSSANNCTFEYVSQPFLMDLEGKQGNFKNLREFVFKNIDGYFKIYSKHTPINLVRDLPQGFSALEPLVDLPIGINITRFQTLLALHRSYLTPGDSSSGWTAGAAAYYVGYLQPRTFLLKYNENGTITDAVDCALDPLSETKCTLKSFTVEKGIYQTSNFRVQPTESIVRFPNITNLCPFGEVFNATRFASVYAWNRKRISNCVADYSVLYNSASFSTFKCYGVSPTKLNDLCFTNVYADSFVIRGDEVRQIAPGQTGKIADYNYKLPDDFTGCVIAWNSNNLDSKVGGNYNYLYRLFRKSNLKPFERDISTEIYQAGSTPCNGVEGFNCYFPLQSYGFQPTNGVGYQPYRVVVLSFELLHAPATVCGPKKSTNLVKNKCVNFNFNGLTGTGVLTESNKKFLPFQQFGRDIADTTDAVRDPQTLEILDITPCSFGGVSVITPGTNTSNQVAVLYQGVNCTEVPVAIHADQLTPTWRVYSTGSNVFQTRAGCLIGAEHVNNSYECDIPIGAGICASYHTQTNSPRRARSVASQSIIAYTMSLGAENSVAYSNNSIACPTNFTISVTTEILPVSMTKTSVDCTMYICGDSTECSNLLLQYGSFCTQLNRALTGIAVEQDKNTQEVFAQVKQIYKTPPIKDFGGFNFSQILPDPSKPSKRSFIEDLLFNKVTLADAGFIKQYGDCLGDIAARDLICAQKFNGLTVLPPLLTDEMIAQYTSALLAGTITSGWTFGAGAALQIPFAMQMAYRFNGIGVTQNVLYENQKLIANQFNSAIGKIQDSLSSTASALGKLQDVVNQNAQALNTLVKQLSSNFGAISSVLNDILSRLDKVEAEVQIDRLITGRLQSLQTYVTQQLIRAAEIRASANLAATKMSECVLGQSKRVDFCGKGYHLMSFPQSAPHGVVFLHVTYVPAQEKNFTTAPAICHDGKAHFPREGVFVSNGTHWFVTQRNFCEPQIITTDNTFVSGNCDVVIGIVNNTVYDPLQPELDSGGSGYIPEAPRDGQAYVRKDGEWVLLSTFL

SEQ ID NO: 10109 - protein, 1177 aa, Artificial Sequence; identical to SEQ ID NO: 10064
  SARS-CoV-2/Iceland/247/2020__EPI_ISL_417575 spike protein (1-1147)(I714C_Y1110C) Foldon construct

SEQ ID NO: 10110 - protein, 1177 aa, Artificial Sequence
  SARS-CoV-2/Iceland/238/2020__EPI_ISL_417566 spike protein (1-1147)(I714C_Y1110C) Foldon construct
MFVFLVLLPLVSSQCVNLTTRTQLPPAYTNSFTRGVYYPDKVFRSSVLHSTQDLFLPFFSNVTWFHAIHVSGTNGTKRFDNPVLPFNDGVYFASTEKSNIIRGWIFGTTLDSKTQSLLIVNNATNVVIKVCEFQFCNDPFLGVYYHKNNKSWMESEFRVYSSANNCTFEYVSQPFLMDLEGKQGNFKNLREFVFKNIDGYFKIYSKHTPINLVRDLPQGFSALEPLVDLPIGINITRFQTLLALHRSYLTPGDSSSGWTAGAAAYYVGYLQPRTFLLKYNENGTITDAVDCALDPLSETKCTLKSFTVEKGIYQTSNFRVQPTESIVRFPNITNLCPFGEVFNATRFASVYAWNRKRISNCVADYSVLYNSASFSTFKCYGVSPTKLNDLCFTNVYADSFVIRGDEVRQIAPGQTGKIADYNYKLPDDFTGCVIAWNSNNLDSKVGGNYNYLYRLFRKSNLKPFERDISTEIYQAGSTPCNGVEGFNCYFPLQSYGFQPTNGVGYQPYRVVVLSFELLHAPATVCGPKKSTNLVKNKCVNFNFNGLTGTGVLTESNKKFLPFQQFGRDIADTTDAVRDPQTLEILDITPCSFGGVSVITPGTNTSNQVAVLYQGVNCTEVPVAIHADQLTPTWRVYSTGSNVFQTRAGCLIGAEHVNNSYECDIPIGAGICASYQTQTNSPRRARSVASQSIIAYTMSLGAENSVAYSNNSIACPTNFTISVTTEILPVSMTKTSVDCTMYICGDSTECSNLLLQYGSFCTQLNRALTGIAVEQDKNTQEVFAQVKQIYKTPPIKDFGGFNFSQILPDPSKPSKRSFIEDLLFNKVTLADVGFIKQYGDCLGDIAARDLICAQKFNGLTVLPPLLTDEMIAQYTSALLAGTITSGWTFGAGAALQIPFAMQMAYRFNGIGVTQNVLYENQKLIANQFNSAIGKIQDSLSSTASALGKLQDVVNQNAQALNTLVKQLSSNFGAISSVLNDILSRLDKVEAEVQIDRLITGRLQSLQTYVTQQLIRAAEIRASANLAATKMSECVLGQSKRVDFCGKGYHLMSFPQSAPHGVVFLHVTYVPAQEKNFTTAPAICHDGKAHFPREGVFVSNGTHWFVTQRNFCEPQIITTDNTFVSGNCDVVIGIVNNTVYDPLQPELDSGGSGYIPEAPRDGQAYVRKDGEWVLLSTFL

SEQ ID NO: 10111 - protein, 1177 aa, Artificial Sequence
  SARS-CoV-2/Greece/16/2020__EPI_ISL_418265 spike protein (1-1147)(I714C_Y1110C) Foldon construct
MFVFLVLLPLVSSQCVNLTTRTQLPPAYTNSFTRGVYYPDKVFRSSVLHSTQDLFLPFFSNVTWFHAIHVSGTNGTKRFDNPVLPFNDGVYFASTEKSNIIRGWIFGTTLDSKTQSLLIVNNATNVVIKVCEFQFCNDPFLGVYYHKNNKSWMESEFRVYSSANNCTFEYVSQPFLMDLEGKQGNFKNLREFVFKNVDGYFKIYSKHTPINLVRDLPQGFSALEPLVDLPIGINITRFQTLLALHRSYLTPGDSSSGWTAGAAAYYVGYLQPRTFLLKYNENGTITDAVDCALDPLSETKCTLKSFTVEKGIYQTSNFRVQPTESIVRFPNITNLCPFGEVFNATRFASVYAWNRKRISNCVADYSVLYNSASFSTFKCYGVSPTKLNDLCFTNVYADSFVIRGDEVRQIAPGQTGKIADYNYKLPDDFTGCVIAWNSNNLDSKVGGNYNYLYRLFRKSNLKPFERDISTEIYQAGSTPCNGVEGFNCYFPLQSYGFQPTNGVGYQPYRVVVLSFELLHAPATVCGPKKSTNLVKNKCVNFNFNGLTGTGVLTESNKKFLPFQQFGRDIADTTDAVRDPQTLEILDITPCSFGGVSVITPGTNTSNQVAVLYQDVNCTEVPVAIHADQLTPTWRVYSTGSNVFQTRAGCLIGAEHVNNSYECDIPIGAGICASYQTQTNSPRRARSVASQSIIAYTMSLGAENSVAYSNNSIACPTNFTISVTTEILPVSMTKTSVDCTMYICGDSTECSNLLLQYGSFCTQLNRALTGIAVEQDKNTQEVFAQVKQIYKTPPIKDFGGFNFSQILPDPSKPSKRSFIEDLLFNKVTLADAGFIKQYGDCLGDIAARDLICAQKFNGLTVLPPLLTDEMIAQYTSALLAGTITSGWTFGAGAALQIPFAMQMAYRFNGIGVTQNVLYENQKLIANQFNSAIGKIQDSLSSTASALGKLQDVVNQNAQALNTLVKQLSSNFGAISSVLNDILSRLDKVEAEVQIDRLITGRLQSLQTYVTQQLIRAAEIRASANLAATKMSECVLGQSKRVDFCGKGYHLMSFPQSAPHGVVFLHVTYVPAQEKNFTTAPAICHDGKAHFPREGVFVSNGTHWFVTQRNFCEPQIITTDNTFVSGNCDVVIGIVNNTVYDPLQPELDSGGSGYIPEAPRDGQAYVRKDGEWVLLSTFL

SEQ ID NO: 10112 - protein, 1177 aa, Artificial Sequence
  SARS-CoV-2/Iceland/319/2020__EPI_ISL_417648 spike protein (1-1147)(I714C_Y1110C) Foldon construct
MFVFLVLLPLVSSQCVNLTTRTQLPPAYTNSFTRGVYYPDKVFRSSVLHSTQDLFLPFFSNVTWFHAIHVSGTNGTKRFDNPVLPFNDGVYFASTEKSNIIRGWIFGTTLDSKTQSLLIVNNATNVVIKVCEFQFCNDPFLGVYYHKNNKSWMESEFRVYSSANNCTFEYVSQPFLIDLEGKQGNFKNLREFVFKNIDGYFKIYSKHTPINLVRDLPQGFSALEPLVDLPIGINITRFQTLLALHRSYLTPGDSSSGWTAGAAAYYVGYLQPRTFLLKYNENGTITDAVDCALDPLSETKCTLKSFTVEKGIYQTSNFRVQPTESIVRFPNITNLCPFGEVFNATRFASVYAWNRKRISNCVADYSVLYNSASFSTFKCYGVSPTKLNDLCFTNVYADSFVIRGDEVRQIAPGQTGKIADYNYKLPDDFTGCVIAWNSNNLDSKVGGNYNYLYRLFRKSNLKPFERDISTEIYQAGSTPCNGVEGFNCYFPLQSYGFQPTNGVGYQPYRVVVLSFELLHAPATVCGPKKSTNLVKNKCVNFNFNGLTGTGVLTESNKKFLPFQQFGRDIADTTDAVRDPQTLEILDITPCSFGGVSVITPGTNTSNQVAVLYQGVNCTEVPVAIHADQLTPTWRVYSTGSNVFQTRAGCLIGAEHVNNSYECDIPIGAGICASYQTQTNSPRRARSVASQSIIAYTMSLGAENSVAYSNNSIACPTNFTISVTTEILPVSMTKTSVDCTMYICGDSTECSNLLLQYGSFCTQLNRALTGIAVEQDKNTQEVFAQVKQIYKTPPIKDFGGFNFSQILPDPSKPSKRSFIEDLLFNKVTLADAGFIKQYGDCLGDIAARDLICAQKFNGLTVLPPLLTDEMIAQYTSALLAGTITSGWTFGAGAALQIPFAMQMAYRFNGIGVTQNVLYENQKLIANQFNSAIGKIQDSLSSTASALGKLQDVVNQNAQALNTLVKQLSSNFGAISSVLNDILSRLDKVEAEVQIDRLITGRLQSLQTYVTQQLIRAAEIRASANLAATKMSECVLGQSKRVDFCGKGYHLMSFPQSAPHGVVFLHVTYVPAQEKNFTTAPAICHDGKAHFPREGVFVSNGTHWFVTQRNFCEPQIITTDNTFVSGNCDVVIGIVNNTVYDPLQPELDSGGSGYIPEAPRDGQAYVRKDGEWVLLSTFL

SEQ ID NO: 10113 - protein, 1177 aa, Artificial Sequence
  SARS-CoV-2/Congo/94/2020__EPI_ISL_417947 spike protein (1-1147)(I714C_Y1110C) Foldon construct
MFVFLVLLPLVSSQCVNLTTRTQLPPAYTNSFTRGVYYPDKVFRSSVLHSTQDLFLPFFSNVTWFHAIHVSGTNGTKRFDNPVLPFNDGVYFASTEKSNIIRGWIFGTTLDSKTQSLLIVNNATNVVIKVCEFQFCNDPFLGVYYHKNNKSWMESEFRVYSSANNCTFEYVSQPFLMDLEGKQGNFKNLREFVFKNIDGYFKIYSKHTPINLVRDLPQGFSALEPLVDLPIGINITRFQTLLALHRSYLTPGDSSSGWTAGAAAYYVGYLQPRTFLLKYNENGTITDAVDCALDPLSETKCTLKSFTVEKGIYQTSNFRVQPTESIVRFPNITNLCPFGEVFNATRFASVYAWNRKRISNCVADYSVLYNSASFSTFKCYGVSPTKLNDLCFTNVYADSFVIRGDEVRQIAPGQTGKIADYNYKLPDDFTGCVIAWNSNNLDSKVGGNYNYLYRLFRKSNLKPFERDISTEIYQAGSTPCNGVEGFNCYFPLQSYGFQPTNGVGYQPYRVVVLSFELLHAPATVCGPKKSTNLVKNKCVNFNFNGLTGTGVLTESNKKFLPFQQFGRDIADTTDAVRDPQTLEILDITPCSFGGVSVITPGTNTSNQVAVLYQGVNCTEVPVAIHADQLTPTWRVYSTGSNVFQTRAGCLIGAEHVNNSYECDIPIGAGICASYQTQTNSPRRARSVASQSIIAYTMSLGAENSVAYSNNSIACPTNFTISVTTEILPVSMTKTSVDCTMYICGDSTECSNLLLQYGSFCTQLNRALTGIAVEQDKNTQEVFAQVKQIYKTPPIKDFGGFNFSQILPDPSKPSKRSFIEDILFNKVTLADAGFIKQYGDCLGDIAARDLICAQKFNGLTVLPPLLTDEMIAQYTSALLAGTITSGWTFGAGAALQIPFAMQMAYRFNGIGVTQNVLYENQKLIANQFNSAIGKIQDSLSSTASALGKLQDVVNQNAQALNTLVKQLSSNFGAISSVLNDILSRLDKVEAEVQIDRLITGRLQSLQTYVTQQLIRAAEIRASANLAATKMSECVLGQSKRVDFCGKGYHLMSFPQSAPHGVVFLHVTYVPAQEKNFTTAPAICHDGKAHFPREGVFVSNGTHWFVTQRNFCEPQIITTDNTFVSGNCDVVIGIVNNTVYDPLQPELDSGGSGYIPEAPRDGQAYVRKDGEWVLLSTFL

SEQ ID NO: 10114 - protein, 1177 aa, Artificial Sequence
  SARS-CoV-2/Congo/158/2020__EPI_ISL_417950 spike protein (1-1147)(I714C_Y1110C) Foldon construct
MFVFLVLLPLVSSQCVNLTTRTQLPPAYTNSFTRGVYYPDKVFRSSVLHSTQDLFLPFFSNVTWFHAIHVSGTNGTKRFDNPVLPFNDGVYFASTEKSNIIRGWIFGTTLDSKTQSLLIVNNATNVVIKVCEFQFCNDPFLGVYYHKNNKSWMESEFRVYSSANNCTFEYVSQPFLMDLEGKQGNFKNLREFVFKNIDGYFKIYSKHTPINLVRDLPQGFSALEPLVDLPIGINITRFQTLLALHRSYLTPGDSSSGWTAGAAAYYVGYLQPRTFLLKYNENGTITDAVDCALDPLSETKCTLKSFTVEKGIYQTSNFRVQPTESIVRFPNITNLCPFGEVFNATRFASVYAWNRKRISNCVADYSVLYNSASFSTFKCYGVSPTKLNDLCFTNVYADSFVIRGDEVRQIAPGQTGKIADYNYKLPDDFTGCVIAWNSNNLDSKVGGNYNYLYRLFRKSNLKPFERDISTEIYQAGSTPCNGVEGFNCYFPLQSYGFQPTNGVGYQPYRVVVLSFELLHAPATVCGPKKSTNLVKNKCVNFNFNGLTGTGVLTESNKKFLPFQQFGRDIADTTDAVRDPQTLEILDITPCSFGGVSVITPGTNTSNQVAVLYQDVNCTEVPVAIHADQLTPTWRVYSTGSNVFQTRAGCLIGAEHVNNSYECDIPIGAGICASYQTQTNSPRRARSVASQSIIAYTMSLGAENSVAYSNNSIACPTNFTISVTTEILPVSMTKTSVDCTMYICGDSTECSNLLLQYGSFCTQLNRALTGIAVEQDKNTQEVFAQVKQIYKTPPIKDFGGFNFSQILPDPSKPSKRSFIEDLLFNKVTLADAGFIKQYGDCLGDIAARDLICAQKFNGLTVLPPLLTDEMIAQYTSALLAGTITSGWTFGAGAALQIPFAMQMAYRFNGIGVTQNVLYENQKLIANQFNSAIGKIQDSLSSTASALGKLQDVVNQNAQALNTLVKQLSSNFGAISSVLNDILSRLDKVEAEVQIDRLITGRLQSLQTYVTQQLIRAAEIRASANLAATKMSECVLGQSKRVDFCGKGYHLMSFPQSAPHGVVFLHVTYVPAQEKNFTTAPAICHDGKAHFPREGVFVSNGTHWFVTQRNFCEPQIITTDNTFLSGNCDVVIGIVNNTVYDPLQPELDSGGSGYIPEAPRDGQAYVRKDGEWVLLSTFL

SEQ ID NO: 10115 - protein, 1177 aa, Artificial Sequence
  SARS-CoV-2/USA/UT-00034/2020__EPI_ISL_417977 spike protein (1-1147)(I714C_Y1110C) Foldon construct
MFVFLVLLPLVSSQCVNLTTRTQLPPAYTNSFTRGVYYPDKVFRSSVLHSTQDLFLPFFSNVTWFHAIHVSGTNGTKRFDNPVLPFNDGVYFASTEKSNIIRGWIFGTTLDSKTQSLLIVNNATNVVIKVCEFQFCNDPFLGVYYYKNNKSWMESEFRVYSSANNCTFEYVSQPFLMDLEGKQGNFKNLREFVFKNIDGYFKIYSKHTPINLVRDLPQGFSALEPLVDLPIGINITRFQTLLALHRSYLTPGDSSSGWTAGAAAYYVGYLQPRTFLLKYNENGTITDAVDCALDPLSETKCTLKSFTVEKGIYQTSNFRVQPTESIVRFPNITNLCPFGEVFNATRFASVYAWNRKRISNCVADYSVLYNSASFSTFKCYGVSPTKLNDLCFTNVYADSFVIRGDEVRQIAPGQTGKIADYNYKLPDDFTGCVIAWNSNNLDSKVGGNYNYLYRLFRKSNLKPFERDISTEIYQAGSTPCNGVEGFNCYFPLQSYGFQPTNGVGYQPYRVVVLSFELLHAPATVCGPKKSTNLVKNKCVNFNFNGLTGTGVLTESNKKFLPFQQFGRDIADTTDAVRDPQTLEILDITPCSFGGVSVITPGTNTSNQVAVLYQGVNCTEVPVAIHADQLTPTWRVYSTGSNVFQTRAGCLIGAEHVNNSYECDIPIGAGICASYQTQTNSPRRARSVASQSIIAYTMSLGAENSVAYSNNSIACPTNFTISVTTEILPVSMTKTSVDCTMYICGDSTECSNLLLQYGSFCTQLNRALTGIAVEQDKNTQEVFAQVKQIYKTPPIKDFGGFNFSQILPDPSKPSKRSFIEDLLFNKVTLADAGFIKQYGDCLGDIAARDLICAQKFNGLTVLPPLLTDEMIAQYTSALLAGTITSGWTFGAGAALQIPFAMQMAYRFNGIGVTQNVLYENQKLIANQFNSAIGKIQDSLSSTASALGKLQDVVNQNAQALNTLVKQLSSNFGAISSVLNDILSRLDKVEAEVQIDRLITGRLQSLQTYVTQQLIRAAEIRASANLAATKMSECVLGQSKRVDFCGKGYHLMSFPQSAPHGVVFLHVTYVPAQEKNFTTAPAICHDGKAHFPREGVFVSNGTHWFVTQRNFCEPQIITTDNTFVSGNCDVVIGIVNNTVYDPLQPELDSGGSGYIPEAPRDGQAYVRKDGEWVLLSTFL

SEQ ID NO: 10116 - protein, 1177 aa, Artificial Sequence
  SARS-CoV-2/USA/UT-00033/2020__EPI_ISL_417976 spike protein (1-1147)(I714C_Y1110C) Foldon construct
MFVFLVLLPLVSSQCVNLTTRTQLPPAYTNSFTRGVYYPDKVFRSSVLHSTQDLFLPFFSNVTWFHAIHVSGTNGTKRFDNPVLPFNDGVYFASTEKSNIIRGWIFGTTLDSKTQSLLIVNNATNVVIKVCEFQFCNDPFLGVYYHKNNKSWMESEFRVYSSANNCTFEYVSQPFLMDLEGKQGNFKNLREFVFKNIDGYFKIYSKHTPINLVRDLPQGFSALEPLVDLPIGINITRFQTLLALHRSYLTPGDSSSGLTAGAAAYYVGYLQPRTFLLKYNENGTITDAVDCALDPLSETKCTLKSFTVEKGIYQTSNFRVQPTESIVRFPNITNLCPFGEVFNATRFASVYAWNRKRISNCVADYSVLYNSASFSTFKCYGVSPTKLNDLCFTNVYADSFVIRGDEVRQIAPGQTGKIADYNYKLPDDFTGCVIAWNSNNLDSKVGGNYNYLYRLFRKSNLKPFERDISTEIYQAGSTPCNGVEGFNCYFPLQSYGFQPTNGVGYQPYRVVVLSFELLHAPATVCGPKKSTNLVKNKCVNFNFNGLTGTGVLTESNKKFLPFQQFGRDIADTTDAVRDPQTLEILDITPCSFGGVSVITPGTNTSNQVAVLYQGVNCTEVPVAIHADQLTPTWRVYSTGSNVFQTRAGCLIGAEHVNNSYECDIPIGAGICASYQTQTNSPRRARSVASQSIIAYTMSLGAENSVAYSNNSIACPTNFTISVTTEILPVSMTKTSVDCTMYICGDSTECSNLLLQYGSFCTQLNRALTGIAVEQDKNTQEVFAQVKQIYKTPPIKDFGGFNFSQILPDPSKPSKRSFIEDLLFNKVTLADAGFIKQYGDCLGDIAARDLICAQKFNGLTVLPPLLTDEMIAQYTSALLAGTITSGWTFGAGAALQIPFAMQMAYRFNGIGVTQNVLYENQKLIANQFNSAIGKIQDSLSSTASALGKLQDVVNQNAQALNTLVKQLSSNFGAISSVLNDILSRLDKVEAEVQIDRLITGRLQSLQTYVTQQLIRAAEIRASANLAATKMSECVLGQSKRVDFCGKGYHLMSFPQSAPHGVVFLHVTYVPAQEKNFTTAPAICHDGKAHFPREGVFVSNGTHWFVTQRNFCEPQIITTDNTFVSGNCDVVIGIVNNTVYDPLQPELDSGGSGYIPEAPRDGQAYVRKDGEWVLLSTFL

SEQ ID NO: 10117 - protein, 1177 aa, Artificial Sequence
  SARS-CoV-2/USA/WI-13/2020__EPI_ISL_417516 spike protein (1-1147)(I714C_Y1110C) Foldon construct
MFVFLVLLPLVSSQCVNLTTRTQLPPAYTNSFTRGVYYPDKVFRSSVLHSTQDLFLPFFSNVTWFHAIHVSGTNGTKRFDNPVLPFNDGVYFASTEKSNIIRGWIFGTTLDSKTQSLLIVNNATNVVIKVCEFQFCNDPFLGVYYHKNNKSWMESEFRVYSSANNCTFEYVSQPFLMDLEGKQGNFKNLREFVFKNIDGYFKIYSKHTPINLVRDLPQGFSALEPLVDLPIGINITRFQTLLALHRSYLTPGDSSSGWTAGAAAYYVGYLQPRTFLLKYNENGTITDAVDCALDPLSETKCTLKSFTVEKGIYQTSNFRVLPTESIVRFPNITNLCPFGEVFNATRFASVYAWNRKRISNCVADYSVLYNSASFSTFKCYGVSPTKLNDLCFTNVYADSFVIRGDEVRQIAPGQTGKIADYNYKLPDDFTGCVIAWNSNNLDSKVGGNYNYLYRLFRKSNLKPFERDISTEIYQAGSTPCNGVEGFNCYFPLQSYGFQPTNGVGYQPYRVVVLSFELLHAPATVCGPKKSTNLVKNKCVNFNFNGLTGTGVLTESNKKFLPFQQFGRDIADTTDAVRDPQTLEILDITPCSFGGVSVITPGTNTSNQVAVLYQGVNCTEVPVAIHADQLTPTWRVYSTGSNVFQTRAGCLIGAEHVNNSYECDIPIGAGICASYQTQTNSPRRARSVASQSIIAYTMSLGAENSVAYSNNSIACPTNFTISVTTEILPVSMTKTSVDCTMYICGDSTECSNLLLQYGSFCTQLNRALTGIAVEQDKNTQEVFAQVKQIYKTPPIKDFGGFNFSQILPDPSKPSKRSFIEDLLFNKVTLADAGFIKQYGDCLGDIAARDLICAQKFNGLTVLPPLLTDEMIAQYTSALLAGTITSGWTFGAGAALQIPFAMQMAYRFNGIGVTQNVLYENQKLIANQFNSAIGKIQDSLSSTASALGKLQDVVNQNAQALNTLVKQLSSNFGAISSVLNDILSRLDKVEAEVQIDRLITGRLQSLQTYVTQQLIRAAEIRASANLAATKMSECVLGQSKRVDFCGKGYHLMSFPQSAPHGVVFLHVTYVPAQEKNFTTAPAICHDGKAHFPREGVFVSNGTHWFVTQRNFCEPQIITTDNTFVSGNCDVVIGIVNNTVYDPLQPELDSGGSGYIPEAPRDGQAYVRKDGEWVLLSTFL

SEQ ID NO: 10118 - protein, 1176 aa, Artificial Sequence
  SARS-CoV-2/India/1-27/2020__EPI_ISL_413522 spike protein (1-1146)(I713C_Y1109C) Foldon construct
MFVFLVLLPLVSSQCVNLTTRTQLPPAYTNSFTRGVYYPDKVFRSSVLHSTQDLFLPFFSNVTWFHAIHVSGTNGTKRFDNPVLPFNDGVYFASTEKSNIIRGWIFGTTLDSKTQSLLIVNNATNVVIKVCEFQFCNDPFLGVYHKNNKSWMESEFRVYSSANNCTFEYVSQPFLMDLEGKQGNFKNLREFVFKNIDGYFKIYSKHTPINLVRDLPQGFSALEPLVDLPIGINITRFQTLLALHRSYLTPGDSSSGWTAGAAAYYVGYLQPRTFLLKYNENGTITDAVDCALDPLSETKCTLKSFTVEKGIYQTSNFRVQPTESIVRFPNITNLCPFGEVFNATRFASVYAWNRKRISNCVADYSVLYNSASFSTFKCYGVSPTKLNDLCFTNVYADSFVIRGDEVIQIAPGQTGKIADYNYKLPDDFTGCVIAWNSNNLDSKVGGNYNYLYRLFRKSNLKPFERDISTEIYQAGSTPCNGVEGFNCYFPLQSYGFQPTNGVGYQPYRVVVLSFELLHAPATVCGPKKSTNLVKNKCVNFNFNGLTGTGVLTESNKKFLPFQQFGRDIADTTDAVRDPQTLEILDITPCSFGGVSVITPGTNTSNQVAVLYQDVNCTEVPVAIHADQLTPTWRVYSTGSNVFQTRAGCLIGAEHVNNSYECDIPIGAGICASYQTQTNSPRRARSVASQSIIAYTMSLGAENSVAYSNNSIACPTNFTISVTTEILPVSMTKTSVDCTMYICGDSTECSNLLLQYGSFCTQLNRALTGIAVEQDKNTQEVFAQVKQIYKTPPIKDFGGFNFSQILPDPSKPSKRSFIEDLLFNKVTLADAGFIKQYGDCLGDIAARDLICAQKFNGLTVLPPLLTDEMIAQYTSALLAGTITSGWTFGAGAALQIPFAMQMAYRFNGIGVTQNVLYENQKLIANQFNSAIGKIQDSLSSTASALGKLQDVVNQNAQALNTLVKQLSSNFGAISSVLNDILSRLDKVEAEVQIDRLITGRLQSLQTYVTQQLIRAAEIRASANLAATKMSECVLGQSKRVDFCGKGYHLMSFPQSAPHGVVFLHVTYVPAQEKNFTTAPAICHDGKAHFPREGVFVSNGTHWFVTQRNFCEPQIITTDNTFVSGNCDVVIGIVNNTVYDPLQPELDSGGSGYIPEAPRDGQAYVRKDGEWVLLSTFL

SEQ ID NO: 10119 - protein, 1171 aa, Artificial Sequence
  SARS-CoV-2/pangolin/Guangxi/P4L/2017__EPI_ISL_410538 spike protein (1-1141)(I708C_Y1104C) Foldon construct
MFVFLFVLPLVSSQCVNLTTRTGIPPGYTNSSTRGVYYPDKVFRSSILHLTQDLFLPFFSNVTWFNTINYQGGFKKFDNPVLPFNDGVYFASTEKSNIIRGWIFGTTLDARTQSLLIVNNATNVVIKVCEFQFCTDPFLGVYYHNNNKTWVENEFRVYSSANNCTFEYISQPFLMDLEGKQGNFKNLREFVFKNVDGYFKIYSKHTPIDLVRDLPRGFAALEPLVDLPIGINITRFQTLLALHRSYLTPGNLESGWTTGAAAYYVGYLQQRTFLLSYNQNGTITDAVDCSLDPLSETKCTLKSLTVEKGIYQTSNFRVQPTISIVRFPNITNLCPFGEVFNASKFASVYAWNRKRISNCVADYSVLYNSTSFSTFKCYGVSPTKLNDLCFTNVYADSFVVKGDEVRQIAPGQTGVIADYNYKLPDDFTGCVIAWNSVKQDALTGGNYGYLYRLFRKSKLKPFERDISTEIYQAGSTPCNGQVGLNCYYPLERYGFHPTTGVNYQPFRVVVLSFELLNGPATVCGPKLSTTLVKDKCVNFNFNGLTGTGVLTTSKKQFLPFQQFGRDISDTTDAVRDPQTLEILDITPCSFGGVSVITPGTNTSNQVAVLYQDVNCTEVPMAIHAEQLTPAWRVYSAGANVFQTRAGCLVGAEHVNNSYECDIPVGAGICASYHSMSSLRSVNQRSIIAYTMSLGAENSVAYSNNSIACPTNFTISVTTEILPVSMTKTSVDCTMYICGDSIECSNLLLQYGSFCTQLNRALTGIAVEQDKNTQEVFAQVKQIYKTPPIKDFGGFNFSQILPDPSKPSKRSFIEDLLFNKVTLADAGFIKQYGDCLGDIAARDLICAQKFNGLTVLPPLLTDEMIAQYTSALLAGTITSGWTFGAGAALQIPFAMQMAYRFNGIGVTQNVLYENQKLIANQFNSAIGKIQDSLSSTASALGKLQDVVNQNAQALNTLVKQLSSNFGAISSVLNDILSRLDKVEAEVQIDRLITGRLQSLQTYVTQQLIRAAEIRASANLAATKMSECVLGQSKRVDFCGKGYHLMSFPQSAPHGVVFLHVTYVPAQEKNFTTAPAICHEGKAHFPREGVFVSNGTHWFITQRNFCEPQIITTDNTFVSGSCDVVIGIVNNTVYDPLQPELDSGGSGYIPEAPRDGQAYVRKDGEWVLLSTFL

SEQ ID NO: 10120 - protein, 1171 aa, Artificial Sequence
  SARS-CoV-2/pangolin/Guangxi/P5L/2017__EPI_ISL_410540 spike protein (1-1141)(I708C_Y1104C) Foldon construct
MFVFLFVLPLVSSQCVNLTTRTGIPPGYTNSSTRGVYYPDKVFRSSILHLTQDLFLPFFSNVTWFNTINYQGGFKKFDNPVLPFNDGVYFASTEKSNIIRGWIFGTTLDARTQSLLIVNNATNVVIKVCEFQFCTDPFLGVYYHNNNKTWVENEFRVYSSANNCTFEYISQPFLMDLEGKQGNFKNLREFVFKNVDGYFKIYSKHTPIDLVRDLPRGFAALEPLVDLPIGINITRFQTLLALHRSYLTPGKLESGWTTGAAAYYVGYLQQRTFLLSYNQNGTITDAVDCSLDPLSETKCTLKSLTVEKGIYQTSNFRVQPTISIVRFPNITNLCPFGEVFNASKFASVYAWNRKRISNCVADYSVLYNSTSFSTFKCYGVSPTKLNDLCFTNVYADSFVVKGDEVRQIAPGQTGVIADYNYKLPDDFTGCVIAWNSVKQDALTGGNYGYLYRLFRKSKLKPFERDISTEIYQAGSTPCNGQVGLNCYYPLERYGFHPTTGVNYQPFRVVVLSFELLNGPATVCGPKLSTTLVKDKCVNFNFNGLTGTGVLTTSKKQFLPFQQFGRDISDTTDAVRDPQTLEILDITPCSFGGVSVITPGTNTSNQVAVLYQDVNCTEVPMAIHAEQLTPAWRVYSAGANVFQTRAGCLVGAEHVNNSYECDIPVGAGICASYHSMSSFRSVNQRSIIAYTMSLGAENSVAYSNNSIACPTNFTISVTTEILPVSMTKTSVDCTMYICGDSIECSNLLLQYGSFCTQLNRALTGIAVEQDKNTQEVFAQVKQIYKTPPIKDFGGFNFSQILPDPSKPSKRSFIEDLLFNKVTLADAGFIKQYGDCLGDIAARDLICAQKFNGLTVLPPLLTDEMIAQYTSALLAGTITSGWTFGAGAALQIPFAMQMAYRFNGIGVTQNVLYENQKLIANQFNSAIGKIQDSLSSTASALGKLQDVVNQNAQALNTLVKQLSSNFGAISSVLNDILSRLDKVEAEVQIDRLITGRLQSLQTYVTQQLIRAAEIRASANLAATKMSECVLGQSKRVDFCGKGYHLMSFPQSAPHGVVFLHVTYVPAQEKNFTTAPAICHEGKAHFPREGVFVSNGTHWFITQRNFCEPQIITTDNTFVSGSCDVVIGIVNNTVYDPLQPELDSGGSGYIPEAPRDGQAYVRKDGEWVLLSTFL

SEQ ID NO: 10121 - protein, 1171 aa, Artificial Sequence
  SARS-CoV-2/pangolin/Guangxi/P5E/2017__EPI_ISL_410541 spike protein (1-1141)(I708C_Y1104C) Foldon construct
MFVFLFVLPLVSSQCVNLTTRTGIPPGYTNSSTRGVYYPDKVFRSSILHLTQDLFLPFFSNVTWFNTITYQGGSKKFDNPVLPFNDGVYFASTEKSNIIRGWIFGTTLDARTQSLLIVNNATNVVIKVCEFQFCTDPFLGVYYHNNNKTWVENEFRVYSSANNCTFEYISQPFLMDLEGKQGNFKNLREFVFKNVDGYFKIYSKHTPIDLVRDLPRGFAALEPLVDLPIGINITRFQTLLALHRSYLTPGKLESGWTTGAAAYYVGYLQQRTFLLSYNQNGTITDAVDCSLDPLSETKCTLKSLTVEKGIYQTSNFRVQPTISIVRFPNITNLCPFGEVFNASKFASVYAWNRKRISNCVADYSVLYNSTSFSTFKCYGVSPTKLNDLCFTNVYADSFVVKGDEVRQIAPGQTGVIADYNYKLPDDFTGCVIAWNSVKQDALTGDNYGYLYRLFRKSKLKPFERDISTEIYQAGSTPCNGQVGLNCYYPLERYGFHPTTGVNYQPFRVVVLSFELLNGPATVCGPKLSTTLVKDKCVNFNFNGLTGTGVLTTSKKQFLPFQQFGRDISDTTDAVRDPQTLEILDITPCSFGGVSVITPGTNTSNQVAVLYQDVNCTEVPMAIHAEQLTPAWRVYSAGANVFQTRAGCLVGAEHVNNSYECDIPVGAGICASYHSMSSFRSVNQRSIIAYTMSLGAENSVAYSNNSIACPTNFTISVTTEILPVSMTKTSVDCTMYICGDSIECSNLLLQYGSFCTQLNRALTGIAVEQDKNTQEVFAQVKQIYKTPPIKDFGGFNFSQILPDPSKPSKRSFIEDLLFNKVTLADAGFIKQYGDCLGDIAARDLICAQKFNGLTVLPPLLTDEMIAQYTSALLAGTITSGWTFGAGAALQIPFAMQMAYRFNGIGVTQNVLYENQKLIANQFNSAIGKIQDSLSSTASALGKLQDVVNQNAQALNTLVKQLSSNFGAISSVLNDILSRLDKVEAEVQIDRLITGRLQSLQTYVTQQLIRAAEIRASANLAATKMSECVLGQSKRVDFCGKGYHLMSFPQSAPHGVVFLHVTYVPAQEKNFTTAPAICHEGKAHFPREGVFVSNGTHWFITQRNFCEPQIITTDNTFVSGSCDVVIGIVNNTVYDPLQPELDSGGSGYIPEAPRDGQAYVRKDGEWVLLSTFL

SEQ ID NO: 10122 - protein, 1169 aa, Artificial Sequence
  SARS-CoV-2/pangolin/Guangxi/P1E/2017__EPI_ISL_410539 spike protein (1-1139)(I706C_Y1102C) Foldon construct
MFVFLFVLPLVSSQCVNLTTRTGIQPGYTNSSTRGVYYPDKVFRSSILHLTQDLFLPFFSNVTWFNTINYQGGFKKFDNPVLPFNDGVYFASTEKSNIIRGWIFGTTLDARTQSLLIVNNATNVVIKVCEFQFCTDPFLGVYYHNNNKTWVENEFRVYSSANNCTFEYISQPFLMDLEGKQGNFKNLREFVFKNVDGYFKIYSKHTPIDLVRDLPRGFAALEPLVDLPIGINITRFQTLLALHRSYLTPGKLESGWTTGAAAYYVGYLQQRTFLLSYNQNGTITDAVDCSLDPLSETKCTLKSLTVEKGIYQTSNFRVQPTISIVRFPNITNLCPFGEVFNASKFASVYAWNRKRISNCVADYSVLYNSTSFSTFKCYGVSPTKLNDLCFTNVYADSFVVKGDEVRQIAPGQTGVIADYNYKLPDDFTGCVIAWNSVKQDALTGGNYLYRLFRKSKLKPFERDISTEIYQAGSTPCNGQVGLNCYYPLERYGFHPTTGVNYQPFRVVVLSFELLNGPATVCGPKLSTTLVKDKCVNFNFNGLTGTGVLTTSKKQFLPFQQFGRDISDTTDAVRDPQTLEILDITPCSFGGVSVITPGTNTSNQVAVLYQDVNCTEVPMAIHAEQLTPAWRVYSAGANVFQTRAGCLVGAEHVNNSYECDIPVGAGICASYHSMSSLRSVNQRSIIAYTMSLGAENSVAYSNNSIACPTNFTISVTTEILPVSMTKTSVDCTMYICGDSIECSNLLLQYGSFCTQLNRALTGIAVEQDKNTQEVFAQVKQIYKTPPIKDFGGFNFSQILPDPSKPSKRSFIEDLLFNKVTLADAGFIKQYGDCLGDIAARDLICAQKFNGLTVLPPLLTDEMIAQYTSALLAGTITSGWTFGAGAALQIPFAMQMAYRFNGIGVTQNVLYENQKLIANQFNSAIGKIQDSLSSTASALGKLQDVVNQNAQALNTLVKQLSSNFGAISSVLNDILSRLDKVEAEVQIDRLITGRLQSLQTYVTQQLIRAAEIRASANLAATKMSECVLGQSKRVDFCGKGYHLMSFPQSAPHGVVFLHVTYVPAQEKNFTTAPAICHEGKAHFPREGVFVSNGTHWFITQRNFCEPQIITTDNTFVSGSCDVVIGIVNNTVYDPLQPELDSGGSGYIPEAPRDGQAYVRKDGEWVLLSTFL

SEQ ID NO: 10123 - protein, 1177 aa, Artificial Sequence
  SARS-CoV-2/Wuhan/WIV05/2019__EPI_ISL_402128 spike protein (1-1147)(P715C_P1069C) Foldon construct
MFVFLVLLPLVSSQCVNLTTRTQLPPAYTNSFTRGVYYPDKVFRSSVLHSTQDLFLPFFSNVTWFHAIHVSGTNGTKRFDNPVLPFNDGVYFASTEKSNIIRGWIFGTTLDSKTQSLLIVNNATNVVIKVCEFQFCNDPFLGVYYHKNNKSWMESEFRVYSSANNCTFEYVSQPFLMDLEGKQGNFKNLREFVFKNIDGYFKIYSKHTPINLVRDLPQGFSALEPLVDLPIGINITRFQTLLALHRSYLTPGDSSSGWTAGAAAYYVGYLQPRTFLLKYNENGTITDAVDCALDPLSETKCTLKSFTVEKGIYQTSNFRVQPTESIVRFPNITNLCPFGEVFNATRFASVYAWNRKRISNCVADYSVLYNSASFSTFKCYGVSPTKLNDLCFTNVYADSFVIRGDEVRQIAPGQTGKIADYNYKLPDDFTGCVIAWNSNNLDSKVGGNYNYLYRLFRKSNLKPFERDISTEIYQAGSTPCNGVEGFNCYFPLQSYGFQPTNGVGYQPYRVVVLSFELLHAPATVCGPKKSTNLVKNKCVNFNFNGLTGTGVLTESNKKFLPFQQFGRDIADTTDAVRDPQTLEILDITPCSFGGVSVITPGTNTSNQVAVLYQDVNCTEVPVAIHADQLTPTWRVYSTGSNVFQTRAGCLIGAEHVNNSYECDIPIGAGICASYQTQTNSPRRARSVASQSIIAYTMSLGAENSVAYSNNSIAICTNFTISVTTEILPVSMTKTSVDCTMYICGDSTECSNLLLQYGSFCTQLNRALTGIAVEQDKNTQEVFAQVKQIYKTPPIKDFGGFNFSQILPDPSKPSKRSFIEDLLFNKVTLADAGFIKQYGDCLGDIAARDLICAQKFNGLTVLPPLLTDEMIAQYTSALLAGTITSGWTFGAGAALQIPFAMQMAYRFNGIGVTQNVLYENQKLIANQFNSAIGKIQDSLSSTASALGKLQDVVNQNAQALNTLVKQLSSNFGAISSVLNDILSRLDKVEAEVQIDRLITGRLQSLQTYVTQQLIRAAEIRASANLAATKMSECVLGQSKRVDFCGKGYHLMSFPQSAPHGVVFLHVTYVCAQEKNFTTAPAICHDGKAHFPREGVFVSNGTHWFVTQRNFYEPQIITTDNTFVSGNCDVVIGIVNNTVYDPLQPELDSGGSGYIPEAPRDGQAYVRKDGEWVLLSTFL

SEQ ID NO: 10124 - protein, 1173 aa, Artificial Sequence
  SARS-CoV-2/bat/Yunnan/RaTG13/2013__EPI_ISL_402131 spike protein (1-1143)(P711C_P1065C) Foldon construct
MFVFLVLLPLVSSQCVNLTTRTQLPPAYTNSSTRGVYYPDKVFRSSVLHLTQDLFLPFFSNVTWFHAIHVSGTNGIKRFDNPVLPFNDGVYFASTEKSNIIRGWIFGTTLDSKTQSLLIVNNATNVVIKVCEFQFCNDPFLGVYYHKNNKSWMESEFRVYSSANNCTFEYVSQPFLMDLEGKQGNFKNLREFVFKNIDGYFKIYSKHTPINLVRDLPPGFSALEPLVDLPIGINITRFQTLLALHRSYLTPGDSSSGWTAGAAAYYVGYLQPRTFLLKYNENGTITDAVDCALDPLSETKCTLKSFTVEKGIYQTSNFRVQPTDSIVRFPNITNLCPFGEVFNATTFASVYAWNRKRISNCVADYSVLYNSTSFSTFKCYGVSPTKLNDLCFTNVYADSFVITGDEVRQIAPGQTGKIADYNYKLPDDFTGCVIAWNSKHIDAKEGGNFNYLYRLFRKANLKPFERDISTEIYQAGSKPCNGQTGLNCYYPLYRYGFYPTDGVGHQPYRVVVLSFELLNAPATVCGPKKSTNLVKNKCVNFNFNGLTGTGVLTESNKKFLPFQQFGRDIADTTDAVRDPQTLEILDITPCSFGGVSVITPGTNASNQVAVLYQDVNCTEVPVAIHADQLTPTWRVYSTGSNVFQTRAGCLIGAEHVNNSYECDIPIGAGICASYQTQTNSRSVASQSIIAYTMSLGAENSVAYSNNSIAICTNFTISVTTEILPVSMTKTSVDCTMYICGDSTECSNLLLQYGSFCTQLNRALTGIAVEQDKNTQEVFAQVKQIYKTPPIKDFGGFNFSQILPDPSKPSKRSFIEDLLFNKVTLADAGFIKQYGDCLGDIAARDLICAQKFNGLTVLPPLLTDEMIAQYTSALLAGTITSGWTFGAGAALQIPFAMQMAYRFNGIGVTQNVLYENQKLIANQFNSAIGKIQDSLSSTASALGKLQDVVNQNAQALNTLVKQLSSNFGAISSVLNDILSRLDKVEAEVQIDRLITGRLQSLQTYVTQQLIRAAEIRASANLAATKMSECVLGQSKRVDFCGKGYHLMSFPQSAPHGVVFLHVTYVCAQEKNFTTAPAICHDGKAHFPREGVFVSNGTHWFVTQRNFYEPQIITTDNTFVSGSCDVVIGIVNNTVYDPLQPELDSGGSGYIPEAPRDGQAYVRKDGEWVLLSTFL

SEQ ID NO: 10125 - protein, 1177 aa, Artificial Sequence
  SARS-CoV-2/Wuhan/HBCDC-HB-01/2019__EPI_ISL_402132 spike protein (1-1147)(P715C_P1069C) Foldon construct
MFVFLVLLPLVSSQCVNLTTRTQLPPAYTNSITRGVYYPDKVFRSSVLHSTQDLFLPFFSNVTWFHAIHVSGTNGTKRFDNPVLPFNDGVYFASTEKSNIIRGWIFGTTLDSKTQSLLIVNNATNVVIKVCEFQFCNDPFLGVYYHKNNKSWMESEFRVYSSANNCTFEYVSQPFLMDLEGKQGNFKNLREFVFKNIDGYFKIYSKHTPINLVRDLPQGFSALEPLVDLPIGINITRFQTLLALHRSYLTPGDSSSGWTAGAAAYYVGYLQPRTFLLKYNENGTITDAVDCALDPLSETKCTLKSFTVEKGIYQTSNFRVQPTESIVRFPNITNLCPFGEVFNATRFASVYAWNRKRISNCVADYSVLYNSASFSTFKCYGVSPTKLNDLCFTNVYADSFVIRGDEVRQIAPGQTGKIADYNYKLPDDFTGCVIAWNSNNLDSKVGGNYNYLYRLFRKSNLKPFERDISTEIYQAGSTPCNGVEGFNCYFPLQSYGFQPTNGVGYQPYRVVVLSFELLHAPATVCGPKKSTNLVKNKCVNFNFNGLTGTGVLTESNKKFLPFQQFGRDIADTTDAVRDPQTLEILDITPCSFGGVSVITPGTNTSNQVAVLYQDVNCTEVPVAIHADQLTPTWRVYSTGSNVFQTRAGCLIGAEHVNNSYECDIPIGAGICASYQTQTNSPRRARSVASQSIIAYTMSLGAENSVAYSNNSIAICTNFTISVTTEILPVSMTKTSVDCTMYICGDSTECSNLLLQYGSFCTQLNRALTGIAVEQDKNTQEVFAQVKQIYKTPPIKDFGGFNFSQILPDPSKPSKRSFIEDLLFNKVTLADAGFIKQYGDCLGDIAARDLICAQKFNGLTVLPPLLTDEMIAQYTSALLAGTITSGWTFGAGAALQIPFAMQMAYRFNGIGVTQNVLYENQKLIANQFNSAIGKIQDSLSSTASALGKLQDVVNQNAQALNTLVKQLSSNFGAISSVLNDILSRLDKVEAEVQIDRLITGRLQSLQTYVTQQLIRAAEIRASANLAATKMSECVLGQSKRVDFCGKGYHLMSFPQSAPHGVVFLHVTYVCAQEKNFTTAPAICHDGKAHFPREGVFVSNGTHWFVTQRNFYEPQIITTDNTFVSGNCDVVIGIVNNTVYDPLQPELDSGGSGYIPEAPRDGQAYVRKDGEWVLLSTFL

SEQ ID NO: 10126 - protein, 1177 aa, Artificial Sequence
  SARS-CoV-2/Guangdong/20SF028/2020__EPI_ISL_403936 spike protein (1-1147)(P715C_P1069C) Foldon construct
MFVFLVLLPLVSSQCVNLTTRTQLPPAYTNSFTRGVYYPDKVFRSSVLYSTQDLFLPFFSNVTWFHAIHVSGTNGTKRFDNPVLPFNDGVYFASTEKSNIIRGWIFGTTLDSKTQSLLIVNNATNVVIKVCEFQFCNDPFLGVYYHKNNKSWMESEFRVYSSANNCTFEYVSQPFLMDLEGKQGNFKNLREFVFKNIDGYFKIYSKHTPINLVRDLPQGFSALEPLVDLPIGINITRFQTLLALHRSYLTPGDSSSGWTAGAAAYYVGYLQPRTFLLKYNENGTITDAVDCALDPLSETKCTLKSFTVEKGIYQTSNFRVQPTESIVRFPNITNLCPFGEVFNATRFASVYAWNRKRISNCVADYSVLYNSASFSTFKCYGVSPTKLNDLCFTNVYADSFVIRGDEVRQIAPGQTGKIADYNYKLPDDFTGCVIAWNSNNLDSKVGGNYNYLYRLFRKSNLKPFERDISTEIYQAGSTPCNGVEGFNCYFPLQSYGFQPTNGVGYQPYRVVVLSFELLHAPATVCGPKKSTNLVKNKCVNFNFNGLTGTGVLTESNKKFLPFQQFGRDIADTTDAVRDPQTLEILDITPCSFGGVSVITPGTNTSNQVAVLYQDVNCTEVPVAIHADQLTPTWRVYSTGSNVFQTRAGCLIGAEHVNNSYECDIPIGAGICASYQTQTNSPRRARSVASQSIIAYTMSLGAENSVAYSNNSIAICTNFTISVTTEILPVSMTKTSVDCTMYICGDSTECSNLLLQYGSFCTQLNRALTGIAVEQDKNTQEVFAQVKQIYKTPPIKDFGGFNFSQILPDPSKPSKRSFIEDLLFNKVTLADAGFIKQYGDCLGDIAARDLICAQKFNGLTVLPPLLTDEMIAQYTSALLAGTITSGWTFGAGAALQIPFAMQMAYRFNGIGVTQNVLYENQKLIANQFNSAIGKIQDSLSSTASALGKLQDVVNQNAQALNTLVKQLSSNFGAISSVLNDILSRLDKVEAEVQIDRLITGRLQSLQTYVTQQLIRAAEIRASANLAATKMSECVLGQSKRVDFCGKGYHLMSFPQSAPHGVVFLHVTYVCAQEKNFTTAPAICHDGKAHFPREGVFVSNGTHWFVTQRNFYEPQIITTDNTFVSGNCDVVIGIVNNTVYDPLQPELDSGGSGYIPEAPRDGQAYVRKDGEWVLLSTFL

SEQ ID NO: 10127 - protein, 1177 aa, Artificial Sequence
  SARS-CoV-2/Shenzhen/SZTH-001/2020__EPI_ISL_406592 spike protein (1-1147)(P715C_P1069C) Foldon construct
MFVFLVLLPLVSSQCVNLTTRTQLPPAYTNSFTRGVYYPDKVFRSSVLHSTQDLFLPFFSNVTWFHAIHVSGTNGTKRFDNPVLPFNDGVYFASTEKSNIIRGWIFGTTLDSKTQSLLIVNNATNVVIKVCEFQFCNDPFLGVYYHKNNKSWMESEFRVYSSANNCTFEYVSQPFLMDLEGKQGNFKNLREFVFKNIDGYFKIYSKHTPINLVRDLPQGFSALEPLVDLPIGINITRFQTLLALHRSYLTPGDSSSGWTAGAAAYYVGYLQPRTFLLKYNENGTITDAVDCALDPLSETKCTLKSFTVEKGIYQTSNFRVQPTESIVRFPNITNLCPFGEVFNATRFASVYAWNRKRISNCVADYSVLYNSASFSTFKCYGVSPTKLNDLCFTNVYADSFVIRGDEVRQIAPGQTGKIADYNYKLPDDFTGCVIAWNSNNLDSKVGGNYNYLYRLFRKSNLKPFERDISTEIYQAGSTPCNGVEGFNCYFPLQSYGFQPTNGVGYQPYRVVVLSFELLHAPATVCGPKKSTNLVKNKCVNFNFNGLTGTGVLTESNKKFLPFQQFGRDIADTTDAVRDPQTLEILDITPCSFGGVSVITPGTNTSNQVAVLYQDVNCTEVPVAIHADQLTPTWRVYSTGSNVFQTRAGCLIGAEHVNNSYECDIPIGAGICASYQTQTNSPRRARSVASQSIIAYTMSLGAENSVAYSNNSIAICTNFTISVTTEILPVSMTKTSVDCTMYICGDSTECSNLLLQYGSFCTQLNRALTGIAVEQDKNTQEVFAQVKQIYKTPPIKDFGGFNFSQILPDPSKPSKRSFIEDLLFNKVTLADAGFIKQYGDCLGDIAARDLICAQKFNGLTVLPPLLTDEMIAQYTSALLAGTITSGWTFGAGAALQIPFAMQMAYRFNGIGVTQNVLYENQKLIANQFNSAIGKIQDSLSSTASALGKLQDVVNQNAQALNTLVKQLSSNFGAISSVLNDILSRLDKVEAEVQIDRLITGRLQSLQTYVTQQLIRAAEIRASANLAATKMSECVLGQSKRVDFCGKGYHLMSFPQSAPHGVVFLHVTYVCAQEKNFTTAPAICHDGKAHFPREGVFVSNGTHWFVTQRNFYEPQIITTDNTFVSGNCDVLIGIVNNTVYDPLQPELDSGGSGYIPEAPRDGQAYVRKDGEWVLLSTFL

SEQ ID NO: 10128 - protein, 1177 aa, Artificial Sequence
  SARS-CoV-2/Shenzhen/SZTH-004/2020__EPI_ISL_406595 spike protein (1-1147)(P715C_P1069C) Foldon construct
MFVFLVLLPLVSSQCVNLTTRTQLPPAYTNSFTRGVYYPDKVFRSSVLHSTQDLFLPFFSNVTWFHAIHVSGTNGTKRFDNPVLPFNDGVYFASTEKSNIIRGWIFGTTLDSKTQSLLIVNNATNVVIKVCEFQFCNDPFLGVYYHKNNKSWMESEFRVYSSANNCTFEYVSQPFLMDLEGKQGNFKNLREFVFKNIDGYFKIYSKHTPINLVRDLPQGFSALEPLVDLPIGINITRFQTLLALHRSYLTPGDSSSGWTAGAAAYYVGYLQPRTFLLKYNENGTITDAVDCALDPLSETKCTLKSFTVEKGIYQTSNFRVQPTESIVRFPNITNLCPFGEVFNATRFASVYAWDRKRISNCVAYYSVLYNSASFSTFKCYGVSPTKLNDLCFTNVYADSFVIRGDEVRQIAPGQTGKIADYNYKLPDDFTGCVIAWNSNNLDSKVGGNYNYLYRLFRKSNLKPFERDISTEIYQAGSTPCNGVEGFNCYFPLQSYGFQPTNGVGYQPYRVVVLSFELLHAPATVCGPKKSTNLVKNKCVNFNFNGLTGTGVLTESNKKFLPFQQFGRDIADTTDAVRDPQTLEILDITPCSFGGVSVITPGTNTSNQVAVLYQDVNCTEVPVAIHADQLTPTWRVYSTGSNVFQTRAGCLIGAEHVNNSYECDIPIGAGICASYQTQTNSPRRARSVASQSIIAYTMSLGAENSVAYSNNSIAICTNFTISVTTEILPVSMTKTSVDCTMYICGDSTECSNLLLQYGSFCTQLNRALTGIAVEQDKNTQEVFAQVKQIYKTPPIKDFGGFNFSQILPDPSKPSKRSFIEDLLFNKVTLADAGFIKQYGDCLGDIAARDLICAQKFNGLTVLPPLLTDEMIAQYTSALLAGTITSGWTFGAGAALQIPFAMQMAYRFNGIGVTQNVLYENQKLIANQFNSAIGKIQDSLSSTASALGKLQDVVNQNAQALNTLVKQLSSNFGAISSVLNDILSRLDKVEAEVQIDRLITGRLQSLQTYVTQQLIRAAEIRASANLAATKMSECVLGQSKRVDFCGKGYHLMSFPQSAPHGVVFLHVTYVCAQEKNFTTAPAICHDGKAHFPREGVFVSNGTHWFVTQRNFYEPQIITTDNTFVSGNCDVVIGIVNNTVYDPLQPELDSGGSGYIPEAPRDGQAYVRKDGEWVLLSTFL

SEQ ID NO: 10129 - protein, 1177 aa, Artificial Sequence
  SARS-CoV-2/France/IDF0372/2020__EPI_ISL_406596 spike protein (1-1147)(P715C_P1069C) Foldon construct
MFVFLVLLPLVSSQCVNLTTRTQLPPAYTNSFTRGVYYPDKVFRSSVLHSTQDLFLPFFSNVTWFHAIHVSGTNGTKRFDNPVLPFNDGVYFASTEKSNIIRGWIFGTTLDSKTQSLLIVNNATNVVIKVCEFQFCNDPFLGVYYHKNNKSWMESEFRVYSSANNCTFEYVSQPFLMDLEGKQGNFKNLREFVFKNIDGYFKIYSKHTPINLVRDLPQGFSALEPLVDLPIGINITRFQTLLALHRSYLTPGDSSSGWTAGAAAYYVGYLQPRTFLLKYNENGTITDAVDCALDPLSETKCTLKSFTVEKGIYQTSNFRVQPTESIVRFPNITNLCPFGEVFNATRFASVYAWNRKRISNCVADYSFLYNSASFSTFKCYGVSPTKLNDLCFTNVYADSFVIRGDEVRQIAPGQTGKIADYNYKLPDDFTGCVIAWNSNNLDSKVGGNYNYLYRLFRKSNLKPFERDISTEIYQAGSTPCNGVEGFNCYFPLQSYGFQPTNGVGYQPYRVVVLSFELLHAPATVCGPKKSTNLVKNKCVNFNFNGLTGTGVLTESNKKFLPFQQFGRDIADTTDAVRDPQTLEILDITPCSFGGVSVITPGTNTSNQVAVLYQDVNCTEVPVAIHADQLTPTWRVYSTGSNVFQTRAGCLIGAEHVNNSYECDIPIGAGICASYQTQTNSPRRARSVASQSIIAYTMSLGAENSVAYSNNSIAICTNFTISVTTEILPVSMTKTSVDCTMYICGDSTECSNLLLQYGSFCTQLNRALTGIAVEQDKNTQEVFAQVKQIYKTPPIKDFGGFNFSQILPDPSKPSKRSFIEDLLFNKVTLADAGFIKQYGDCLGDIAARDLICAQKFNGLTVLPPLLTDEMIAQYTSALLAGTITSGWTFGAGAALQIPFAMQMAYRFNGIGVTQNVLYENQKLIANQFNSAIGKIQDSLSSTASALGKLQDVVNQNAQALNTLVKQLSSNFGAISSVLNDILSRLDKVEAEVQIDRLITGRLQSLQTYVTQQLIRAAEIRASANLAATKMSECVLGQSKRVDFCGKGYHLMSFPQSAPHGVVFLHVTYVCAQEKNFTTAPAICHDGKAHFPREGVFVSNGTHWFVTQRNFYEPQIITTDNTFVSGNCDVVIGIVNNTVYDPLQPELDSGGSGYIPEAPRDGQAYVRKDGEWVLLSTFL

SEQ ID NO: 10130 - protein, 1177 aa, Artificial Sequence
  SARS-CoV-2/Australia/VIC01/2020__EPI_ISL_406844 spike protein (1-1147)(P715C_P1069C) Foldon construct
MFVFLVLLPLVSSQCVNLTTRTQLPPAYTNSFTRGVYYPDKVFRSSVLHSTQDLFLPFFSNVTWFHAIHVSGTNGTKRFDNPVLPFNDGVYFASTEKSNIIRGWIFGTTLDSKTQSLLIVNNATNVVIKVCEFQFCNDPFLGVYYHKNNKSWMESEFRVYSSANNCTFEYVSQPFLMDLEGKQGNFKNLREFVFKNIDGYFKIYSKHTPINLVRDLPQGFSALEPLVDLPIGINITRFQTLLALHRRYLTPGDSSSGWTAGAAAYYVGYLQPRTFLLKYNENGTITDAVDCALDPLSETKCTLKSFTVEKGIYQTSNFRVQPTESIVRFPNITNLCPFGEVFNATRFASVYAWNRKRISNCVADYSVLYNSASFSTFKCYGVSPTKLNDLCFTNVYADSFVIRGDEVRQIAPGQTGKIADYNYKLPDDFTGCVIAWNSNNLDSKVGGNYNYLYRLFRKSNLKPFERDISTEIYQAGSTPCNGVEGFNCYFPLQSYGFQPTNGVGYQPYRVVVLSFELLHAPATVCGPKKSTNLVKNKCVNFNFNGLTGTGVLTESNKKFLPFQQFGRDIADTTDAVRDPQTLEILDITPCSFGGVSVITPGTNTSNQVAVLYQDVNCTEVPVAIHADQLTPTWRVYSTGSNVFQTRAGCLIGAEHVNNSYECDIPIGAGICASYQTQTNSPRRARSVASQSIIAYTMSLGAENSVAYSNNSIAICTNFTISVTTEILPVSMTKTSVDCTMYICGDSTECSNLLLQYGSFCTQLNRALTGIAVEQDKNTQEVFAQVKQIYKTPPIKDFGGFNFSQILPDPSKPSKRSFIEDLLFNKVTLADAGFIKQYGDCLGDIAARDLICAQKFNGLTVLPPLLTDEMIAQYTSALLAGTITSGWTFGAGAALQIPFAMQMAYRFNGIGVTQNVLYENQKLIANQFNSAIGKIQDSLSSTASALGKLQDVVNQNAQALNTLVKQLSSNFGAISSVLNDILSRLDKVEAEVQIDRLITGRLQSLQTYVTQQLIRAAEIRASANLAATKMSECVLGQSKRVDFCGKGYHLMSFPQSAPHGVVFLHVTYVCAQEKNFTTAPAICHDGKAHFPREGVFVSNGTHWFVTQRNFYEPQIITTDNTFVSGNCDVVIGIVNNTVYDPLQPELDSGGSGYIPEAPRDGQAYVRKDGEWVLLSTFL

SEQ ID NO: 10131 - protein, 1177 aa, Artificial Sequence
  SARS-CoV-2/Germany/BavPat1/2020__EPI_ISL_406862 spike protein (1-1147)(P715C_P1069C) Foldon construct
MFVFLVLLPLVSSQCVNLTTRTQLPPAYTNSFTRGVYYPDKVFRSSVLHSTQDLFLPFFSNVTWFHAIHVSGTNGTKRFDNPVLPFNDGVYFASTEKSNIIRGWIFGTTLDSKTQSLLIVNNATNVVIKVCEFQFCNDPFLGVYYHKNNKSWMESEFRVYSSANNCTFEYVSQPFLMDLEGKQGNFKNLREFVFKNIDGYFKIYSKHTPINLVRDLPQGFSALEPLVDLPIGINITRFQTLLALHRSYLTPGDSSSGWTAGAAAYYVGYLQPRTFLLKYNENGTITDAVDCALDPLSETKCTLKSFTVEKGIYQTSNFRVQPTESIVRFPNITNLCPFGEVFNATRFASVYAWNRKRISNCVADYSVLYNSASFSTFKCYGVSPTKLNDLCFTNVYADSFVIRGDEVRQIAPGQTGKIADYNYKLPDDFTGCVIAWNSNNLDSKVGGNYNYLYRLFRKSNLKPFERDISTEIYQAGSTPCNGVEGFNCYFPLQSYGFQPTNGVGYQPYRVVVLSFELLHAPATVCGPKKSTNLVKNKCVNFNFNGLTGTGVLTESNKKFLPFQQFGRDIADTTDAVRDPQTLEILDITPCSFGGVSVITPGTNTSNQVAVLYQGVNCTEVPVAIHADQLTPTWRVYSTGSNVFQTRAGCLIGAEHVNNSYECDIPIGAGICASYQTQTNSPRRARSVASQSIIAYTMSLGAENSVAYSNNSIAICTNFTISVTTEILPVSMTKTSVDCTMYICGDSTECSNLLLQYGSFCTQLNRALTGIAVEQDKNTQEVFAQVKQIYKTPPIKDFGGFNFSQILPDPSKPSKRSFIEDLLFNKVTLADAGFIKQYGDCLGDIAARDLICAQKFNGLTVLPPLLTDEMIAQYTSALLAGTITSGWTFGAGAALQIPFAMQMAYRFNGIGVTQNVLYENQKLIANQFNSAIGKIQDSLSSTASALGKLQDVVNQNAQALNTLVKQLSSNFGAISSVLNDILSRLDKVEAEVQIDRLITGRLQSLQTYVTQQLIRAAEIRASANLAATKMSECVLGQSKRVDFCGKGYHLMSFPQSAPHGVVFLHVTYVCAQEKNFTTAPAICHDGKAHFPREGVFVSNGTHWFVTQRNFYEPQIITTDNTFVSGNCDVVIGIVNNTVYDPLQPELDSGGSGYIPEAPRDGQAYVRKDGEWVLLSTFL

SEQ ID NO: 10132 - protein, 1177 aa, Artificial Sequence
  SARS-CoV-2/Wuhan/HBCDC-HB-02/2020__EPI_ISL_412978 spike protein (1-1147)(P715C_P1069C) Foldon construct
MFVFLVLLPLVSSQCVNLTTRTQLPPAYTNSFTRGVYYPDKVFRSSVLHSTQDLFLPFFSNVTWFHAIHVSGTNGTKRFDNPVLPFNDGVYFASTEKSNIIRGWIFGTTLDSKTQSLLIVNNATNVVIKVCEFQFCNDPFLGVYYHKNNKSWMESEFRVYSSANNCTFEYVSQPFLMDLEGKQGNFKNLREFVFKNIDGYFKIYSKHTPINLVRDLPQGFSALEPLVDLPIGINITRFQTLLALHRSYLTPGDSSSGWTAGAAAYYVGYLQPRTFLLKYNENGTITDAVDCALDPLSETKCTLKSFTVEKGIYQTSNFRVQPTESIVRFPNITNLCPFGEVFNATRFASVYAWNRKRISNCVADYSVLYNSASFSTFKCYGVSPTKLNDLCFTNVYADSFVIRGDEVRQIAPGQTGKIADYNYKLPDDFTGCVIAWNSNNLDSKVGGNYNYLYRLFRKSNLKPFERDISTEIYQAGSTPCNGVEGFNCYFPLQSYGFQPTNGVGYQPYRVVVLSFELLHAPATVCGPKKSTNLVKNKCVNFNFNGLTGTGVLTESNKKFLPFQQFGRDIADTTDAVRDPQTLEILDITPCSFGGVSVITPGTNTSNQVAVLYQDVNCTEVPVAIHADQLTPTWRVYSTGSNVFQTRAGCLIGAEHVNNSYECDIPIGAGICASYQTQTNSPRRARSVASQSIIAYTMSLGAENSVAYSNNSIAICTNFTISVTTEILPVSMTKTSVDCTMYICGDSTECSNFLLQYGSFCTQLNRALTGIAVEQDKNTQEVFAQVKQIYKTPPIKDFGGFNFSQILPDPSKPSKRSFIEDLLFNKVTLADAGFIKQYGDCLGDIAARDLICAQKFNGLTVLPPLLTDEMIAQYTSALLAGTITSGWTFGAGAALQIPFAMQMAYRFNGIGVTQNVLYENQKLIANQFNSAIGKIQDSLSSTASALGKLQDVVNQNAQALNTLVKQLSSNFGAISSVLNDILSRLDKVEAEVQIDRLITGRLQSLQTYVTQQLIRAAEIRASANLAATKMSECVLGQSKRVDFCGKGYHLMSFPQSAPHGVVFLHVTYVCAQEKNFTTAPAICHDGKAHFPREGVFVSNGTHWFVTQRNFYEPQIITTDNTFVSGNCDVVIGIVNNTVYDPLQPELDSGGSGYIPEAPRDGQAYVRKDGEWVLLSTFL

SEQ ID NO: 10133 - protein, 1177 aa, Artificial Sequence
  SARS-CoV-2/Australia/QLD02/2020__EPI_ISL_407896 spike protein (1-1147)(P715C_P1069C) Foldon construct
MFVFLVLLPLVSSQCVNLTTRTQLPPAYTNSFTRGVYYPDKVFRSSVLHSTQDLFLPFFSNVTWFHAIHVSGTNGTKRFDNPVLPFNDGVYFASTEKSNIIRGWIFGTTLDSKTQSLLIVNNATNVVIKVCEFQFCNDPFLGVYYHKNNKSWMESEFRVYSSANNCTFEYVSQPFLMDLEGKQGNFKNLREFVFKNIDGYFKIYSKHTPINLVRDLPQGFSALEPLVDLPIGINITRFQTLLALHRSYLTPGDSSSGWTAGAAAYYVGYLQPRTFLLKYNENGTITDAVDCALDPLSETKCTLKSFTVEKGIYQTSNFRVQPTESIVRFPNITNLCPFGEVFNATRFASVYAWNRKRISNCVADYSVLYNSASFSTFKCYGVSPTKLNDLCFTNVYADSFVIRGDEVRQIAPGQTGKIADYNYKLPDDFTGCVIAWNSNNLDSKVGGNYNYLYRLFRKSNLKPFERDISTEIYQAGSTPCNGVEGFNCYFPLQSYGFQPTNGVGYQPYRVVVLSFELLHAPATVCGPKKSTNLVKNKCVNFNFNGLTGTGVLTESNKKFLPFQQFGRDIADTTDAVRDPQTLEILDITPCSFGGVSVITPGTNTSNQVAVLYQDVNCTEVPVAIHADQLTPTWRVYSTGSNVFQTRAGCLIGAEHVNNSYECDIPIGAGICASYQTQTNSPRRARSVASQSIIAYTMSLGAENSVAYSNNSIAICTNFTISVTTEILPVSMTKTSVDCTMYICGDSTECSNLLLQYGSFCTQLNRALTGIAVEQDKNTQEVFAQVKQIYKTPPIKDFGGFNFSQILPDPSKPSKRSFIEDLLFNKVTLADAGFIKQYGDCLGDIAARDLICAQKFNGLTVLPPLLTDEMIAQYTSALLAGTITSGWTFGAGAALQIPFAMQMAYRFNGIGVTQNVLYENQKLIANQFNSAIGKIQDSLSSTASALGKLQDVVNQNAQALNTLVKQLSSNFGAISSVLNDILSRLDKVEAEVQIDRLITGRLQSLQTYVTQQLIRAAEIRASANLAATKMSECVLGQSKRVDFCGKGYHLMSFPQSAPHGVVFLHVTYVCAQEKNFTTAPAICHDGKAHFPREGVFVSNGTHWFVTQRNFYEPQIITTDNTFVSGNCDVVIGIVNNTVYDPLQLELDSGGSGYIPEAPRDGQAYVRKDGEWVLLSTFL

SEQ ID NO: 10134 - protein, 1177 aa, Artificial Sequence
  SARS-CoV-2/India/1-31/2020__EPI_ISL_413523 spike protein (1-1147)(P715C_P1069C) Foldon construct
MFVFLVLLPLVSSQCVNLTTRTQLPPAYTNSFTRGVYYPDKVFRSSVLHSTQDLFLPFFSNVTWFHAIHVSGTNGTKRFDNPVLPFNDGVYFASTEKSNIIRGWIFGTTLDSKTQSLLIVNNATNVVIKVCEFQFCNDPFLGVYYHKNNKSWMESEFRVYSSANNCTFEYVSQPFLMDLEGKQGNFKNLREFVFKNIDGYFKIYSKHTPINLVRDLPQGFSALEPLVDLPIGINITRFQTLLALHRSYLTPGDSSSGWTAGAAAYYVGYLQPRTFLLKYNENGTITDAVDCALDPLSETKCTLKSFTVEKGIYQTSNFRVQPTESIVRFPNITNLCPFGEVFNATRFASVYAWNRKRISNCVADYSVLYNSASFSTFKCYGVSPTKLNDLCFTNVYADSFVIRGDEVRQIAPGQTGKIADYNYKLPDDFTGCVIAWNSNNLDSKVGGNYNYLYRLFRKSNLKPFERDISTEIYQAGSTPCNGVEGFNCYFPLQSYGFQPTNGVGYQPYRVVVLSFELLHAPATVCGPKKSTNLVKNKCVNFNFNGLTGTGVLTESNKKFLPFQQFGRDIADTTDAVRDPQTLEILDITPCSFGGVSVITPGTNTSNQVAVLYQDVNCTEVPVAIHADQLTPTWRVYSTGSNVFQTRAGCLIGAEHVNNSYECDIPIGAGICASYQTQTNSPRRARSVASQSIIAYTMSLGAENSVAYSNNSIAICTNFTISVTTEILPVSMTKTSVDCTMYICGDSTECSNLLLQYGSFCTQLNRALTGIAVEQDKNTQEVFAQVKQIYKTPPIKDFGGFNFSQILPDPSKPSKRSFIEDLLFNKVTLADAGFIKQYGDCLGDIAARDLICAQKFNGLTVLPPLLTDEMIAQYTSALLAGTITSGWTFGAGAALQIPFAMQMAYRFNGIGVTQNVLYENQKLIANQFNSVIGKIQDSLSSTASALGKLQDVVNQNAQALNTLVKQLSSNFGAISSVLNDILSRLDKVEAEVQIDRLITGRLQSLQTYVTQQLIRAAEIRASANLAATKMSECVLGQSKRVDFCGKGYHLMSFPQSAPHGVVFLHVTYVCAQEKNFTTAPAICHDGKAHFPREGVFVSNGTHWFVTQRNFYEPQIITTDNTFVSGNCDVVIGIVNNTVYDPLQPELDSGGSGYIPEAPRDGQAYVRKDGEWVLLSTFL

SEQ ID NO: 10135 - protein, 1177 aa, Artificial Sequence
  SARS-CoV-2/Guangdong/GD2020087-P0008/2020__EPI_ISL_413863 spike protein (1-1147)(P715C_P1069C) Foldon construct
MFVFLVLLPLVSSQCVNLTTRTQLPPAYTNSFTRGVYYPDKVFRSSVLHSTQDLFLPFFSNVTWFHAIHVSGTNGTKRFDNPVLPFNDGVYFASTEKSNIIRGWIFGTTLDSKTQSLLIVNNATNVVIKVCEFQFCNDPFLGVYYHKNNKSWMESEFRVYSSANNCTFEYVSQPFLMDLEGKQGNFKNLREFVFKNIDGYFKIYSKHTPINLVRDLPQGFSALEPLVDLPIGINITRFQTLLALHRSYLTPGDSSSGWTAGAAAYYVGYLQPRTFLLKYNENGTITDAVDCALDPLSETKCTLKSFTVEKGIYQTSNFRVQPTESIVRFPNITNLCPFGEVFNATRFASVYAWNRKRISNCVADYSVLYNSASFSTFKCYGVSPTKLNDLCFTNVYADSFVIRGDEVREIAPGQTGKIADYNYKLPDDFTGCVIAWNSNNLDSKVGGNYNYLYRLFRKSNLKPFERDISTEIYQAGSTPCNGVEGFNCYFPLQSYGFQPTNGVGYQPYRVVVLSFELLHAPATVCGPKKSTNLVKNKCVNFNFNGLTGTGVLTESNKKFLPFQQFGRDIADTTDAVRDPQTLEILDITPCSFGGVSVITPGTNTSNQVAVLYQDVNCTEVPVAIHADQLTPTWRVYSTGSNVFQTRAGCLIGAEHVNNSYECDIPIGAGICASYQTQTNSPRRARSVASQSIIAYTMSLGAENSVAYSNNSIAICTNFTISVTTEILPVSMTKTSVDCTMYICGDSTECSNLLLQYGSFCTQLNRALTGIAVEQDKNTQEVFAQVKQIYKTPPIKDFGGFNFSQILPDPSKPSKRSFIEDLLFNKVTLADAGFIKQYGDCLGDIAARDLICAQKFNGLTVLPPLLTDEMIAQYTSALLAGTITSGWTFGAGAALQIPFAMQMAYRFNGIGVTQNVLYENQKLIANQFNSAIGKIQDSLSSTASALGKLQDVVNQNAQALNTLVKQLSSNFGAISSVLNDILSRLDKVEAEVQIDRLITGRLQSLQTYVTQQLIRAAEIRASANLAATKMSECVLGQSKRVDFCGKGYHLMSFPQSAPHGVVFLHVTYVCAQEKNFTTAPAICHDGKAHFPREGVFVSNGTHWFVTQRNFYEPQIITTDNTFVSGNCDVVIGIVNNTVYDPLQPELDSGGSGYIPEAPRDGQAYVRKDGEWVLLSTFL

SEQ ID NO: 10136 - protein, 1177 aa, Artificial Sequence
  SARS-CoV-2/Sweden/01/2020__EPI_ISL_411951 spike protein (1-1147)(P715C_P1069C) Foldon construct
MFVFLVLLPLVSSQCVNLTTRTQLPPAYTNSFTRGVYYPDKVFRSSVLHSTQDLFLPFFSNVTWFHAIHVSGTNGTKRFDNPVLPFNDGVYFASTEKSNIIRGWIFGTTLDSKTQSLLIVNNATNVVIKVCEFQFCNDPFLGVYYHKNNKSWMESEFRVYSSANNCTFEYVSQPFLMDLEGKQGNFKNLREFVFKNIDGYFKIYSKHTPINLVRDLPQGFSALEPLVDLPIGINITRFQTLLALHRSYLTPGDSSSGWTAGAAAYYVGYLQPRTFLLKYNENGTITDAVDCALDPLSETKCTLKSFTVEKGIYQTSNFRVQPTESIVRFPNITNLCPFGEVFNATRFASVYAWNRKRISNCVADYSVLYNSASFSTFKCYGVSPTKLNDLCFTNVYADSFVIRGDEVRQIAPGQTGKIADYNYKLPDDFTGCVIAWNSNNLDSKVGGNYNYLYRLFRKSNLKPFERDISTEIYQAGSTPCNGVEGFNCYFPLQSYGFQPTNGVGYQPYRVVVLSFELLHAPATVCGPKKSTNLVKNKCVNFNFNGLTGTGVLTESNKKFLPFQQFGRDIADTTDAVRDPQTLEILDITPCSFGGVSVITPGTNTSNQVAVLYQDVNCTEVPVAIHADQLTPTWRVYSTGSNVFQTRAGCLIGAEHVNNSYECDIPIGAGICASYQTQTNSPRRARSVASQSIIAYTMSLGAENSVAYSNNSIAICTNFTISVTTEILPVSMTKTSVDCTMYICGDSTECSNLLLQYGSFCTQLNRALTGIAVEQDKNTQEVFAQVKQIYKTPPIKDCGGFNFSQILPDPSKPSKRSFIEDLLFNKVTLADAGFIKQYGDCLGDIAARDLICAQKFNGLTVLPPLLTDEMIAQYTSALLAGTITSGWTFGAGAALQIPFAMQMAYRFNGIGVTQNVLYENQKLIANQFNSAIGKIQDSLSSTASALGKLQDVVNQNAQALNTLVKQLSSNFGAISSVLNDILSRLDKVEAEVQIDRLITGRLQSLQTYVTQQLIRAAEIRASANLAATKMSECVLGQSKRVDFCGKGYHLMSFPQSAPHGVVFLHVTYVCAQEKNFTTAPAICHDGKAHFPREGVFVSNGTHWFVTQRNFYEPQIITTDNTFVSGNCDVVIGIVNNTVYDPLQPELDSGGSGYIPEAPRDGQAYVRKDGEWVLLSTFL

SEQ ID NO: 10137 - protein, 1177 aa, Artificial Sequence
  SARS-CoV-2/Tianmen/HBCDC-HB-07/2020__EPI_ISL_412983 spike protein (1-1147)(P715C_P1069C) Foldon construct
MFVFLVLLPLVSSQCVNLTTRTQLPPAYTNSFTRGVYYPDKVFRSSVLHSTQDLFLPFFSNVTWFHAIHVSGTNGTKRFDNPVLPFNDGVYFASTEKSNIIRGWIFGTTLDSKTQSLLIVNNATNVVIKVCEFQFCNDPFLGVYYHKNNKSWMESEFRVYSSANNCTFEYVSQPFLMDLEGKQGNFKNLREFVFKNIDGYFKIYSKHTPINLVRDLPQGFSALEPLVDLPIGINITRFQTLLALHRSYLTPGDSSSGWTAGAAAYYVGYLQPRTFLLKYNENGTITDAVDCALDPLSETKCTLKSFTVEKGIYQTSNFRVQPTESIVRFPNITNLCPFGEVFNATRFASVYAWNRKRISNCVADYSVLYNSASFSTFKCYGVSPTKLNDLCFTNVYADSFVIRGDEVRQIAPGQTGKIADYNYKLPDDFTGCVIAWNSNNLDSKVGGNYNYLYRLFRKSNLKPFERDISTEIYQAGSTPCNGVEGFNCYFPLQSYGFQPTNGVGYQPYRVVVLSFELLHAPATVCGPKKSTNLVKNKCVNFNFNGLTGTGVLTESNKKFLPFQQFGRDIADTTDAVRDPQTLEILDITPCSFGGVSVITPGTNTSNQVAVLYQDLNCTEVPVAIHADQLTPTWRVYSTGSNVFQTRAGCLIGAEHVNNSYECDIPIGAGICASYQTQTNSPRRARSVASQSIIAYTMSLGAENSVAYSNNSIAICTNFTISVTTEILPVSMTKTSVDCTMYICGDSTECSNLLLQYGSFCTQLNRALTGIAVEQDKNTQEVFAQVKQIYKTPPIKDFGGFNFSQILPDPSKPSKRSFIEDLLFNKVTLADAGFIKQYGDCLGDIAARDLICAQKFNGLTVLPPLLTDEMIAQYTSALLAGTITSGWTFGAGAALQIPFAMQMAYRFNGIGVTQNVLYENQKLIANQFNSAIGKIQDSLSSTASALGKLQDVVNQNAQALNTLVKQLSSNFGAISSVLNDILSRLDKVEAEVQIDRLITGRLQSLQTYVTQQLIRAAEIRASANLAATKMSECVLGQSKRVDFCGKGYHLMSFPQSAPHGVVFLHVTYVCAQEKNFTTAPAICHDGKAHFPREGVFVSNGTHWFVTQRNFYEPQIITTDNTFVSGNCDVVIGIVNNTVYDPLQPELDSGGSGYIPEAPRDGQAYVRKDGEWVLLSTFL

SEQ ID NO: 10138 - protein, 1177 aa, Artificial Sequence
  SARS-CoV-2/Hong Kong/case42_VM20002493/2020__EPI_ISL_414527 spike protein (1-1147)(P715C_P1069C) Foldon construct
MFVFLVLLPLVSSQCVNLTTRTQLPPAYTNSFTRGVYYPDKVFRSSVLHSTQDLFLPFFSNVTWFHAIHVSGTNGTKRFDNPVLPFNDGVYFASTEKSNIIRGWIFGTTLDSKTQSLLIVNNATNVVIKVCEFQFCNDPFLGVYYHKNNKSWMESEFRVYSSANNCTFEYVSQPFLMDLEGKQGNFKNLREFVFKNIDGYFKIYSKHTPINLVRDLPQGFSALEPLVDLPIGINITRFQTLLALHRSYLTPGDSSSGWTAGAAAYYVGYLQPRTFLLKYNENGTITDAVDCALDPLSETKCTLKSFTVEKGIYQTSNFRVQPTESIVRFPNITNLCPFGEVFNATRFASVYAWNRKRISNCVADYSVLYNSASFSTFKCYGVSPTKLNDLCFTNVYADSFVIRGDEVRQIAPGQTGKIADYNYKLPDDFTGCVIAWNSNNLDSKVGGNYNYLYRLFRKSNLKPFERDISTEIYQAGSTPCNGVEGFNCYFPLQSYGFQPTNGVGYQPYRVVVLSFELLHAPATVCGPKKSTNLVKNKCVNFNFNGLTGTGVLTESNKKFLPFQQFGRDIADTTDAVRDPQTLEILDITPCSFGGVSVITPGTNTSNQVAVLYQDVNCTEVPVAIHADQLTPTWRVYSTGSNVFQTRAGCLIGAEHVNNSYECDIPIGAGICASYQTQTNSPRRARSVASQSIIAYTMSLGAENSVAYSNNSIAICTNFAISVTTEILPVSMTKTSVDCTMYICGDSTECSNLLLQYGSFCTQLNRALTGIAVEQDKNTQEVFAQVKQIYKTPPIKDFGGFNFSQILPDPSKPSKRSFIEDLLFNKVTLADAGFIKQYGDCLGDIAARDLICAQKFNGLTVLPPLLTDEMIAQYTSALLAGTITSGWTFGAGAALQIPFAMQMAYRFNGIGVTQNVLYENQKLIANQFNSAIGKIQDSLSSTASALGKLQDVVNQNAQALNTLVKQLSSNFGAISSVLNDILSRLDKVEAEVQIDRLITGRLQSLQTYVTQQLIRAAEIRASANLAATKMSECVLGQSKRVDFCGKGYHLMSFPQSAPHGVVFLHVTYVCAQEKNFTTAPAICHDGKAHFPREGVFVSNGTHWFVTQRNFYEPQIITTDNTFVSGNCDVVIGIVNNTVYDPLQPELDSGGSGYIPEAPRDGQAYVRKDGEWVLLSTFL

SEQ ID NO: 10139 - protein, 1177 aa, Artificial Sequence
  SARS-CoV-2/USA/CruiseA-23/2020__EPI_ISL_414482 spike protein (1-1147)(P715C_P1069C) Foldon construct
MFVFLVLLPLVSSQCVNLTTRTQLPPAYTNSFTRGVYYPDKVFRSSVLHSTQDLFLPFFSNVTWFHAIHVSGTNGTKRFDNPVLPFNDGVYFASTEKSNIIRGWIFGTTLDSKTQSLLIVNNATNVVIKVCEFQFCNDPFLGVYYHKNNKSWMESEFRVYSSANNCTFEYVSQPFLMDLEVKQGNFKNLREFVFKNIDGYFKIYSKHTPINLVRDLPQGFSALEPLVDLPIGINITRFQTLLALHRSYLTPGDSSSGWTAGAAAYYVGYLQPRTFLLKYNENGTITDAVDCALDPLSETKCTLKSFTVEKGIYQTSNFRVQPTESIVRFPNITNLCPFGEVFNATRFASVYAWNRKRISNCVADYSVLYNSASFSTFKCYGVSPTKLNDLCFTNVYADSFVIRGDEVRQIAPGQTGKIADYNYKLPDDFTGCVIAWNSNNLDSKVGGNYNYLYRLFRKSNLKPFERDISTEIYQAGSTPCNGVEGFNCYFPLQSYGFQPTNGVGYQPYRVVVLSFELLHAPATVCGPKKSTNLVKNKCVNFNFNGLTGTGVLTESNKKFLPFQQFGRDIADTTDAVRDPQTLEILDITPCSFGGVSVITPGTNTSNQVAVLYQDVNCTEVPVAIHADQLTPTWRVYSTGSNVFQTRAGCLIGAEHVNNSYECDIPIGAGICASYQTQTNSPRRARSVASQSIIAYTMSLGAENSVAYSNNSIAICTNFTISVTTEILPVSMTKTSVDCTMYICGDSTECSNLLLQYGSFCTQLNRALTGIAVEQDKNTQEVFAQVKQIYKTPPIKDFGGFNFSQILPDPSKPSKRSFIEDLLFNKVTLADAGFIKQYGDCLGDIAARDLICAQKFNGLTVLPPLLTDEMIAQYTSALLAGTITSGWTFGAGAALQIPFAMQMAYRFNGIGVTQNVLYENQKLIANQFNSAIGKIQDSLSSTASALGKLQDVVNQNAQALNTLVKQLSSNFGAISSVLNDILSRLDKVEAEVQIDRLITGRLQSLQTYVTQQLIRAAEIRASANLAATKMSECVLGQSKRVDFCGKGYHLMSFPQSAPHGVVFLHVTYVCAQEKNFTTAPAICHDGKAHFPREGVFVSNGTHWFVTQRNFYEPQIITTDNTFVSGNCDVVIGIVNNTVYDPLQPELDSGGSGYIPEAPRDGQAYVRKDGEWVLLSTFL

SEQ ID NO: 10140 - protein, 1177 aa, Artificial Sequence
  SARS-CoV-2/Hong Kong/case85_VM20002868/2020__EPI_ISL_414519 spike protein (1-1147)(P715C_P1069C) Foldon construct
MFVFLVLVPLVSSQCVNLTTRTQLPPAYTNSFTRGVYYPDKVFRSSVLHSTQDLFLPFFSNVTWFHAIHVSGTNGTKRFDNPVLPFNDGVYFASTEKSNIIRGWIFGTTLDSKTQSLLIVNNATNVVIKVCEFQFCNDPFLGVYYHKNNKSWMESEFRVYSSANNCTFEYVSQPFLMDLEGKQGNFKNLREFVFKNIDGYFKIYSKHTPINLVRDLPQGFSALEPLVDLPIGINITRFQTLLALHRSYLTPGDSSSGWTAGAAAYYVGYLQPRTFLLKYNENGTITDAVDCALDPLSETKCTLKSFTVEKGIYQTSNFRVQPTESIVRFPNITNLCPFGEVFNATRFASVYAWNRKRISNCVADYSVLYNSASFSTFKCYGVSPTKLNDLCFTNVYADSFVIRGDEVRQIAPGQTGKIADYNYKLPDDFTGCVIAWNSNNLDSKVGGNYNYLYRLFRKSNLKPFERDISTEIYQAGSTPCNGVEGFNCYFPLQSYGFQPTNGVGYQPYRVVVLSFELLHAPATVCGPKKSTNLVKNKCVNFNFNGLTGTGVLTESNKKFLPFQQFGRDIADTTDAVRDPQTLEILDITPCSFGGVSVITPGTNTSNQVAVLYQDVNCTEVPVAIHADQLTPTWRVYSTGSNVFQTRAGCLIGAEHVNNSYECDIPIGAGICASYQTQTNSPRRARSVASQSIIAYTMSLGAENSVAYSNNSIAICTNFTISVTTEILPVSMTKTSVDCTMYICGDSTECSNLLLQYGSFCTQLNRALTGIAVEQDKNTQEVFAQVKQIYKTPPIKDFGGFNFSQILPDPSKPSKRSFIEDLLFNKVTLADAGFIKQYGDCLGDIAARDLICAQKFNGLTVLPPLLTDEMIAQYTSALLAGTITSGWTFGAGAALQIPFAMQMAYRFNGIGVTQNVLYENQKLIANQFNSAIGKIQDSLSSTASALGKLQDVVNQNAQALNTLVKQLSSNFGAISSVLNDILSRLDKVEAEVQIDRLITGRLQSLQTYVTQQLIRAAEIRASANLAATKMSECVLGQSKRVDFCGKGYHLMSFPQSAPHGVVFLHVTYVCAQEKNFTTAPAICHDGKAHFPREGVFVSNGTHWFVTQRNFYEPQIITTDNTFVSGNCDVVIGIVNNTVYDPLQPELDSGGSGYIPEAPRDGQAYVRKDGEWVLLSTFL

SEQ ID NO: 10141 - protein, 1177 aa, Artificial Sequence; identical to SEQ ID NO: 10131
  SARS-CoV-2/England/200990660/2020__EPI_ISL_414523 spike protein (1-1147)(P715C_P1069C) Foldon construct

SEQ ID NO: 10142 - protein, 1177 aa, Artificial Sequence
  SARS-CoV-2/Australia/NSW09/2020__EPI_ISL_413595 spike protein (1-1147)(P715C_P1069C) Foldon construct
MFVFLVLLPLVSSQCVNLTTRTQLPPAYTNSFTRGVYYPDKVFRSSVLHSTQDLFLPFFSNVTWFHAIHVSGTNGTKRFDNPVLPFNDGVYFASTEKSNIIRGWIFGTTLDSKTQSLLIVNNATNVVIKVCEFQFCNDPFLGVYYHKNNKSWMESEFRVYSSANNCTFEYVSQPFLMDLEGKQGNFKNLREFVFKNIDGYFKIYSKHTPINLVRDLPQGFSALEPLVDLPIGINITRFQTLLALHRSYLTPGDSSSGWTAGAAAYYVGYLQPRTFLLKYNENGTITDAVDCALDPLSETKCTLKSFTVEKGIYQTSNFRVQPTESIVRFPNITNLCPFGEVFNATRFASVYAWNRKRISNCVADYSVLYNSASFSTFKCYGVSPTKLNDLCFTNVYADSFVIRGDEVRQIAPGQTGKIADYNYKLPDDFTGCVIAWNSNNLDSKVGGNYNYLYRLFRKSNLKPFERDISTEIYQAGSTPCNGVEGFNCYFPLQSYGFQPTNGVGYQPYRVVVLSFELLHAPATVCGPKKSTNLVKNKCVNFNFNGLTGTGVLTESNKKFLPFQQFGRDIADTTDAVRDPQTLEILDITPCSFGGVSVITPGTNTSNQVAVLYQDVNCTEVPVAIHADQLTPTWRVYSTGSNVFQTRAGCLIGAEHVNNSYECDIPIGAGICASYQTQTNSPRRARSVASQSIIAYTMSLGAENSVAYSNNSIAICTNFTISVTTEILPVSMTKTSVDCTMYICGDSTECSNLLLQYGSFCTQLNRALTGIAVEQDKNTQEVFAQVKQIYKTPPIKDFGGFNFSQILPDPSKPSKRSFIEDLLFNKVTLADAGFIKQYGDCLGDIAARDLICAQKFNGLTVLPPLLTDEMIAQYTSALLAGTITSGWTFGAGAALQIPFAMQMAYRFNGIGVTQNVLYENQKLIANQFNSAIGKIQDSLSFTASALGKLQDVVNQNAQALNTLVKQLSSNFGAISSVLNDILSRLDKVEAEVQIDRLITGRLQSLQTYVTQQLIRAAEIRASANLAATKMSECVLGQSKRVDFCGKGYHLMSFPQSAPHGVVFLHVTYVCAQEKNFTTAPAICHDGKAHFPREGVFVSNGTHWFVTQRNFYEPQIITTDNTFVSGNCDVVIGIVNNTVYDPLQPELDSGGSGYIPEAPRDGQAYVRKDGEWVLLSTFL

SEQ ID NO: 10143 - protein, 1177 aa, Artificial Sequence; identical to SEQ ID NO: 10123
  SARS-CoV-2/Australia/NSW10/2020__EPI_ISL_413596 spike protein (1-1147)(P715C_P1069C) Foldon construct

SEQ ID NO: 10144 - protein, 1177 aa, Artificial Sequence
  SARS-CoV-2/Switzerland/1000477797/2020__EPI_ISL_413023 spike protein (1-1147)(P715C_P1069C) Foldon construct
MFVFLVLLPLVSSQCVNLTTRTQLPPAYTNSFTRGVYYPDKVFRSSVLHSTQDLFLPFFSNVTWFHAIHVSGTNGTKRFDNPVLPFNDGVYFASTEKSNIIRGWIFGTTLDSKTQSLLIVNNATNVVIKVCEFQFCNDPFLGVYYHKNNKSWMESEFRVYSSANNCTFEYVSQPFLMDLEGKQGNFKNLREFVFKNIDGYFNIYSKHTPINLVRDLPQGFSALEPLVDLPIGINITRFQTLLALHRSYLTPGDSSSGWTAGAAAYYVGYLQPRTFLLKYNENGTITDAVDCALDPLSETKCTLKSFTVEKGIYQTSNFRVQPTESIVRFPNITNLCPFGEVFNATRFASVYAWNRKRISNCVADYSVLYNSASFSTFKCYGVSPTKLNDLCFTNVYADSFVIRGDEVRQIAPGQTGKIADYNYKLPDDFTGCVIAWNSNNLDSKVGGNYNYLYRLFRKSNLKPFERDISTEIYQAGSTPCNGVEGFNCYFPLQSYGFQPTNGVGYQPYRVVVLSFELLHAPATVCGPKKSTNLVKNKCVNFNFNGLTGTGVLTESNKKFLPFQQFGRDIADTTDAVRDPQTLEILDITPCSFGGVSVITPGTNTSNQVAVLYQGVNCTEVPVAIHADQLTPTWRVYSTGSNVFQTRAGCLIGAEHVNNSYECDIPIGAGICASYQTQTNSPRRARSVASQSIIAYTMSLGAENSVAYSNNSIAICTNFTISVTTEILPVSMTKTSVDCTMYICGDSTECSNLLLQYGSFCTQLNRALTGIAVEQDKNTQEVFAQVKQIYKTPPIKDFGGFNFSQILPDPSKPSKRSFIEDLLFNKVTLADAGFIKQYGDCLGDIAARDLICAQKFNGLTVLPPLLTDEMIAQYTSALLAGTITSGWTFGAGAALQIPFAMQMAYRFNGIGVTQNVLYENQKLIANQFNSAIGKIQDSLSSTASALGKLQDVVNQNAQALNTLVKQLSSNFGAISSVLNDILSRLDKVEAEVQIDRLITGRLQSLQTYVTQQLIRAAEIRASANLAATKMSECVLGQSKRVDFCGKGYHLMSFPQSAPHGVVFLHVTYVCAQEKNFTTAPAICHDGKAHFPREGVFVSNGTHWFVTQRNFYEPQIITTDNTFVSGNCDVVIGIVNNTVYDPLQPELDSGGSGYIPEAPRDGQAYVRKDGEWVLLSTFL

SEQ ID NO: 10145 - protein, 1177 aa, Artificial Sequence
  SARS-CoV-2/Belgium/BA-02291/2020__EPI_ISL_415159 spike protein (1-1147)(P715C_P1069C) Foldon construct
MFVFLVLLPLVSSQCVNLTTRTQLPPAYTNSFTRGVYYPDKVFRSSVLHSTQDLFLPFFSNVTWFHAIHVSGTNGTKRFDNPVLPFNDGVYFASTEKSNIIRGWIFGTTLDSKTQSLLIVNNATNVVIKVCEFQFCNDPFLGVYYHKNNKSWMESEFRVYSSANNCTFEYVSQPFLMDLEGKQGNFKNLREFVFKNIDGYFKIYSKHTPINLVRDLPQGFSALEPLVDLPIGINITRFQTLLALHRSYLTPGDSSSGWTAGAAAYYVGYLQPRTFLLKYNENGTITDAVDCALDPLSETKCTLKSFTVEKGIYQTSNFRVQPTESIVRFPNITNLCPFGEVFNATRFASVYAWNRKRISNCVADYSVLYNSASFSTFKCYGVSPTKLNDLCFTNVYADSFVIRGDEVRQIAPGQTGKIADYNYKLPDDFTGCVIAWNSNNLDSKVGGNYNYLYRLFRRSNLKPFERDISTEIYQAGSTPCNGVEGFNCYFPLQSYGFQPTNGVGYQPYRVVVLSFELLPAPATVCGPKKSTNLVKNKCVNFNFNGLTGTGVLTESNKKFLPFQQFGRDIADTTDAVRDPQTLEILDITPCSFGGVSVITPGTNTSNQVAVLYQGVNCTEVPVAIHADQLTPTWRVYSTGSNVFQTRAGCLIGAEHVNNSYECDIPIGAGICASYQTQTNSPRRARSVASQSIIAYTMSLGAENSVAYSNNSIAICTNFTISVTTEILPVSMTKTSVDCTMYICGDSTECSNLLLQYGSFCTQLNRALTGIAVEQDKNTQEVFAQVKQIYKTPPIKDFGGFNFSQILPDPSKPSKRSFIEDLLFNKVTLADAGFIKQYGDCLGDIAARDLICAQKFNGLTVLPPLLTDEMIAQYTSALLAGTITSGWTFGAGAALQIPFAMQMAYRFNGIGVTQNVLYENQKLIANQFNSAIGKIQDSLSSAAPALGKLQDVVNQNAQALNTLVKQLSSNFGAISSVLNDILSRLDKVEAEVQIDRLITGRLQSLQTYVTQQLIRAAEIRASANLAATKMSECVLGQSKRVDFCGKGYHLMSFPQSAPHGVVFLHVTYVCAQEKNFTTAPAICHDGKAHFPREGVFVSNGTHWFVTQRNFYEPQIITTDNTFVSGNCDVVIGIVNNTVYDPLQPELDSGGSGYIPEAPRDGQAYVRKDGEWVLLSTFL

SEQ ID NO: 10146 - protein, 1177 aa, Artificial Sequence
  SARS-CoV-2/USA/WA8-UW5/2020__EPI_ISL_413486 spike protein (1-1147)(P715C_P1069C) Foldon construct
MFVFLVLLPLVSSQCVNLTTRTQLPPAYTNSFTRGVYYPDKVFRSSVLHSTQDLFLPFFSNVTWFHAIHVSGTNGTKRFDNPVLPFNDGVYFASTEKSNIIRGWIFGTTLDSKTQSLLIVNNATNVVIKVCEFQFCNDPFLGVYYHKNNKSWMESEFRVYSSANNCTFEYVSQPFLMDLEGKQGNFKNLREFVFKNIDGYFKIYSKHTPINLVRDLPQGFSALEPLVDLPIGINITRFQTLLALHRSYLTPGDSSSGWTAGAAAYYVGYLQPRTFLLKYNENGTITDAVDCALDPLSETKCTLKSFTVEKGIYQTSNFRVQPTESIVRFPNITNLCPFGEVFNATRFASVYAWNRKRISNCVADYSVLYNSASFSTFKCYGVSPTKLNDLCFTNVYADSFVIRGDEVRQIAPGQTGKIADYNYKLPDDFTGCVIAWNSNNLDSKVGGNYNYLYRLFRKSNLKPFERDISTEIYQAGSTPCNGVEGFNCYFPLQSYGFQPTNGVGYQPYRVVVLSFELLHAPATVCGPKKSTNLVKNKCVNFNFNGLTGTGVLTESNKKFLPFQQFGRDIADTTDAVRDPQTLEILDITPCSFGGVSVITPGTNTSNQVAVLYQDVNCTEVPVAIHADQLTPTWRVYSTGSNVFQTRAGCLIGAEYVNNSYECDIPIGAGICASYQTQTNSPRRARSVASQSIIAYTMSLGAENSVAYSNNSIAICTNFTISVTTEILPVSMTKTSVDCTMYICGDSTECSNLLLQYGSFCTQLNRALTGIAVEQDKNTQEVFAQVKQIYKTPPIKDFGGFNFSQILPDPSKPSKRSFIEDLLFNKVTLADAGFIKQYGDCLGDIAARDLICAQKFNGLTVLPPLLTDEMIAQYTSALLAGTITSGWTFGAGAALQIPFAMQMAYRFNGIGVTQNVLYENQKLIANQFNSAIGKIQDSLSSTASALGKLQDVVNQNAQALNTLVKQLSSNFGAISSVLNDILSRLDKVEAEVQIDRLITGRLQSLQTYVTQQLIRAAEIRASANLAATKMSECVLGQSKRVDFCGKGYHLMSFPQSAPHGVVFLHVTYVCAQEKNFTTAPAICHDGKAHFPREGVFVSNGTHWFVTQRNFYEPQIITTDNTFVSGNCDVVIGIVNNTVYDPLQPELDSGGSGYIPEAPRDGQAYVRKDGEWVLLSTFL

SEQ ID NO: 10147 - protein, 1177 aa, Artificial Sequence
  SARS-CoV-2/England/20102000506/2020__EPI_ISL_415147 spike protein (1-1147)(P715C_P1069C) Foldon construct
MFVFLVLLPLVSSQCVNLTTRTQLPPAYTNSFTRGVYYPDKVFRSSVLHSTQDLFLPFFSNVTWFHAIHVSGTNGTKRFDNPVLPFNDGVYFASTEKSNIIRGWIFGTTLDSKTQSLLIVNNATNVVIKVCEFQFCNDPFLGVYYHKNNKSWMESEFRVYSSANNCTFEYVSQPFLMDLEGKQGNFKNLREFVFKNIDGYFKIYSKHTPINLVRDLPQGFSALEPLVDLPIGINITRFQTLLALHRSYLTPGDSSSGWTAGAAAYYVGYLQPRTFLLKYNENGTITDAVDCALDPLSETKCTLKSFTVEKGIYQTSNFRVQPTESIVRFPNITNLCPFGEVFNATRFASVYAWNRKRISNCVADYSVLYNSASFSTFKCYGVSPTKLNDLCFTNVYADSFVIRGDEVRQIAPGQTGKIADYNYKLPDDFTGCVIAWNSNNLDSKVGGNYNYLYRLFRKSNLKPFERDISTEIYQAGSTPCNGVEGFNCYFPLQSYGFQPTNGVGYQPYRVVVLSFELLHAPATVCGPKKSTNLVKNKCVNFNFNGLTGTGVLTESNKKFLPFQQFGRDIADTTDAVRDPQTLEILDITPCSFGGVSVITPGTNTSNQVAVLYQGVNCTEVPVAIHADQLTPTWRVYSTGSNVFQTRAGCLIGAEHVNNSYECDIPIGAGICASYQTQTNSPRRARSVASQSIIAYTMSLGAENSVAYSNNSIAICTNFTISVTTEILPVSMTKTSVDCTMYICGDSTECSNLLLQYGSFCTQLNRALTGIAVEQDKNTQEVFAQVKQIYKTPPIKDFGGFNFSQILPDPSKPSKRSFIEDLLFNKVTLADAGFIKQYGYCLGDIAARDLICAQKFNGLTVLPPLLTDEMIAQYTSALLAGTITSGWTFGAGAALQIPFAMQMAYRFNGIGVTQNVLYENQKLIANQFNSAIGKIQDSLSSTASALGKLQDVVNQNAQALNTLVKQLSSNFGAISSVLNDILSRLDKVEAEVQIDRLITGRLQSLQTYVTQQLIRAAEIRASANLAATKMSECVLGQSKRVDFCGKGYHLMSFPQSAPHGVVFLHVTYVCAQEKNFTTAPAICHDGKAHFPREGVFVSNGTHWFVTQRNFYEPQIITTDNTFVSGNCDVVIGIVNNTVYDPLQPELDSGGSGYIPEAPRDGQAYVRKDGEWVLLSTFL

SEQ ID NO: 10148 - protein, 1177 aa, Artificial Sequence
  SARS-CoV-2/Belgium/VAG-03013/2020__EPI_ISL_415155 spike protein (1-1147)(P715C_P1069C) Foldon construct
MFVFLVLLPLVSSQCVNLTTRTQLPPAYTNSFTRGVYYPDKVFRSSVLHSTQDLFLPFFSNVTWFHAIHVSGTNGTKRFDNPVLPFNDGVYFASTEKSNIIRGWIFGTTLDSKTQSLLIVNNATNVVIKVCEFQFCNDPFLGVYYHKNNKSWMESEFRVYSSANNCTFEYVSQPFLMDLEGKQGNFKNLREFVFKNIDGYFKIYSKHTPINLVRDLPQGFSALEPLVDLPIGINITRFQTLLALHRSYLTPGDSSSGWTAGAAAYYVGYLQPRTFLLKYNENGTITDAVDCALDPLSETKCTLKSFTVEKGIYQTSNFRVQPTESIVRFPNITNLCPFGEVFNATRFASVYAWNRKRISNCVADYSVLYNSASFSTFKCYGVSPTKLNDLCFTNVYADSFVIRGDEVRQIAPGQTGKIADYNYKLPDDFTGCVIAWNSNNLDSKVGGNYNYLYRLFRKSNLKPFERDISTEIYQAGSTPCNGVEGFNCYFPLQSYGFQPTNGVGYQPYRVVVLSFELLHAPATVCGPKKSTNLVKNKCVNFNFNGLTGTGVLTESNKKFLPFQQFGRDIADTTDAVRDPQTLEILDITPCSFGGVSVITPGTNTSNQVAVLYQGVNCTEVPVAIHADQLTPTWRVYSTGSNVFQTRAGCLIGAEHVNNSYECDIPIGAGICASYQTQTNSPRRARSVASQSIIAYTMSLGAENSVAYSNNSIAICTNFTISVTTEILPVSMTKTSVDCTMYICGDSTECSNLLLQYGSFCTQLNRALTGIAVEQDKNTQEVFAQVKQIYKTPPIKDFGGFNFSQILPDPSKPSKRSFIEDLLFNKVTLADAGFIKQYGDCLGDIAARDLICAQKFNGLTVLPPLLTDEMIAQYTSALLAGTITSGWTFGAGAALQIPFAMQMAYRFNGIGVTQNVLYENQKLIANQFNSAIGKIQDSLSSTATALGKLQDVVNQNAQALNTLVKQLSSNFGAISSVLNDILSRLDKVEAEVQIDRLITGRLQSLQTYVTQQLIRAAEIRASANLAATKMSECVLGQSKRVDFCGKGYHLMSFPQSAPHGVVFLHVTYVCAQEKNFTTAPAICHDGKAHFPREGVFVSNGTHWFVTQRNFYEPQIITTDNTFVSGNCDVVIGIVNNTVYDPLQPELDSGGSGYIPEAPRDGQAYVRKDGEWVLLSTFL

SEQ ID NO: 10149 - protein, 1177 aa, Artificial Sequence
  SARS-CoV-2/Belgium/BC-03016/2020__EPI_ISL_415157 spike protein (1-1147)(P715C_P1069C) Foldon construct
MFVFLVLLPLVSSQCVNLTTRTQLPPAYTNSFTRGVYYPDKVFRSSVLHSTQDLFLPFFSNVTWFHAIHVSGTNGTKRFDNPVLPFNDGVYFASTEKSNIIRGWIFGTTLDSKTQSLLIVNNATNVVIKVCEFQFCNDPFLGVYYHKNNKSWMESEFRVYSSANNCTFEYVSQPFLMDLEGKQGNFKNLREFVFKNIDGYFKIYSKHTPINLVRDLPQGFSALEPLVDLPIGINITRFQTLLALHRSYLTPGDSSSGWTAGAAAYYVGYLQPRTFLLKYNENGTITDAVDCALDPLSETKCTLKSFTVEKGIYQTSNFRVQPTESIVRFPNITNLCPFGEVFNATRFASVYAWNRKRISNCVADYSVLYNSASFSTFKCYGVSPTKLNDLCFTNVYADSFVIRGDEVRQIAPGQTGKIADYNYKLPDDFTGCVIAWNSNNLDSKVGGNYNYLYRLFRKSNLKPFERDISTEIYQAGSTPCNGVEGFNCYFPLQSYGFQPTNGVGYQPYRVVVLSFELLHAPATVCGPKKSTNLVKNKCVNFNFNGLTGTGVLTESNKKFLPFQQFGRDIADTTDAVRDPQTLEILDITPCSFGGVSVITPGTNTSNQVAVLYQGVNCTEVPVAIHADQLTPTWRVYSTGSNVFQTRAGCLIGAEHVNNSYECDIPIGAGICASYQTQTNSPRRARSVASQSIIAYTMSLGAENSVAYSNNSIAICTNFTISVTTEILPVSMTKTSVDCTMYICGDSTECSNLLLQYGSFCTQLNRALTGIAVEQDKNTQEVFAQVKQIYKTPPIKDFGGFNFSQILPDPSKPSKRSFIEDLLFNKVTLADAGFIKQYGDCLGDIAARDLICAQKFNGLTVLPPLLTDEMIAQYTSALLAGTITSGWTFGAGAALQIPFAMQMAYRFNGIGVTQNVLYENQKLIANQFNSAIGKIQDSLSSTAPALGKLQDVVNQNAQALNTLVKQLSSNFGAISSVLNDILSRLDKVEAEVQIDRLITGRLQSLQTYVTQQLIRAAEIRASANLAATKMSECVLGQSKRVDFCGKGYHLMSFPQSAPHGVVFLHVTYVCAQEKNFTTAPAICHDGKAHFPREGVFVSNGTHWFVTQRNFYEPQIITTDNTFVSGNCDVVIGIVNNTVYDPLQPELDSGGSGYIPEAPRDGQAYVRKDGEWVLLSTFL

SEQ ID NO: 10150 - protein, 1177 aa, Artificial Sequence
  SARS-CoV-2/Germany/BavPat3/2020__EPI_ISL_414521 spike protein (1-1147)(P715C_P1069C) Foldon construct
MFVFLVLLPLVSSQCVNLTTRTQLPPAYTNSFTRGVYYPDKVFRSSVLHSTQDLFLPFFSNVTWFHAIHVSGTNGTKRFDNPVLPFNDGVYFASTEKSNIIRGWIFGTTLDSKTQSLLIVNNATNVVIKVCEFQFCNDPFLGVYYHKNNKSWMESEFRVYSSANNCTFEYVSQPFLMDLEGKQGNFKNLREFVFKNIDGYFKIYSKHTPINLVRDLPQGFSALEPLVDLPIGINITRFQTLLALHRSYLTPGDSSSGWTAGAAAYYVGYLQPRTFLLKYNENGTITDAVDCALDPLSETKCTLKSFTVEKGIYQTSNFRVQPTESIVRFPNITNLCPFGEVFNATRFASVYAWNRKRISNCVADYSVLYNSASFSTFKCYGVSPTKLNDLCFTNVYADSFVIRGDEVRQIAPGQTGKIADYNYKLPDDFTGCVIAWNSNNLDSKVGGNYNYLYRLFRKSNLKPFERDISTEIYQAGSTPCNGVEGFNCYFPLQSYGFQPTNGVGYQPYRVVVLSFELLHAPATVCGPKKSTNLVKNKCVNFNFNGLTGTGVLTESNKKFLPFQQFGRDIADTTDAVRDPQTLEILDITPCSFGGVSVITPGTNTSNQVAVLYQDVNCTEVPVAIHADQLTPTWRVYSTGSNVFQTRAGCLIGAEHVNNSYECDIPIGAGICASYQTQTNSPRRARSVASQSIIAYTMSLGAENSVAYSNNSIAICTNFTISVTTEILPVSMTKTSVDCTMYICGDSTECSNLLLQYGSFCTQLNRALTGIAVEQDKNTQQVFAQVKQIYKTPPIKDFGGFNFSQILPDPSKPSKRSFIEDLLFNKVTLADAGFIKQYGDCLGDIAARDLICAQKFNGLTVLPPLLTDEMIAQYTSALLAGTITSGWTFGAGAALQIPFAMQMAYRFNGIGVTQNVLYENQKLIANQFNSAIGKIQDSLSSTASALGKLQDVVNQNAQALNTLVKQLSSNFGAISSVLNDILSRLDKVEAEVQIDRLITGRLQSLQTYVTQQLIRAAEIRASANLAATKMSECVLGQSKRVDFCGKGYHLMSFPQSAPHGVVFLHVTYVCAQEKNFTTAPAICHDGKAHFPREGVFVSNGTHWFVTQRNFYEPQIITTDNTFVSGNCDVVIGIVNNTVYDPLQPELDSGGSGYIPEAPRDGQAYVRKDGEWVLLSTFL

SEQ ID NO: 10151 - protein, 1177 aa, Artificial Sequence
  SARS-CoV-2/France/HF1805/2020__EPI_ISL_414628 spike protein (1-1147)(P715C_P1069C) Foldon construct
MFVFLVLLPLVSSQCVNLTTRTQLPPAYTNSFTRGVYYPDKVFRSSVLHSTQDLFLPFFSNVTWFHAIHVSGTNGTKRFDNPVLPFNDGVYFASTEKSNIIRGWIFGTTLDSKTQSLLIVNNATNVVIKVCEFQFCNDPFLGVYYHKNNKSWMESEFRVYSSANNCTFEYVSQPFLMDLEGKQGNFKNLREFVFKNIDGYFKIYSKHTPINLVRDLPQGFSALEPLVDLPIGINITRFQTLLALHRSYLTPGDSSSGWTAGAAAYYVGYLQPRTFLLKYNENGTITDAVDCALDPLSETKCTLKSFTVEKGIYQTSNFRVQPTESIVRFPNITNLCPFGEVFNATRFASVYAWNRKRISNCVADYSVLYNSASFSTFKCYGVSPTKLNDLCFTNVYADSFVIRGDEVRQIAPGQTGKIADYNYKLPDDFTGCVIAWNSNNLDSKVGGNYNYLYRLFRKSNLKPFERDISTEIYQAGSTPCNGVEGFNCYFPLQSYGFQPTNGVGYQPYRVVVLSFELLHAPATVCGPKKSTNLVKNKCVNFNFNGLTGTGVLTESNKKFLPFQQFGRDIADTTDAVRDPQTLEILDITPCSFGGVSVITPGTNTSNQVAVLYQGVNCTEVPVAIHADQLTPTWRVYSTGSNVFQTRAGCLIGAEHVNNSYECDIPIGAGICASYQTQTNSPRRARSVASQSIIAYTMSLGAENSVAYSNNSIAICTNFTISVTTEILPVSMTKTSVDCTMYICGDSTECSNLLLQYGSFCTQLNRALTGIAVEQDKNTQEVFAQVKQIYKTPPIKDFGGFNFSQILPDPSKPSKRSFIEDLLFNKVTLADAGFIKQYGDCLGDIAARDLICAQKFNGLTVLPPLLTDEMIAQYTSALLAGTITSGWTFGAGAALQIPFAMQMAYRFNGIGVTQNVLYENQKLIANQFNSAIGKIQDSLSSTASALGKLQDVVNQNAQALNTLVKQLSSNFGAISSVLNDILSRLDKVEAEVQIDRLITGRLQSLQTYVTQQLIRAAEIRASANLAATKMSECVLGQSKRVDFCGKGYHLMSFPQSAPHGVVFLHVTYVCAQEKNFTTAPAICHDGKAHFPREGVFVSNGTHWFVTQRNFYEPQIITTDNTFVSGNCDVVIGVVNNTVYDPLQPELDSGGSGYIPEAPRDGQAYVRKDGEWVLLSTFL

SEQ ID NO: 10152 - protein, 1177 aa, Artificial Sequence
  SARS-CoV-2/Netherlands/ZuidHolland_9/2020__EPI_ISL_414445 spike protein (1-1147)(P715C_P1069C) Foldon construct
MFVFLVLLPLVSSQCVNLTTRTQLPPAYTNSFTRGVYYPDKVFRSSVLHSTQDLFLPFFSNVTWFHAIHVSGTNGTKRFDNPVLPFNDGVYFASTEKSNIIRGWIFGTTLDSKTQSLLIVNNATNVVIKVCEFQFCNDPFLGVYYHKNNKSWMESEFRVYSSANNCTFEYVSQPFLMDLEGKQGNFKNLREFVFKNIDGYFKIYSKHTPINLVRDLPQGFSALEPLVDLPIGINITRFQTLLALHRSYLTPGDSSSGWTAGAAAYYVGYLQPRTFLLKYNENGTITDAVDCALDPLSETKCTLKSFTVEKGIYQTSNFRVQPTESIVRFPNITNLCPFGEVFNATRFASVYAWNRKRISNCVADYSVLYNSASFSTFKCYGVSPTKLNDLCFTNVYADSFVIRGDEVRQIAPGQTGKIADYNYKLPDDFTGCVIAWNSNNLDSKVGGNYNYLYRLFRKSNLKPFERDISTEIYQAGSTPCNGVEGFNCYFPLQSYGFQPTNGVGYQPYRVVVLSFELLHAPATVCGPKKSTNLVKNKCVNFNFNGLTGTGVLTESNKKFLPFQQFGRDIADTTDAVRDPQTLEILDITPCSFGGVSVITPGTNTSNQVAVLYQGVNCTEVPVAIHADQLTPTWRVYSTGSNVFQTRAGCLIGAEHVNNSYECDIPIGAGICASYQTQTNSPRRARSVASQSIIAYTMSLGAENSVAYSNNSIAICTNFTISVTTEILPVSMTKTSVDCTMYICGDSTECSNLLLQYGSFCTQLNRALTGIAVEQDKNTQEVFAQVKQIYKTPPIKDFGGFNFSQILPDPSKPSKRSFIEDLLFNKVTLADAGFIKQYGDCLGDIAARDLICVQKFNGLTVLPPLLTDEMIAQYTSALLAGTITSGWTFGAGAALQIPFAMQMAYRFNGIGVTQNVLYENQKLIANQFNSAIGKIQDSLSSTASALGKLQDVVNQNAQALNTLVKQLSSNFGAISSVLNDILSRLDKVEAEVQIDRLITGRLQSLQTYVTQQLIRAAEIRASANLAATKMSECVLGQSKRVDFCGKGYHLMSFPQSAPHGVVFLHVTYVCAQEKNFTTAPAICHDGKAHFPREGVFVSNGTHWFVTQRNFYEPQIITTDNTFVSGNCDVVIGIVNNTVYDPLQPELDSGGSGYIPEAPRDGQAYVRKDGEWVLLSTFL

SEQ ID NO: 10153 - protein, 1177 aa, Artificial Sequence
  SARS-CoV-2/Finland/FIN03032020A/2020__EPI_ISL_413602 spike protein (1-1147)(P715C_P1069C) Foldon construct
MFVFLVLLPLVSSQCVNLTTRTQLPPAYTNSFTRGVYYPDKVFRSSVLHSTQDLFLPFFSNVTWFHAIHVSGTNGTKRFDNPVLPFNDGVYFASTEKSNIIRGWIFGTTLDSKTQSLLIVNNATNVVIKVCEFQFCNDPFLGVYYHKNNKSWMESEFRVYSSANNCTFEYVSQPFLMDLEGKQGNFKNLREFVFKNIDGYFKIYSKHTPINLVRDLPQGFSALEPLVDLPIGINITRFQTLLALHRSYLTPGDSSSGWTAGAAAYYVGYLQPRTFLLKYNENGTITDAVDCALDPLSETKCTLKSFTVEKGIYQTSNFRVQPTESIVRFPNITNLCPFGEVFNATRFASVYAWNRKRISNCVADYSVLYNSASFSTFKCYGVSPTKLNDLCFTNVYADSFVIRGDEVRQIAPGQTGKIADYNYKLPDDFTGCVISWNSNNLDSKVGGNYNYLYRLFRKSNLKPFERDISTEIYQAGSTPCNGVEGFNCYFPLQSYGFQPTNGVGYQPYRVVVLSFELLHAPATVCGPKKSTNLVKNKCVNFNFNGLTGTGVLTESNKKFLPFQQFGRDIADTTDAVRDPQTLEILDITPCSFGGVSVITPGTNTSNQVAVLYQGVNCTEVPVAIHADQLTPTWRVYSTGSNVFQTRAGCLIGAEHVNNSYECDIPIGAGICASYQTQTNSPRRARSVASQSIIAYTMSLGAENSVAYSNNSIAICTNFTISVTTEILPVSMTKTSVDCTMYICGDSTECSNLLLQYGSFCTQLNRALTGIAVEQDKNTQEVFAQVKQIYKTPPIKDFGGFNFSQILPDPSKPSKRSFIEDLLFNKVTLADAGFIKQYGDCLGDIAARDLICAQKFNGLTVLPPLLTDEMIAQYTSALLAGTITSGWTFGAGAALQIPFAMQMAYRFNGIGVTQNVLYENQKLIANQFNSAIGKIQDSLSSTASALGKLQDVVNQNAQALNTLVKQLSSNFGAISSVLNDILSRLDKVEAEVQIDRLITGRLQSLQTYVTQQLIRAAEIRASANLAATKMSECVLGQSKRVDFCGKGYHLMSFPQSAPHGVVFLHVTYVCAQEKNFTTAPAICHDGKAHFPREGVFVSNGTHWFVTQRNFYEPQIITTDNTFVSGNCDVVIGIVNNTVYDPLQPELDSGGSGYIPEAPRDGQAYVRKDGEWVLLSTFL

SEQ ID NO: 10154 - protein, 1177 aa, Artificial Sequence
  SARS-CoV-2/France/GE1977/2020__EPI_ISL_414632 spike protein (1-1147)(P715C_P1069C) Foldon construct
MFVFLVLLPLVSSQCVNLTTRTQLPPAYTNSFTRGVYYPDKVFRSSVLHSTQDLFLPFFSNVTWFHAIHVSGTNGTKRFDNPVLPFNDGVYFASTEKSNIIRGWIFGTTLDSKTQSLLIVNNATNVVIKVCEFQFCNDPFLGVYYHKNNKSWMESEFRVYSSANNCTFEYVSQPFLMDLEGKQGNFKNLREFVFKNIDGYFKIYSKHTPINLVRDLPQGFSALEPLVDLPIGINITRFQTLLALHRSYLTPGDSSSGWTAGAAAYYVGYLQPRTFLLKYNENGTITDAVDCALDPLSETKCTLKSFTVEKGIYQTSNFRVQPTESIVRFPNITNLCPFGEVFNATRFASVYAWNRKRISNCVADYSVLYNSASFSTFKCYGVSPTKLNDLCFTNVYADSFVIRGDEVRQIAPGQTGKIADYNYKLPDDFTGCVIAWNSNNLDSKVGGNYNYLYRLFRKSNLKPFERDISTEIYQAGSTPCNGVEGFNCYFPLQSYGFQPTNGVGYQPYRVVVLSFELLHAPATVCGPKKSTNLVKNKCVNFNFNGLTGTGVLTESNKKFLPFQQFGRDIADTTDAVRDPQTLEILDITPCSFGGVSVITPGTNTSNQVAVLYQGVNCTEVPVAIHADQLTPTWRVYSTGSNVFQTRAGCLIGAEHVNNSYECDIPIGAGICASYQTQTNSPRRARSVASQSIIAYTMSLGAENSVAYSNNSIAICTNFTISVTTEILPVSMTKTSVDCTMYICGDSTECSNLLLQYGSFCTQLNRALTGIAVEQDKNTQEVFAQVKQIYKTPPIKDFGGFNFSQILPDPSKPSKRSFIEDLLFNKVTLADAGFIKQYGDCLGDIAARDLICAQKFNGLTVLPPLLTDEMIAQYTSALLAGTITSGWTFGAGAALQIPFAMQMAYRFNGIGVTQNVLYENQKLIANQFNSAIGKIQDSLFSTASALGKLQDVVNQNAQALNTLVKQLSSNFGAISSVLNDILSRLDKVEAEVQIDRLITGRLQSLQTYVTQQLIRAAEIRASANLAATKMSECVLGQSKRVDFCGKGYHLMSFPQSAPHGVVFLHVTYVCAQEKNFTTAPAICHDGKAHFPREGVFVSNGTHWFVTQRNFYEPQIITTDNTFVSGNCDVVIGIVNNTVYDPLQPELDSGGSGYIPEAPRDGQAYVRKDGEWVLLSTFL

SEQ ID NO: 10155 - protein, 1177 aa, Artificial Sequence
  SARS-CoV-2/Finland/FIN-313/2020__EPI_ISL_414641 spike protein (1-1147)(P715C_P1069C) Foldon construct
MFVFLVLLPLVSSQCVNLTTRTQLPPAYTNSFTRGVYYPDKVFRSSVLHSTQDLFLPFFSNVTWFHAIHVSGTNGTKRFDNPVLPFNDGVYFASTEKSNIIRGWIFGTTLDSKTQSLLIVNNATNVVIKVCEFQFCNDPFLGVYYHKNNKSWMESEFRVYSSANNCTFEYVSQPFLMDLEGKQGNFKNLREFVFKNIDGYFKIYSKHTPINLVRDLPQGFSALEPLVDLPIGINITRFKTLLALHRSYLTPGDSSSGWTAGAAAYYVGYLQPRTFLLKYNENGTITDAVDCALDPLSETKCTLKSFTVEKGIYQTSNFRVQPTESIVRFPNITNLCPFGEVFNATRFASVYAWNRKRISNCVADYSVLYNSASFSTFKCYGVSPTKLNDLCFTNVYADSFVIRGDEVRQIAPGQTGKIADYNYKLPDDFTGCVIAWNSNNLDSKVGGNYNYLYRLFRKSNLKPFERDISTEIYQAGSTPCNGVEGFNCYFPLQSYGFQPTNGVGYQPYRVVVLSFELLHAPATVCGPKKSTNLVKNKCVNFNFNGLTGTGVLTESNKKFLPFQQFGRDIADTTDAVRDPQTLEILDITPCSFGGVSVITPGTNTSNQVAVLYQGVNCTEVPVAIHADQLTPTWRVYSTGSNVFQTRAGCLIGAEHVNNSYECDIPIGAGICASYQTQTNSPRRARSVASQSIIAYTMSLGAENSVAYSNNSIAICTNFTISVTTEILPVSMTKTSVDCTMYICGDSTECSNLLLQYGSFCTQLNRALTGIAVEQDKNTQEVFAQVKQIYKTPPIKDFGGFNFSQILPDPSKPSKRSFIEDLLFNKVTLADAGFIKQYGDCLGDIAARDLICAQKFNGLTVLPPLLTDEMIAQYTSALLAGTITSGWTFGAGAALQIPFAMQMAYRFNGIGVTQNVLYENQKLIANQFNSAIGKIQDSLSSTASALGKLQDVVNQNAQALNTLVKQLSSNFGAISSVLNDILSRLDKVEAEVQIDRLITGRLQSLQTYVTQQLIRAAEIRASANLAATKMSECVLGQSKRVDFCGKGYHLMSFPQSAPHGVVFLHVTYVCAQEKNFTTAPAICHDGKAHFPREGVFVSNGTHWFVTQRNFYEPQIITTDNTFVSGNCDVVIGIVNNTVYDPLQPELDSGGSGYIPEAPRDGQAYVRKDGEWVLLSTFL

SEQ ID NO: 10156 - protein, 1177 aa, Artificial Sequence
  SARS-CoV-2/Netherlands/ZuidHolland_2/2020__EPI_ISL_414556 spike protein (1-1147)(P715C_P1069C) Foldon construct
MFVFLVLLPLVSSQCVNLTTRTQLPPAYTNSFTRGVYYPDKVFRSSVLHSTQDLFLPFFSNVTWFHAIHVSGTNGTKRFDNPVLPFNDGVYFASTEKSNIIRGWIFGTTLDSKTQSLLIVNNATNVVIKVCEFQFCNDPFLGVYYHKNNKSWMESEFRVYSSANNCTFEYVSQPFLMDLEGKQGNFKNLREFVFKNIDGYFKIYSKHTPINLVRDLPQGFSALEPLVDLPIGINITRFQTLLALHRSYLTPGDSSSGWTAGAAAYYVGYLQPRTFLLKYNENGTITDAVDCALDPLSETKCTLKSFTVEKGIYQTSNFRVQPTESIVRFPNITNLCPFGEVFNATRFASVYAWNRKRISNCVADYSVLYNSASFSTFKCYGVSPTKLNDLCFTNVYADSFVIRGDEVRQIAPGQTGKIADYNYKLPDDFTGCVIAWNSNNLDSKVGGNYNYLYRLFRKSNLKPFERDISTEIYQAGSTPCNGVEGFNCYFPLQSYGFQPTNGVGYQPYRVVVLSFELLHAPATVCGPKKSTNLVKNKCVNFNFNGLTGTGVLTESNKKFLPFQQFGRDIADTTDAVRDPQTLEILDITPCSFGGVSVITPGTNTSNQVAVLYQGVNCTEVPVAIHADQLTPTWRVYSTGSNVFQTRAGCLIGAEHVNNSYECDIPIGAGICASYQTQTNSPRRARSVASQSIIAYTMSLGAENSVAYSNNSIAICTNFTISVTTEILPVSMTKTSVDCTMYICGDSTECSNLLLQYGSFCTQLNRALTGIALEQDKNTQEVFAQVKQIYKTPPIKDFGGFNFSQILPDPSKPSKRSFIEDLLFNKVTLADAGFIKQYGDCLGDIAARDLICAQKFNGLTVLPPLLTDEMIAQYTSALLAGTITSGWTFGAGAALQIPFAMQMAYRFNGIGVTQNVLYENQKLIANQFNSAIGKIQDSLSSTASALGKLQDVVNQNAQALNTLVKQLSSNFGAISSVLNDILSRLDKVEAEVQIDRLITGRLQSLQTYVTQQLIRAAEIRASANLAATKMSECVLGQSKRVDFCGKGYHLMSFPQSAPHGVVFLHVTYVCAQEKNFTTAPAICHDGKAHFPREGVFVSNGTHWFVTQRNFYEPQIITTDNTFVSGNCDVVIGIVNNTVYDPLQPELDSGGSGYIPEAPRDGQAYVRKDGEWVLLSTFL

SEQ ID NO: 10157 - protein, 1177 aa, Artificial Sequence
  SARS-CoV-2/USA/WA-UW31/2020__EPI_ISL_414618 spike protein (1-1147)(P715C_P1069C) Foldon construct
MFVFLVLLPLVSSQCVNLTTRTQLPPAYTNSFTRGVYYPDKVFRSSVLHSTQDLFLPFFSNVTWFHAIHVSGTNGTKRFDNPVLPFNDGVYFASTEKSNIIRGWIFGTTLDSKTQSLLIVNNATNVVIKVCEFQFCNDPFLGVYYHKNNKSWMESEFRVYSSANNCTFEYVSQPFLMDLEGKQGNFKNLREFVFKNIDGYFKIYSKHTPINLVRDLPQGFSALEPLVDLPIGINITRFQTLLALHRSYLTPGDSSSGWTAGAAAYYVGYLQPRTFLLKYNENGTITDAVDCALDPLSETKCTLKSFTVEKGIYQTSNFRVQPTESIVRFPNITNLCPFGEVFNATRFASVYAWNRKRISNCVADYSVLYNSASFSTFKCYGVSPTKLNDLCFTNVYADSFVIRGDEVRQIAPGQTGKIADYNYKLPDDFTGCVIAWNSNNLDSKVGGNYNYLYRLFRKSNLKPFERDISTEIYQAGSTPCNGAEGFNCYFPLQSYGFQPTNGVGYQPYRVVVLSFELLHAPATVCGPKKSTNLVKNKCVNFNFNGLTGTGVLTESNKKFLPFQQFGRDIADTTDAVRDPQTLEILDITPCSFGGVSVITPGTNTSNQVAVLYQDVNCTEVPVAIHADQLTPTWRVYSTGSNVFQTRAGCLIGAEHVNNSYECDIPIGAGICASYQTQTNSPRRARSVASQSIIAYTMSLGAENSVAYSNNSIAICTNFTISVTTEILPVSMTKTSVDCTMYICGDSTECSNLLLQYGSFCTQLNRALTGIAVEQDKNTQEVFAQVKQIYKTPPIKDFGGFNFSQILPDPSKPSKRSFIEDLLFNKVTLADAGFIKQYGDCLGDIAARDLICAQKFNGLTVLPPLLTDEMIAQYTSALLAGTITSGWTFGAGAALQIPFAMQMAYRFNGIGVTQNVLYENQKLIANQFNSAIGKIQDSLSSTASALGKLQDVVNQNAQALNTLVKQLSSNFGAISSVLNDILSRLDKVEAEVQIDRLITGRLQSLQTYVTQQLIRAAEIRASANLAATKMSECVLGQSKRVDFCGKGYHLMSFPQSAPHGVVFLHVTYVCAQEKNFTTAPAICHDGKAHFPREGVFVSNGTHWFVTQRNFYEPQIITTDNTFVSGNCDVVIGIVNNTVYDPLQPELDSGGSGYIPEAPRDGQAYVRKDGEWVLLSTFL

SEQ ID NO: 10158 - protein, 1177 aa, Artificial Sequence
  SARS-CoV-2/South Korea/SNU01/2020__EPI_ISL_411929 spike protein (1-1147)(P715C_P1069C) Foldon construct
MFVFLVLLPLVSSQCVNLTTRTQLPPAYTNSFTRGVYYPDKVFRSSVLHSTQDLFLPFFSNVTWFHAIHVSGTNGTKRFDNPVLPFNDGVYFASTEKSNIIRGWIFGTTLDSKTQSLLIVNNATNVVIKVCEFQFCNDPFLGVYYHKNNKSWMESEFRVYSSANNCTFEYVSQPFLMDLEGKQGNFKNLREFVFKNIDGYFKIYSKHTPINLVRDLPQGFWALEPLVDLPIGINITRFQTLLALHRSYLTPGDSSSGWTAGAAAYYVGYLQPRTFLLKYNENGTITDAVDCALDPLSETKCTLKSFTVEKGIYQTSNFRVQPTESIVRFPNITNLCPFGEVFNATRFASVYAWNRKRISNCVADYSVLYNSASFSTFKCYGVSPTKLNDLCFTNVYADSFVIRGDEVRQIAPGQTGKIADYNYKLPDDFTGCVIAWNSNNLDSKVGGNYNYLYRLFRKSNLKPFERDISTEIYQAGSTPCNGVEGFNCYFPLQSYGFQPTNGVGYQPYRVVVLSFELLHAPATVCGPKKSTNLVKNKCVNFNFNGLTGTGVLTESNKKFLPFQQFGRDIADTTDAVRDPQTLEILDITPCSFGGVSVITPGTNTSNQVAVLYQDVNCTEVPVAIHADQLTPTWRVYSTGSNVFQTRAGCLIGAEHVNNSYECDIPIGAGICASYQTQTNSPRRARSVASQSIIAYTMSLGAENSVAYSNNSIAICTNFTISVTTEILPVSMTKTSVDCTMYICGDSTECSNLLLQYGSFCTQLNRALTGIAVEQDKNTQEVFAQVKQIYKTPPIKDFGGFNFSQILPDPSKPSKRSFIEDLLFNKVTLADAGFIKQYGDCLGDIAARDLICAQKFNGLTVLPPLLTDEMIAQYTSALLAGTITSGWTFGAGAALQIPFAMQMAYRFNGIGVTQNVLYENQKLIANQFNSAIGKIQDSLSSTASALGKLQDVVNQNAQALNTLVKQLSSNFGAISSVLNDILSRLDKVEAEVQIDRLITGRLQSLQTYVTQQLIRAAEIRASANLAATKMSECVLGQSKRVDFCGKGYHLMSFPQSAPHGVVFLHVTYVCAQEKNFTTAPAICHDGKAHFPREGVFVSNGTHWFVTQRNFYEPQIITTDNTFVSGNCDVVIGIVNNTVYDPLQPELDSGGSGYIPEAPRDGQAYVRKDGEWVLLSTFL

SEQ ID NO: 10159 - protein, 1177 aa, Artificial Sequence
  SARS-CoV-2/China/WF0004/2020__EPI_ISL_413694 spike protein (1-1147)(P715C_P1069C) Foldon construct
MFVFLVLLPLVSSQCVNLTTRTQLPPAYTNSFTRGVYYPDKVFRSSVLHSTQDLFLPFFSNVTWFHAIHVSGTNGTKRFDNPVLPFNDGVYFASTEKSNIIRGWIFGTTLDSKTQSLLIVNNATNVVIKVCEFQFCNDPFLGVYYHKNNKSWTESEFRVYSSANNCTFEYVSQPFLMDLEGKQGNFKNLREFVFKNIDGYFKIYSKHTPINLVRDLPQGFSALEPLVDLPIGINITRFQTLLALHRSYLTPGDSSSGWTAGAAAYYVGYLQPRTFLLKYNENGTITDAVDCALDPLSETKCTLKSFTVEKGIYQTSNFRVQPTESIVRFPNITNLCPFGEVFNATRFASVYAWNRKRISNCVADYSVLYNSASFSTFKCYGVSPTKLNDLCFTNVYADSFVIRGDEVRQIAPGQTGKIADYNYKLPDDFTGCVIAWNSNNLDSKVGGNYNYLYRLFRKSNLKPFERDISTEIYQAGSTPCNGVEGFNCYFPLQSYGFQPTNGVGYQPYRVVVLSFELLHAPATVCGPKKSTNLVKNKCVNFNFNGLTGTGVLTESNKKFLPFQQFGRDIADTTDAVRDPQTLEILDITPCSFGGVSVITPGTNTSNQVAVLYQDVNCTEVPVAIHADQLTPTWRVYSTGSNVFQTRAGCLIGAEHVNNSYECDIPIGAGICASYQTQTNSPRRARSVASQSIIAYTMSLGAENSVAYSNNSIAICTNFTISVTTEILPVSMTKTSVDCTMYICGDSTECSNLLLQYGSFCTQLNRALTGIAVEQDKNTQEVFAQVKQIYKTPPIKDFGGFNFSQILPDPSKPSKRSFIEDLLFNKVTLADAGFIKQYGDCLGDIAARDLICAQKFNGLTVLPPLLTDEMIAQYTSALLAGTITSGWTFGAGAALQIPFAMQMAYRFNGIGVTQNVLYENQKLIANQFNSAIGKIQDSLSSTASALGKLQDVVNQNAQALNTLVKQLSSNFGAISSVLNDILSRLDKVEAEVQIDRLITGRLQSLQTYVTQQLIRAAEIRASANLAATKMSECVLGQSKRFDFCGKGYHLMSFPQSAPHGVVFLHVTYVCAQEKNFTTAPAICHDGKAHFPREGVFVSNGTHWFVTQRNFYEPQIITTDNTFVSGNCDVVIGIVNNTVYDPLQPELDSGGSGYIPEAPRDGQAYVRKDGEWVLLSTFL

SEQ ID NO: 10160 - protein, 1177 aa, Artificial Sequence
  SARS-CoV-2/China/WF0028/2020__EPI_ISL_413791 spike protein (1-1147)(P715C_P1069C) Foldon construct
MFVFLVLLPLVSSQCVNLTTRTQLPPAYTNSFTRGVYYPDKVFRSSVLHSTQDLFLPFFSNVTWFHAIHVSGTNGTKRFDNPVLPFNDGVYFASTEKSNIIRGWIFGTTLDSKTQSLLIVNNATNVVIKVCEFQFCNDPFLGVYYHKNNKSWMESEFRVYSSANNCTFEYVSQPFLMDLEGKQGNFKNLREFVFKNIDGYFKIYSKHTPINLVRDLPQGFSALEPLVDLPIGINITRFQTLLALHRSYLTPGDSSSGWTAGAAAYYVGYLQPRTFLLKYNENGTITDAVDCALDPLSETKCTLKSFTVEKGIYQTSNFRVQPTESIVRFPNITNLCPFGEVFNATRFASVYAWNRKRISNCVADYSVLYNSASFSTFKCYGVSPTKLNDLCFTNVYADSFVIRGDEVRQIAPGQTGKIADYNYKLPDDFTGCVIAWNSNNLDSKVGGNYNYLYRLFRKSNLKPFERDISTEIYQAGSTPCNGVEGFNCYFPLQSYGFQPTNGVGYQPYRVVVLSFELLHAPATVCGPKKSTNLVKNKCVNFNFNGLTGTGVLTESNKKFLPFQQFGRDIADTTDAVRDPQTLEILDITPCSFGGVSVITPGTNTSNQVAVLYQDVNCTEVPVAIHADQLTPTWRVYSTGSNVFQTRAGCLIGAEHVNNSYECDIPIGAGICASYQTQTNSPRRARSVASQSIIAYTMSLGAENSVAYSNNSIAICTNFTISVTTEILPVSMTKTSVDCTMYICGDSTECSNLLLQYGSFCTQLNRALTGIAVEQDKNTQEVFAQVKQIYKTPPIKDFGGFNFSQILPDPSKPSKRSFIEDLLFNKVTLADAGFIKQYGDCLGDIAARDLICAQKFNGLTVLPPLLTDEMIAQYTSALLAGTITSGWTFGAGAALQIPFAMQMAYRFNGIGVTQNVLYENQKLIANQFNSAIGKIQDSLSSTASALGKLQDVVNQNAQALNTLVKQLSSNFGAISSVLNDILSRLDKVEAEVQIDRLITGRLQSLQTYVTQQLIRAAEIRASANLAATKMSECVLGQSKRVDFCGKGYHLMSFPQSAPHGVVFLHVTYVCAQEKNFTTAPAICHDGKAHFPREGVFVSNGTHWFVTQRNFYEPQIITTDNTFVSGNCDVVIGIVNNTVYDPLQPELESGGSGYIPEAPRDGQAYVRKDGEWVLLSTFL

SEQ ID NO: 10161 - protein, 1177 aa, Artificial Sequence
  SARS-CoV-2/2019-nCoV/USA-CruiseA-18/2020__MT159716.1 spike protein (1-1147)(P715C_P1069C) Foldon construct
MFVFLVLLPLVSSQCVNLTTRTQLPPAYTNSFTRGVYYPDKVFRSSVLHSTQDLFLPFFSNVTWFHAIHVSGTNGTKRFDNPVLPFNDGVYFASTEKSNIIRGWIFGTTLDSKTQSLLIVNNATNVVIKVCEFQFCNDPFLGVYYHKNNKSWMESELRVYSSANNCTFEYVSQPFLMDLEGKQGNFKNLREFVFKNIDGYFKIYSKHTPINLVRDLPQGFSALEPLVDLPIGINITRFQTLLALHRSYLTPGDSSSGWTAGAAAYYVGYLQPRTFLLKYNENGTITDAVDCALDPLSETKCTLKSFTVEKGIYQTSNFRVQPTESIVRFPNITNLCPFGEVFNATRFASVYAWNRKRISNCVADYSVLYNSASFSTFKCYGVSPTKLNDLCFTNVYADSFVIRGDEVRQIAPGQTGKIADYNYKLPDDFTGCVIAWNSNNLDSKVGGNYNYLYRLFRKSNLKPFERDISTEIYQAGSTPCNGVEGFNCYFPLQSYGFQPTNGVGYQPYRVVVLSFELLHAPATVCGPKKSTNLVKNKCVNFNFNGLTGTGVLTESNKKFLPFQQFGRDIADTTDAVRDPQTLEILDITPCSFGGVSVITPGTNTSNQVAVLYQDVNCTEVPVAIHADQLTPTWRVYSTGSNVFQTRAGCLIGAEHVNNSYECDIPIGAGICASYQTQTNSPRRARSVASQSIIAYTMSLGAENSVAYSNNSIAICTNFTISVTTEILPVSMTKTSVDCTMYICGDSTECSNLLLQYGSFCTQLNRALTGIAVEQDKNTQEVFAQVKQIYKTPPIKDFGGFNFSQILPDPSKPSKRSFIEDLLFNKVTLADAGFIKQYGDCLGDIAARDLICAQKFNGLTVLPPLLTDEMIAQYTSALLAGTITSGWTFGAGAALQIPFAMQMAYRFNGIGVTQNVLYENQKLIANQFNSAIGKIQDSLSSTASALGKLQDVVNQNAQALNTLVKQLSSNFGAISSVLNDILSRLDKVEAEVQIDRLITGRLQSLQTYVTQQLIRAAEIRASANLAATKMSECVLGQSKRVDFCGKGYHLMSFPQSAPHGVVFLHVTYVCAQEKNFTTAPAICHDGKAHFPREGVFVSNGTHWFVTQRNFYEPQIITTDNTFVSGNCDVVIGIVNNTVYDPLQPELDSGGSGYIPEAPRDGQAYVRKDGEWVLLSTFL

SEQ ID NO: 10162 - protein, 1177 aa, Artificial Sequence
  SARS-CoV-2/SARS-CoV-2/Yunnan-01/human/2020/CHN__MT049951.1 spike protein (1-1147)(P715C_P1069C) Foldon construct
MFVFLVLLPLVSSQCVNLTTRTQLPPANTNSFTRGVYYPDKVFRSSVLHSTQDLFLPFFSNVTWFHAIHVSGTNGTKRFDNPVLPFNDGVYFASTEKSNIIRGWIFGTTLDSKTQSLLIVNNATNVVIKVCEFQFCNDPFLGVYYHKNNKSWMESEFRVYSSANNCTFEYVSQPFLMDLEGKQGNFKNLREFVFKNIDGYFKIYSKHTPINLVRDLPQGFSALEPLVDLPIGINITRFQTLLALHRSYLTPGDSSSGWTAGAAAYYVGYLQPRTFLLKYNENGTITDAVDCALDPLSETKCTLKSFTVEKGIYQTSNFRVQPTESIVRFPNITNLCPFGEVFNATRFASVYAWNRKRISNCVADYSVLYNSASFSTFKCYGVSPTKLNDLCFTNVYADSFVIRGDEVRQIAPGQTGKIADYNYKLPDDFTGCVIAWNSNNLDSKVGGNYNYLYRLFRKSNLKPFERDISTEIYQAGSTPCNGVEGFNCYFPLQSYGFQPTNGVGYQPYRVVVLSFELLHAPATVCGPKKSTNLVKNKCVNFNFNGLTGTGVLTESNKKFLPFQQFGRDIADTTDAVRDPQTLEILDITPCSFGGVSVITPGTNTSNQVAVLYQDVNCTEVPVAIHADQLTPTWRVYSTGSNVFQTRAGCLIGAEHVNNSYECDIPIGAGICASYQTQTNSPRRARSVASQSIIAYTMSLGAENSVAYSNNSIAICTNFTISVTTEILPVSMTKTSVDCTMYICGDSTECSNLLLQYGSFCTQLNRALTGIAVEQDKNTQEVFAQVKQIYKTPPIKDFGGFNFSQILPDPSKPSKRSFIEDLLFNKVTLADAGFIKQYGDCLGDIAARDLICAQKFNGLTVLPPLLTDEMIAQYTSALLAGTITSGWTFGAGAALQIPFAMQMAYRFNGIGVTQNVLYENQKLIANQFNSAIGKIQDSLSSTASALGKLQDVVNQNAQALNTLVKQLSSNFGAISSVLNDILSRLDKVEAEVQIDRLITGRLQSLQTYVTQQLIRAAEIRASANLAATKMSECVLGQSKRVDFCGKGYHLMSFPQSAPHGVVFLHVTYVCAQEKNFTTAPAICHDGKAHFPREGVFVSNGTHWFVTQRNFYEPQIITTDNTFVSGNCDVVIGIVNNTVYDPLQPELDSGGSGYIPEAPRDGQAYVRKDGEWVLLSTFL

SEQ ID NO: 10163 - protein, 1177 aa, Artificial Sequence
  SARS-CoV-2/USA/WA-UW292/2020__EPI_ISL_418077 spike protein (1-1147)(P715C_P1069C) Foldon construct
MFVFLVLLPLVSSQCVNLTTRTQLPPAYTNSFTRGVYYPDKVFRSSVLHSTQDLFLPFFSNVTWFHAIHVSGTNGTKRFDNPVLPFNDGVYFASTEKSNIIRGWIFGTTLDSKTQSLLIVNNATNVVIKVCEFQFCNDPFLGVYYHKNNKSWMESEFRVYSSANNCTFEYVSQPFLMDLEGKQGNFKNLREFVFKNIDGYFKIYSKHTPINLVRDLPQGFSALEPLVDLPIGINITRFQTLLALHRSYLTPGDSSSGWTAGAAAYYVGYLQPRTFLLKYNENGTITDAVDCALDPLSETKCTLKSFTVEKGIYQTSNFRVQPTESIVRFPNITNLCPFGEVFNATRFASVYAWNRKRISNCVADYSVLYNSASFSTFKCYGVSPTKLNDLCFTNVYADSFVIRGDEVRQIAPGQTGKIADYNYKLPDDFTGCVIAWNSNNLDSKVGGNYNYLYRLFRKSNLKPFERDISTEIYQASSTPCNGVEGFNCYFPLQSYGFQPTNGVGYQPYRVVVLSFELLHAPATVCGPKKSTNLVKNKCVNFNFNGLTGTGVLTESNKKFLPFQQFGRDIADTTDAVRDPQTLEILDITPCSFGGVSVITPGTNTSNQVAVLYQDVNCTEVPVAIHADQLTPTWRVYSTGSNVFQTRAGCLIGAEHVNNSYECDIPIGAGICASYQTQTNSPRRARSVASQSIIAYTMSLGAENSVAYSNNSIAICTNFTISVTTEILPVSMTKTSVDCTMYICGDSTECSNLLLQYGSFCTQLNRALTGIAVEQDKNTQEVFAQVKQIYKTPPIKDFGGFNFSQILPDPSKPSKRSFIEDLLFNKVTLADAGFIKQYGDCLGDIAARDLICAQKFNGLTVLPPLLTDEMIAQYTSALLAGTITSGWTFGAGAALQIPFAMQMAYRFNGIGVTQNVLYENQKLIANQFNSAIGKIQDSLSSTASALGKLQDVVNQNAQALNTLVKQLSSNFGAISSVLNDILSRLDKVEAEVQIDRLITGRLQSLQTYVTQQLIRAAEIRASANLAATKMSECVLGQSKRVDFCGKGYHLMSFPQSAPHGVVFLHVTYVCAQEKNFTTAPAICHDGKAHFPREGVFVSNGTHWFVTQRNFYEPQIITTDNTFVSGNCDVVIGIVNNTVYDPLQPELDSGGSGYIPEAPRDGQAYVRKDGEWVLLSTFL

SEQ ID NO: 10164 - protein, 1177 aa, Artificial Sequence
  SARS-CoV-2/Iceland/192/2020__EPI_ISL_417819 spike protein (1-1147)(P715C_P1069C) Foldon construct
MFVFFVLLPLVSSQCVNLTTRTQLPPAYTNSFTRGVYYPDKVFRSSVLHSTQDLFLPFFSNVTWFHAIHVSGTNGTKRFDNPVLPFNDGVYFASTEKSNIIRGWIFGTTLDSKTQSLLIVNNATNVVIKVCEFQFCNDPFLGVYYHKNNKSWMESEFRVYSSANNCTFEYVSQPFLMDLEGKQGNFKNLREFVFKNIDGYFKIYSKHTPINLVRDLPQGFSALEPLVDLPIGINITRFQTLLALHRSYLTPGDSSSGWTAGAAAYYVGYLQPRTFLLKYNENGTITDAVDCALDPLSETKCTLKSFTVEKGIYQTSNFRVQPTESIVRFPNITNLCPFGEVFNATRFASVYAWNRKRISNCVADYSVLYNSASFSTFKCYGVSPTKLNDLCFTNVYADSFVIRGDEVRQIAPGQTGKIADYNYKLPDDFTGCVIAWNSNNLDSKVGGNYNYLYRLFRKSNLKPFERDISTEIYQAGSTPCNGVEGFNCYFPLQSYGFQPTNGVGYQPYRVVVLSFELLHAPATVCGPKKSTNLVKNKCVNFNFNGLTGTGVLTESNKKFLPFQQFGRDIADTTDAVRDPQTLEILDITPCSFGGVSVITPGTNTSNQVAVLYQGVNCTEVPVAIHADQLTPTWRVYSTGSNVFQTRAGCLIGAEHVNNSYECDIPIGAGICASYQTQTNSPRRARSVASQSIIAYTMSLGAENSVAYSNNSIAICTNFTISVTTEILPVSMTKTSVDCTMYICGDSTECSNLLLQYGSFCTQLNRALTGIAVEQDKNTQEVFAQVKQIYKTPPIKDFGGFNFSQILPDPSKPSKRSFIEDLLFNKVTLADAGFIKQYGDCLGDIAARDLICAQKFNGLTVLPPLLTDEMIAQYTSALLAGTITSGWTFGAGAALQIPFAMQMAYRFNGIGVTQNVLYENQKLIANQFNSAIGKIQDSLSSTASALGKLQDVVNQNAQALNTLVKQLSSNFGAISSVLNDILSRLDKVEAEVQIDRLITGRLQSLQTYVTQQLIRAAEIRASANLAATKMSECVLGQSKRVDFCGKGYHLMSFPQSAPHGVVFLHVTYVCAQEKNFTTAPAICHDGKAHFPREGVFVSNGTHWFVTQRNFYEPQIITTDNTFVSGNCDVVIGIVNNTVYDPLQPELDSGGSGYIPEAPRDGQAYVRKDGEWVLLSTFL

SEQ ID NO: 10165 - protein, 1177 aa, Artificial Sequence
  SARS-CoV-2/Belgium/ULG-6939/2020__EPI_ISL_417020 spike protein (1-1147)(P715C_P1069C) Foldon construct
MFVFLVLLPLVSSQCVNLTTRTQLPPAYTNSFTRGVYYPDKVFRSSVLHSTQDLFLPFFSNVTWFHAIHVSGTNGTKRFDNPVLPFNDGVYFASTEKSNIIRGWIFGTTLDSKTQSLLIVNNATNVVIKVCEFQFCNDPFLGVYYHKNNKSWMESEFRVYSSANNCTFEYVSQPFLMDLEGKQGNFKNLREFVFKNIDGYFKIYSKHTPINLVRDLPQGFSALEPLVDLPIGINITRFQTLLALHRSYLTPGDSSSGWTAGAAAYYVGYLQPRTFLLKYNENGTITDAVDCALDPLSETKCTLKSFTVEKGIYQTSNFRVQPTESIVRFPNITNLCPFGEVFNATRFASVYAWNRKRISNCVADYSVLYNSASFSTFKCYGVSPTKLNDLCFTNVYADSFVIRGDEVRQIAPGQTGKIADYNYKLPDDFTGCVIAWNSNNLDSKVGGNYNYLYRLFRKSNLKPFERDISTEIYQAGSTPCNGVEGFNCYFPLQSYGFQPTNGVGYQPYRVVVLSFELLHAPATVCGPKKSTNLVKNKCVNFNFNGLTGTGVLTESNKKFLPFQQFGRDIADTTDAVRDPQTLEILDITPCSFGGVSVITPGTNTSNQVAVLYQGVNCTEVPVAIHADQLTPTWRVYSTGSNVFQTRAGCLIGAEHVNNSYECDIPIGAGICASYQTQTNSPRRARSVASQSIIAYTMSLGAENSVVYSNNSIAICTNFTISVTTEILPVSMTKTSVDCTMYICGDSTECSNLLLQYGSFCTQLNRALTGIAVEQDKNTQEVFAQVKQIYKTPPIKDFGGFNFSQILPDPSKPSKRSFIEDLLFNKVTLADAGFIKQYGDCLGDIAARDLICAQKFNGLTVLPPLLTDEMIAQYTSALLAGTITSGWTFGAGAALQIPFAMQMAYRFNGIGVTQNVLYENQKLIANQFNSAIGKIQDSLSSTASALGKLQDVVNQNAQALNTLVKQLSSNFGAISSVLNDILSRLDKVEAEVQIDRLITGRLQSLQTYVTQQLIRAAEIRASANLAATKMSECVLGQSKRVDFCGKGYHLMSFPQSAPHGVVFLHVTYVCAQEKNFTTAPAICHDGKAHFPREGVFVSNGTHWFVTQRNFYEPQIITTDNTFVSGNCDVVIGIVNNTVYDPLQPELDSGGSGYIPEAPRDGQAYVRKDGEWVLLSTFL

SEQ ID NO: 10166 - protein, 1177 aa, Artificial Sequence
  SARS-CoV-2/France/HF2496/2020__EPI_ISL_418231 spike protein (1-1147)(P715C_P1069C) Foldon construct
MFVFLVLLPLVSSQCVNLTTRTQLPPAYTNSFTRGVYYPDKVFRSSVLHSTQDLFLPFFSNVTWFHAIHVSGTNGTKRFDNPVLPFNDGVYFASTEKSNIIRGWIFGTTLDSKTQSLLIVNNATNVVIKVCEFQFCNDPFLGVYYHKNNKSWMESEFRVYSSANNCTFEYVSQPFLMDLEGKQGNFKNLREFVFKNIDGYFKIYSKHTPINLVRDLPQGFSALEPLVDLPIGINITRFQTLLALHRSYLTPGDSSSGWTAGAAAYYVGYLQPRTFLLKYNENGTITDAVDCALDPLSETKCTLKSFTVEKGIYQTSNFRVQPTESIVRFPNITNLCPFGEVFNATRFASVYAWNRKRISNCVADYSVLYNSASFSTFKCYGVSPTKLNDLCFTNVYADSFVIRGDEVRQIAPGQTGKIADYNYKLPDDFTGCVIAWNSNNLDSKVGGNYNYLYRLFRKSNLKPFERDISTEIYQAGSTPCNGVEGFNCYFPLQSYGFQPTNGVGYQPYRVVVLSFELLHAPATVCGPKKSTNLVKNKCVNFNFNGLTGTGVLTESNKKFLPFQQFGRDIADTTDAVRDPQTLEILDITPCSFGGVSVITPGTNTSNQVAVLYQGVNCTEVPVAIHADQLTPTWRVYSTGSNVFQTRAGCLIGAEHVNNSYECDIPIGAGICASYQTQTNSPRRARSVASQSIIAYTMSLGAENSVAYSNNSIAICTNFTISVTTEILPVSMTKTSVDCTMYICGDSTECSNLLLQYGSFCTQLNRALTGIAVEQDKNTQEVFAQVKQIYKTPPIKDFGGFNFSQILPDPSKPSKRSFIEDLLFNKVTLADAGFIKQYGDCLGDIVARDLICAQKFNGLTVLPPLLTDEMIAQYTSALLAGTITSGWTFGAGAALQIPFAMQMAYRFNGIGVTQNVLYENQKLIANQFNSAIGKIQDSLSSTASALGKLQDVVNQNAQALNTLVKQLSSNFGAISSVLNDILSRLDKVEAEVQIDRLITGRLQSLQTYVTQQLIRAAEIRASANLAATKMSECVLGQSKRVDFCGKGYHLMSFPQSAPHGVVFLHVTYVCAQEKNFTTAPAICHDGKAHFPREGVFVSNGTHWFVTQRNFYEPQIITTDNTFVSGNCDVVIGIVNNTVYDPLQPELDSGGSGYIPEAPRDGQAYVRKDGEWVLLSTFL

SEQ ID NO: 10167 - protein, 1177 aa, Artificial Sequence
  SARS-CoV-2/USA/WA-UW291/2020__EPI_ISL_418076 spike protein (1-1147)(P715C_P1069C) Foldon construct
MFVFLVLLPLVSSQCVNLTTRTQLPPAYTNSFTRGVYYPDKVFRSSVLHSTQDLFLPFFSNVTWFHAIHVSGTNGTKRFDNPVLPFNDGVYFASTEKSNIIRGWIFGTTLDSKTQSLLIVNNATNVVIKVCEFQFCNDPFLGVYYHKNNKSWMESEFRVYSSANNCTFEYVSQPFLMDLEGKQGNFKNLREFVFKNIDGYFKIYSKHTPINLVRDLPQGFSALEPLVDLPIGINITRFQTLLALHRSYLTPGDSSSGWTAGAAAYYVGYLQPRTFLLKYNENGTITDAVDCALDPLSETKCTLKSFTVEKGIYQTSNFRVQPTESIVRFPNITNLCPFGEVFNATRFASVYAWNRKRISNCVADYSVLYNSASFSTFKCYGVSPTKLNDLCFTNVYADSFVIRGDEVRQIAPGQTGKIADYNYKLPDDFTGCVIAWNSNNLDSKVGGNYNYLYRLFRKSNLKPFERDISTEIYQAGSTPCNGVEGFNCYFPLQSYGFQPTNGVGYQPYRVVVLSFELLHAPATVCGPKKSTNLVKNKCVNFNFNGLTGTGVLTESNKKFLPFQQFGRDIADTTDAVRDPQTLEILDITPCSFGGVSVITPGTNTSNQVAVLYQGVNCTEVPVAIHADQLTPTWRVYSTGSNVFQTRAGCLIGAEHVNNSYECDIPIGAGICASYQTQTNSPRRARSVASQSIIAYTMSLGAENSVAYSNNSIAICTNFTISVTTEILPVSMTKTSVDCTMYICGDSTECSNLLLQYGSFCTQLNRALTGIAVEQDKNTQEVFAQVKQIYKTPPIKDFGGFNFSQILPDPSKPSKRSFIEDLLFNKVTLADAGFIKQYGDCLGDIAARDLICAQKFNGLTVLPPLLTDEMIAQYTSALLAGTITSGWTFGAGAALQIPFAMQMAYRFNGIGVTQNVLYENQKLIANQFNSAIGKIQYSLSSTASALGKLQDVVNQNAQALNTLVKQLSSNFGAISSVLNDILSRLDKVEAEVQIDRLITGRLQSLQTYVTQQLIRAAEIRASANLAATKMSECVLGQSKRVDFCGKGYHLMSFPQSAPHGVVFLHVTYVCAQEKNFTTAPAICHDGKAHFPREGVFVSNGTHWFVTQRNFYEPQIITTDNTFVSGNCDVVIGIVNNTVYDPLQPELDSGGSGYIPEAPRDGQAYVRKDGEWVLLSTFL

SEQ ID NO: 10168 - protein, 1177 aa, Artificial Sequence; identical to SEQ ID NO: 10131
  SARS-CoV-2/Portugal/PT0034/2020__EPI_ISL_418019 spike protein (1-1147)(P715C_P1069C) Foldon construct

SEQ ID NO: 10169 - protein, 1177 aa, Artificial Sequence; identical to SEQ ID NO: 10123
  SARS-CoV-2/Iceland/202/2020__EPI_ISL_417750 spike protein (1-1147)(P715C_P1069C) Foldon construct

SEQ ID NO: 10170 - protein, 1177 aa, Artificial Sequence
  SARS-CoV-2/USA/WA-UW261/2020__EPI_ISL_418046 spike protein (1-1147)(P715C_P1069C) Foldon construct
MFVFLVLLPLVSSQCVNLTTRTQLPPAYTNSFTRGVYYPDKVFRSSVLHSTQDLFLPFFSNVTWFHAIHVSGTNGTKRFDNPVLPFNDGVYFASTEKSNIIRGWIFGTTLDSKTQSLLIVNNATNVVIKVCEFQFCNDPFLGVYYHKNNKSWMESEFRVYSSANNCTFEYVSQPFLMDLEGKQGNFKNLREFVFKNIDGYFKIYSKHTPINLVRDLPQGFSALEPLVDLPIGINITRFQTLLALHRSYLTPGDSSSGWTAGAAAYYVGYLQPRTFLLKYNENGTITDAVDCALDPLSETKCTLKSFTVEKGIYQTSNFRVQPTESIVRFPNITNLCPFGEVFNATRFTSVYAWNRKRISNCVADYSVLYNSASFSTFKCYGVSPTKLNDLCFTNVYADSFVIRGDEVRQIAPGQTGKIADYNYKLPDDFTGCVIAWNSNNLDSKVGGNYNYLYRLFRKSNLKPFERDISTEIYQAGSTPCNGVEGFNCYFPLQSYGFQPTNGVGYQPYRVVVLSFELLHAPATVCGPKKSTNLVKNKCVNFNFNGLTGTGVLTESNKKFLPFQQFGRDIADTTDAVRDPQTLEILDITPCSFGGVSVITPGTNTSNQVAVLYQDVNCTEVPVAIHADQLTPTWRVYSTGSNVFQTRAGCLIGAEHVNNSYECDIPIGAGICASYQTQTNSPRRARSVASQSIIAYTMSLGAENSVAYSNNSIAICTNFTISVTTEILPVSMTKTSVDCTMYICGDSTECSNLLLQYGSFCTQLNRALTGIAVEQDKNTQEVFAQVKQIYKTPPIKDFGGFNFSQILPDPSKPSKRSFIEDLLFNKVTLADAGFIKQYGDCLGDIAARDLICAQKFNGLTVLPPLLTDEMIAQYTSALLAGTITSGWTFGAGAALQIPFAMQMAYRFNGIGVTQNVLYENQKLIANQFNSAIGKIQDSLSSTASALGKLQDVVNQNAQALNTLVKQLSSNFGAISSVLNDILSRLDKVEAEVQIDRLITGRLQSLQTYVTQQLIRAAEIRASANLAATKMSECVLGQSKRVDFCGKGYHLMSFPQSAPHGVVFLHVTYVCAQEKNFTTAPAICHDGKAHFPREGVFVSNGTHWFVTQRNFYEPQIITTDNTFVSGNCDVVIGIVNNTVYDPLQPELDSGGSGYIPEAPRDGQAYVRKDGEWVLLSTFL

SEQ ID NO: 10171 - protein, 1177 aa, Artificial Sequence
  SARS-CoV-2/Portugal/PT0035/2020__EPI_ISL_418020 spike protein (1-1147)(P715C_P1069C) Foldon construct
MFVFLVLLPLVSSQCVNLTTRTQLPPAYTNSFTRGVYYPDKVFRSSVLHSTQDLFLPFFSNVTWFHAIHVSGTNGTKRFDNPVLPFNDGVYFASTEKSNIIRGWIFGTTLDSKTQSLLIVNNATNVVIKVCEFQFCNDPFLGVYYHKNNKSWMESEFRVYSSANNCTFEYVSQPFLMDLEGKQGNFKNLREFVFKNIDGYFKIYSKHTPINLVRDLPQGFSALEPLVDLPIGINITRFQTLLALHRSYLTPGDSSSGWTAGAAAYYVGYLQPRTFLLKYNENGTITDAVDCALDPLSETKCTLKSFTVEKGIYQTSNFRVQPTESIVRFPNITNLCPFGEVFNATRFASVYAWNRKRISNCVADYSVLYNSASFSTFKCYGVSPTKLNDLCFTNVYADSFVIRGDEVRQIAPGQTGKIADYNYKLPDDFTGCVIAWNSNNLDSKVGGNYNYLYRLFRKSNLKPFERDISTEIYQAGSTPCNGVEGFNCYFPLQSYGFQPTNGVGYQPYRVVVLSFELLHAPATVCGPKKSTNLVKNKCVNFNFNGLTGTGVLTESNKKFLPFQQFGRDIADTTDAVRDPQTLEILDITPCSFGGVSVITPGTNTSNQVAVLYQDVNCTEVPVAIHADQLTPTWRVYSTGSNVFQTRAGCLIGAEHVNNSYECDIPIGAGICASYQTQTNSPRRARSVASQSIIAYTMSLGAENSVAYSNNSIAICTNFTISVTTEILPVSMTKTSVDCTMYICGDSTECSNLLLQYGSFCTQLNRALTGIAVEQDKNTQEVFAQVKQIYKTPPIKDFGGFNFSQILPDPSKPSKRSFIEDLLFNKVTLADAGFIKQYGDCLGDISARDLICAQKFNGLTVLPPLLTDEMIAQYTSALLAGTITSGWTFGAGAALQIPFAMQMAYRFNGIGVTQNVLYENQKLIANQFNSAIGKIQDSLSSTASALGKLQDVVNQNAQALNTLVKQLSSNFGAISSVLNDILSRLDKVEAEVQIDRLITGRLQSLQTYVTQQLIRAAEIRASANLAATKMSECVLGQSKRVDFCGKGYHLMSFPQSAPHGVVFLHVTYVCAQEKNFTTAPAICHDGKAHFPREGVFVSNGTHWFVTQRNFYEPQIITTDNTFVSGNCDVVIGIVNNTVYDPLQPELDSGGSGYIPEAPRDGQAYVRKDGEWVLLSTFL

SEQ ID NO: 10172 - protein, 1177 aa, Artificial Sequence
  SARS-CoV-2/USA/NY-NYUMC7/2020__EPI_ISL_418192 spike protein (1-1147)(P715C_P1069C) Foldon construct
MFVFLVLLPLVSSQCVNLTTRTQLPPAYTNSFTRGVYYPDKVFRSSVLHSTQDLFLPFFSNVTWFHAIHVSGTNGTKRFDNPVLPFNDGVYFASTEKSNIIRGWIFGTTLDSKTQSLLIVNNATNVVIKVCEFQFCNDPFLGVYHHKNNKSWMESEFRVYSSANNCTFEYVSQPFLMDLEGKQGNFKNLREFVFKNIDGYFKIYSKHTPINLVRDLPQGFSALEPLVDLPIGINITRFQTLLALHRSYLTPGDSSSGWTAGAAAYYVGYLQPRTFLLKYNENGTITDAVDCALDPLSETKCTLKSFTVEKGIYQTSNFRVQPTESIVRFPNITNLCPFGEVFNATRFASVYAWNRKRISNCVADYSVLYNSASFSTFKCYGVSPTKLNDLCFTNVYADSFVIRGDEVRQIAPGQTGKIADYNYKLPDDFTGCVIAWNSNNLDSKVGGNYNYLYRLFRKSNLKPFERDISTEIYQAGSTPCNGVEGFNCYFPLQSYGFQPTNGVGYQPYRVVVLSFELLHAPATVCGPKKSTNLVKNKCVNFNFNGLTGTGVLTESNKKFLPFQQFGRDIADTTDAVRDPQTLEILDITPCSFGGVSVITPGTNTSNQVAVLYQGVNCTEVPVAIHADQLTPTWRVYSTGSNVFQTRAGCLIGAEHVNNSYECDIPIGAGICASYQTQTNSPRRARSVASQSIIAYTMSLGAENSVAYSNNSIAICTNFTISVTTEILPVSMTKTSVDCTMYICGDSTECSNLLLQYGSFCTQLNRALTGIAVEQDKNTQEVFAQVKQIYKTPPIKDFGGFNFSQILPDPSKPSKRSFIEDLLFNKVTLADAGFIKQYGDCLGDIAARDLICAQKFNGLTVLPPLLTDEMIAQYTSALLAGTITSGWTFGAGAALQIPFAMQMAYRFNGIGVTQNVLYENQKLIANQFNSAIGKIQDSLSSTASALGKLQDVVNQNAQALNTLVKQLSSNFGAISSVLNDILSRLDKVEAEVQIDRLITGRLQSLQTYVTQQLIRAAEIRASANLAATKMSECVLGQSKRVDFCGKGYHLMSFPQSAPHGVVFLHVTYVCAQEKNFTTAPAICHDGKAHFPREGVFVSNGTHWFVTQRNFYEPQIITTDNTFVSGNCDVVIGIVNNTVYDPLQPELDSGGSGYIPEAPRDGQAYVRKDGEWVLLSTFL

SEQ ID NO: 10173 - protein, 1177 aa, Artificial Sequence
  SARS-CoV-2/Iceland/189/2020__EPI_ISL_417709 spike protein (1-1147)(P715C_P1069C) Foldon construct
MFVFLVLLPLVSSQCVNLTTRTQLPPAYTNSFTRGVYYPDKVFRSSVLHSTQDLFLPFFSNVTWFHAIHVSGTNGTKRFDNPVLPFNDGVYFASTEKSNIIRGWIFGTTLDSKTQSLLIVNNATNVVIKVCEFQFCNDPFLGVYYHKNNKSWMESEFRVYSSANNCTFEYVSQPFLMDLEGKQGNFKNLREFVFKNIDGYFKIYSKHTPINLVRDLPQGFSALEPLVDLPIGINITRFQTLLALHRSYLTPGDSSSGWTAGAAAYYVGYLQPRTFLLKYNENGTITDAVDCALDPLSETKCTLKSFTVEKGIYQTSNFRVQPTESIVRFPNITNLCPFGEVFNATRFASVYAWNRKRISNCVADYSVLYNSASFSTFKCYGVSPTKLNDLCFTNVYADSFVIRGDEVRQIAPGQTGKIADYNYKLPDDFTGCVIAWNSNNLDSKVGGNYNYLYRLFRKSNLKPFERDISTEIYQAGSTPCNGVEGFNCYFPLQSYGFQPTNGVGYQPYRVVVLSFELLHAPATVCGPKKSTNLVKNKCVNFNFNGLTGTGVLTESNKKFLPFQQFGRDIADTTDAVRDPQTLEILDITPCSFGGVSVITPGTNTSNQVAVLYQGVNCTEVPVAIHADQLTPTWRVYSTGSNVFQTRAGCLIGAEHVNNSYECDIPIGAGICASYQTQTNSPRRARSVASQSIIAYTMSLGAENSVAYSNNSIAICTNFTISVTTEILPVSMTKTSVDCTMYICGDSTECSNLLLQYGSFCTQLNRALTGIAVEQDKNTQEVFAQVKQIYKTPPIKDFGGFNFSQILPDPSKPSKRSFIEDLLFNKVTLADAGFTKQYGDCLGDIAARDLICAQKFNGLTVLPPLLTDEMIAQYTSALLAGTITSGWTFGAGAALQIPFAMQMAYRFNGIGVTQNVLYENQKLIANQFNSAIGKIQDSLSSTASALGKLQDVVNQNAQALNTLVKQLSSNFGAISSVLNDILSRLDKVEAEVQIDRLITGRLQSLQTYVTQQLIRAAEIRASANLAATKMSECVLGQSKRVDFCGKGYHLMSFPQSAPHGVVFLHVTYVCAQEKNFTTAPAICHDGKAHFPREGVFVSNGTHWFVTQRNFYEPQIITTDNTFVSGNCDVVIGIVNNTVYDPLQPELDSGGSGYIPEAPRDGQAYVRKDGEWVLLSTFL

SEQ ID NO: 10174 - protein, 1177 aa, Artificial Sequence
  SARS-CoV-2/Australia/NSW56/2020__EPI_ISL_417408 spike protein (1-1147)(P715C_P1069C) Foldon construct
MFVFLVLLPLVSSQCVNLTTRTQLPPAYTNSFTRGVYYPDKVFRSSVLHSTQDLFLPFFSNVTWFHAIHVSGTNGTKRFDNPVLPFNDGVYFASTEKSNIIRGWIFGTTLDSKTQSLLIVNNATNVVIKVCEFQFCNDPFLGVYYHKNNKSWMESEFRVYSSANNCTFEYVSQPFLMDLEGKQGNFKNLREFVFKNIDGYFKIYSKHTPINLVRDLPQGFSALEPLVDLPIGINITRFQTLLALHRSYLTPGDSSSGWTAGAAAYYVGYLQPRTFLLKYNENGTITDAVDCALDPLSETKCTLKSFTVEKGIYQTSNFRVQPTESIVRFPNITNLCPFGEVFNATRFASVYAWNRKRISNCVADYSVLYNSASFSTFKCYGVSPTKLNDLCFTNVYADSFVIRGDEVRQIAPGQTGKIADYNYKLPDDFTGCVIAWNSNNLDSKVGGNYNYLYRLFRKSNLKPFERDISTEIYQAGSTPCNGVEGFNCYFPLQSYGFQPTNGVGYQPYRVVVLSFELLHAPATVCGPKKSTNLVKNKCVNFNFNGLTGTGVLTESNKKFLPFQQFGRDIADTTDAVRDPQTLEILDITPCSFGGVSVITPGTNTSNQVAVLYQDVNCTEVPVAIHADQLTPTWRVYSTGSNVFQTRAGCLIGAEHVNNSYECDIPIGAGICASYQTQTNSPRRARSVASQSIIAYTMSLGAENSVAYSNNSIAICTNFTISVTTEILPVSMTKTSVDCTMYICGDSTECSNLLLQYGSFCTQLNRALTGIAVEQDKNTQEVFAQVKQIYKTPPIKDFGGFNFSQILPDSSKPSKRSFIEDLLFNKVTLADAGFIKQYGDCLGDIAARDLICAQKFNGLTVLPPLLTDEMIAQYTSALLAGTITSGWTFGAGAALQIPFAMQMAYRFNGIGVTQNVLYENQKLIANQFNSAIGKIQDSLSSTASALGKLQDVVNQNAQALNTLVKQLSSNFGAISSVLNDILSRLDKVEAEVQIDRLITGRLQSLQTYVTQQLIRAAEIRASANLAATKMSECVLGQSKRVDFCGKGYHLMSFPQSAPHGVVFLHVTYVCAQEKNFTTAPAICHDGKAHFPREGVFVSNGTHWFVTQRNFYEPQIITTDNTFVSGNCDVVIGIVNNTVYDPLQPELDSGGSGYIPEAPRDGQAYVRKDGEWVLLSTFL

SEQ ID NO: 10175 - protein, 1177 aa, Artificial Sequence
  SARS-CoV-2/Iceland/280/2020__EPI_ISL_417608 spike protein (1-1147)(P715C_P1069C) Foldon construct
MFVFLVLLPLVSSQCVNLTTRTQLPPAYTNSFTRGVYYPDKVFRSSVLHSTQDLFLPFFSNVTWFHAIHVSGTNGTKRFDNPVLPFNDGVYFASTEKSNIIRGWIFGTTLDSKTQSLLIVNNATNVVIKVCEFQFCNDPFLGVYYHKNNKSWMESEFRVYSSANNCTFEYVSQPFLMDLEGKQGNFKNLREFVFKNIDGYFKIYSKHTPINLVRDLPQGFSALEPLVDLPIGINITRFQTLLALHRSYLTPGDSSSGWTAGAAAYYVGYLQPRTFLLKYNENGTITDAVDCALDPLSETKCTLKSFTVEKGIYQTSNFRVQPTESIVRFPNITNLCPFGEVFNATRFASVYAWNRKRISNCVADYSVLYNSASFSTFKCYGVSPTKLNDLCFTNVYADSFVIRGDEVRQIAPGQTGKIADYNYKLPDDFTGCVIAWNSNNLDSKVGGNYNYLYRLFRKSNLKPFERDISTEIYQAGSTPCNGVEGFNCYFPLQSYGFQPTNGVGYQPYRVVVLSFELLHAPATVCGPKKSTNLVKNKCVNFNFNGLTGTGVLTESNKKFLPFQQFGRDIADTTDAVRDPQTLEILDITPCSFGGVSVITPGTNTSNQVAVLYQGVNCTEVPVAIHADQLTPTWRVYSTGSNVFQTRAGCLIGAEHVNNSYECDIPIGAGICASYHTQTNSPRRARSVASQSIIAYTMSLGAENSVAYSNNSIAICTNFTISVTTEILPVSMTKTSVDCTMYICGDSTECSNLLLQYGSFCTQLNRALTGIAVEQDKNTQEVFAQVKQIYKTPPIKDFGGFNFSQILPDPSKPSKRSFIEDLLFNKVTLADAGFIKQYGDCLGDIAARDLICAQKFNGLTVLPPLLTDEMIAQYTSALLAGTITSGWTFGAGAALQIPFAMQMAYRFNGIGVTQNVLYENQKLIANQFNSAIGKIQDSLSSTASALGKLQDVVNQNAQALNTLVKQLSSNFGAISSVLNDILSRLDKVEAEVQIDRLITGRLQSLQTYVTQQLIRAAEIRASANLAATKMSECVLGQSKRVDFCGKGYHLMSFPQSAPHGVVFLHVTYVCAQEKNFTTAPAICHDGKAHFPREGVFVSNGTHWFVTQRNFYEPQIITTDNTFVSGNCDVVIGIVNNTVYDPLQPELDSGGSGYIPEAPRDGQAYVRKDGEWVLLSTFL

SEQ ID NO: 10176 - protein, 1177 aa, Artificial Sequence; identical to SEQ ID NO: 10131
  SARS-CoV-2/Iceland/247/2020__EPI_ISL_417575 spike protein (1-1147)(P715C_P1069C) Foldon construct

SEQ ID NO: 10177 - protein, 1177 aa, Artificial Sequence
  SARS-CoV-2/Iceland/238/2020__EPI_ISL_417566 spike protein (1-1147)(P715C_P1069C) Foldon construct
MFVFLVLLPLVSSQCVNLTTRTQLPPAYTNSFTRGVYYPDKVFRSSVLHSTQDLFLPFFSNVTWFHAIHVSGTNGTKRFDNPVLPFNDGVYFASTEKSNIIRGWIFGTTLDSKTQSLLIVNNATNVVIKVCEFQFCNDPFLGVYYHKNNKSWMESEFRVYSSANNCTFEYVSQPFLMDLEGKQGNFKNLREFVFKNIDGYFKIYSKHTPINLVRDLPQGFSALEPLVDLPIGINITRFQTLLALHRSYLTPGDSSSGWTAGAAAYYVGYLQPRTFLLKYNENGTITDAVDCALDPLSETKCTLKSFTVEKGIYQTSNFRVQPTESIVRFPNITNLCPFGEVFNATRFASVYAWNRKRISNCVADYSVLYNSASFSTFKCYGVSPTKLNDLCFTNVYADSFVIRGDEVRQIAPGQTGKIADYNYKLPDDFTGCVIAWNSNNLDSKVGGNYNYLYRLFRKSNLKPFERDISTEIYQAGSTPCNGVEGFNCYFPLQSYGFQPTNGVGYQPYRVVVLSFELLHAPATVCGPKKSTNLVKNKCVNFNFNGLTGTGVLTESNKKFLPFQQFGRDIADTTDAVRDPQTLEILDITPCSFGGVSVITPGTNTSNQVAVLYQGVNCTEVPVAIHADQLTPTWRVYSTGSNVFQTRAGCLIGAEHVNNSYECDIPIGAGICASYQTQTNSPRRARSVASQSIIAYTMSLGAENSVAYSNNSIAICTNFTISVTTEILPVSMTKTSVDCTMYICGDSTECSNLLLQYGSFCTQLNRALTGIAVEQDKNTQEVFAQVKQIYKTPPIKDFGGFNFSQILPDPSKPSKRSFIEDLLFNKVTLADVGFIKQYGDCLGDIAARDLICAQKFNGLTVLPPLLTDEMIAQYTSALLAGTITSGWTFGAGAALQIPFAMQMAYRFNGIGVTQNVLYENQKLIANQFNSAIGKIQDSLSSTASALGKLQDVVNQNAQALNTLVKQLSSNFGAISSVLNDILSRLDKVEAEVQIDRLITGRLQSLQTYVTQQLIRAAEIRASANLAATKMSECVLGQSKRVDFCGKGYHLMSFPQSAPHGVVFLHVTYVCAQEKNFTTAPAICHDGKAHFPREGVFVSNGTHWFVTQRNFYEPQIITTDNTFVSGNCDVVIGIVNNTVYDPLQPELDSGGSGYIPEAPRDGQAYVRKDGEWVLLSTFL

SEQ ID NO: 10178 - protein, 1177 aa, Artificial Sequence
  SARS-CoV-2/Greece/16/2020__EPI_ISL_418265 spike protein (1-1147)(P715C_P1069C) Foldon construct
MFVFLVLLPLVSSQCVNLTTRTQLPPAYTNSFTRGVYYPDKVFRSSVLHSTQDLFLPFFSNVTWFHAIHVSGTNGTKRFDNPVLPFNDGVYFASTEKSNIIRGWIFGTTLDSKTQSLLIVNNATNVVIKVCEFQFCNDPFLGVYYHKNNKSWMESEFRVYSSANNCTFEYVSQPFLMDLEGKQGNFKNLREFVFKNVDGYFKIYSKHTPINLVRDLPQGFSALEPLVDLPIGINITRFQTLLALHRSYLTPGDSSSGWTAGAAAYYVGYLQPRTFLLKYNENGTITDAVDCALDPLSETKCTLKSFTVEKGIYQTSNFRVQPTESIVRFPNITNLCPFGEVFNATRFASVYAWNRKRISNCVADYSVLYNSASFSTFKCYGVSPTKLNDLCFTNVYADSFVIRGDEVRQIAPGQTGKIADYNYKLPDDFTGCVIAWNSNNLDSKVGGNYNYLYRLFRKSNLKPFERDISTEIYQAGSTPCNGVEGFNCYFPLQSYGFQPTNGVGYQPYRVVVLSFELLHAPATVCGPKKSTNLVKNKCVNFNFNGLTGTGVLTESNKKFLPFQQFGRDIADTTDAVRDPQTLEILDITPCSFGGVSVITPGTNTSNQVAVLYQDVNCTEVPVAIHADQLTPTWRVYSTGSNVFQTRAGCLIGAEHVNNSYECDIPIGAGICASYQTQTNSPRRARSVASQSIIAYTMSLGAENSVAYSNNSIAICTNFTISVTTEILPVSMTKTSVDCTMYICGDSTECSNLLLQYGSFCTQLNRALTGIAVEQDKNTQEVFAQVKQIYKTPPIKDFGGFNFSQILPDPSKPSKRSFIEDLLFNKVTLADAGFIKQYGDCLGDIAARDLICAQKFNGLTVLPPLLTDEMIAQYTSALLAGTITSGWTFGAGAALQIPFAMQMAYRFNGIGVTQNVLYENQKLIANQFNSAIGKIQDSLSSTASALGKLQDVVNQNAQALNTLVKQLSSNFGAISSVLNDILSRLDKVEAEVQIDRLITGRLQSLQTYVTQQLIRAAEIRASANLAATKMSECVLGQSKRVDFCGKGYHLMSFPQSAPHGVVFLHVTYVCAQEKNFTTAPAICHDGKAHFPREGVFVSNGTHWFVTQRNFYEPQIITTDNTFVSGNCDVVIGIVNNTVYDPLQPELDSGGSGYIPEAPRDGQAYVRKDGEWVLLSTFL

SEQ ID NO: 10179 - protein, 1177 aa, Artificial Sequence
  SARS-CoV-2/Iceland/319/2020__EPI_ISL_417648 spike protein (1-1147)(P715C_P1069C) Foldon construct
MFVFLVLLPLVSSQCVNLTTRTQLPPAYTNSFTRGVYYPDKVFRSSVLHSTQDLFLPFFSNVTWFHAIHVSGTNGTKRFDNPVLPFNDGVYFASTEKSNIIRGWIFGTTLDSKTQSLLIVNNATNVVIKVCEFQFCNDPFLGVYYHKNNKSWMESEFRVYSSANNCTFEYVSQPFLIDLEGKQGNFKNLREFVFKNIDGYFKIYSKHTPINLVRDLPQGFSALEPLVDLPIGINITRFQTLLALHRSYLTPGDSSSGWTAGAAAYYVGYLQPRTFLLKYNENGTITDAVDCALDPLSETKCTLKSFTVEKGIYQTSNFRVQPTESIVRFPNITNLCPFGEVFNATRFASVYAWNRKRISNCVADYSVLYNSASFSTFKCYGVSPTKLNDLCFTNVYADSFVIRGDEVRQIAPGQTGKIADYNYKLPDDFTGCVIAWNSNNLDSKVGGNYNYLYRLFRKSNLKPFERDISTEIYQAGSTPCNGVEGFNCYFPLQSYGFQPTNGVGYQPYRVVVLSFELLHAPATVCGPKKSTNLVKNKCVNFNFNGLTGTGVLTESNKKFLPFQQFGRDIADTTDAVRDPQTLEILDITPCSFGGVSVITPGTNTSNQVAVLYQGVNCTEVPVAIHADQLTPTWRVYSTGSNVFQTRAGCLIGAEHVNNSYECDIPIGAGICASYQTQTNSPRRARSVASQSIIAYTMSLGAENSVAYSNNSIAICTNFTISVTTEILPVSMTKTSVDCTMYICGDSTECSNLLLQYGSFCTQLNRALTGIAVEQDKNTQEVFAQVKQIYKTPPIKDFGGFNFSQILPDPSKPSKRSFIEDLLFNKVTLADAGFIKQYGDCLGDIAARDLICAQKFNGLTVLPPLLTDEMIAQYTSALLAGTITSGWTFGAGAALQIPFAMQMAYRFNGIGVTQNVLYENQKLIANQFNSAIGKIQDSLSSTASALGKLQDVVNQNAQALNTLVKQLSSNFGAISSVLNDILSRLDKVEAEVQIDRLITGRLQSLQTYVTQQLIRAAEIRASANLAATKMSECVLGQSKRVDFCGKGYHLMSFPQSAPHGVVFLHVTYVCAQEKNFTTAPAICHDGKAHFPREGVFVSNGTHWFVTQRNFYEPQIITTDNTFVSGNCDVVIGIVNNTVYDPLQPELDSGGSGYIPEAPRDGQAYVRKDGEWVLLSTFL

SEQ ID NO: 10180 - protein, 1177 aa, Artificial Sequence
  SARS-CoV-2/Congo/94/2020__EPI_ISL_417947 spike protein (1-1147)(P715C_P1069C) Foldon construct
MFVFLVLLPLVSSQCVNLTTRTQLPPAYTNSFTRGVYYPDKVFRSSVLHSTQDLFLPFFSNVTWFHAIHVSGTNGTKRFDNPVLPFNDGVYFASTEKSNIIRGWIFGTTLDSKTQSLLIVNNATNVVIKVCEFQFCNDPFLGVYYHKNNKSWMESEFRVYSSANNCTFEYVSQPFLMDLEGKQGNFKNLREFVFKNIDGYFKIYSKHTPINLVRDLPQGFSALEPLVDLPIGINITRFQTLLALHRSYLTPGDSSSGWTAGAAAYYVGYLQPRTFLLKYNENGTITDAVDCALDPLSETKCTLKSFTVEKGIYQTSNFRVQPTESIVRFPNITNLCPFGEVFNATRFASVYAWNRKRISNCVADYSVLYNSASFSTFKCYGVSPTKLNDLCFTNVYADSFVIRGDEVRQIAPGQTGKIADYNYKLPDDFTGCVIAWNSNNLDSKVGGNYNYLYRLFRKSNLKPFERDISTEIYQAGSTPCNGVEGFNCYFPLQSYGFQPTNGVGYQPYRVVVLSFELLHAPATVCGPKKSTNLVKNKCVNFNFNGLTGTGVLTESNKKFLPFQQFGRDIADTTDAVRDPQTLEILDITPCSFGGVSVITPGTNTSNQVAVLYQGVNCTEVPVAIHADQLTPTWRVYSTGSNVFQTRAGCLIGAEHVNNSYECDIPIGAGICASYQTQTNSPRRARSVASQSIIAYTMSLGAENSVAYSNNSIAICTNFTISVTTEILPVSMTKTSVDCTMYICGDSTECSNLLLQYGSFCTQLNRALTGIAVEQDKNTQEVFAQVKQIYKTPPIKDFGGFNFSQILPDPSKPSKRSFIEDILFNKVTLADAGFIKQYGDCLGDIAARDLICAQKFNGLTVLPPLLTDEMIAQYTSALLAGTITSGWTFGAGAALQIPFAMQMAYRFNGIGVTQNVLYENQKLIANQFNSAIGKIQDSLSSTASALGKLQDVVNQNAQALNTLVKQLSSNFGAISSVLNDILSRLDKVEAEVQIDRLITGRLQSLQTYVTQQLIRAAEIRASANLAATKMSECVLGQSKRVDFCGKGYHLMSFPQSAPHGVVFLHVTYVCAQEKNFTTAPAICHDGKAHFPREGVFVSNGTHWFVTQRNFYEPQIITTDNTFVSGNCDVVIGIVNNTVYDPLQPELDSGGSGYIPEAPRDGQAYVRKDGEWVLLSTFL

SEQ ID NO: 10181 - protein, 1177 aa, Artificial Sequence
  SARS-CoV-2/Congo/158/2020__EPI_ISL_417950 spike protein (1-1147)(P715C_P1069C) Foldon construct
MFVFLVLLPLVSSQCVNLTTRTQLPPAYTNSFTRGVYYPDKVFRSSVLHSTQDLFLPFFSNVTWFHAIHVSGTNGTKRFDNPVLPFNDGVYFASTEKSNIIRGWIFGTTLDSKTQSLLIVNNATNVVIKVCEFQFCNDPFLGVYYHKNNKSWMESEFRVYSSANNCTFEYVSQPFLMDLEGKQGNFKNLREFVFKNIDGYFKIYSKHTPINLVRDLPQGFSALEPLVDLPIGINITRFQTLLALHRSYLTPGDSSSGWTAGAAAYYVGYLQPRTFLLKYNENGTITDAVDCALDPLSETKCTLKSFTVEKGIYQTSNFRVQPTESIVRFPNITNLCPFGEVFNATRFASVYAWNRKRISNCVADYSVLYNSASFSTFKCYGVSPTKLNDLCFTNVYADSFVIRGDEVRQIAPGQTGKIADYNYKLPDDFTGCVIAWNSNNLDSKVGGNYNYLYRLFRKSNLKPFERDISTEIYQAGSTPCNGVEGFNCYFPLQSYGFQPTNGVGYQPYRVVVLSFELLHAPATVCGPKKSTNLVKNKCVNFNFNGLTGTGVLTESNKKFLPFQQFGRDIADTTDAVRDPQTLEILDITPCSFGGVSVITPGTNTSNQVAVLYQDVNCTEVPVAIHADQLTPTWRVYSTGSNVFQTRAGCLIGAEHVNNSYECDIPIGAGICASYQTQTNSPRRARSVASQSIIAYTMSLGAENSVAYSNNSIAICTNFTISVTTEILPVSMTKTSVDCTMYICGDSTECSNLLLQYGSFCTQLNRALTGIAVEQDKNTQEVFAQVKQIYKTPPIKDFGGFNFSQILPDPSKPSKRSFIEDLLFNKVTLADAGFIKQYGDCLGDIAARDLICAQKFNGLTVLPPLLTDEMIAQYTSALLAGTITSGWTFGAGAALQIPFAMQMAYRFNGIGVTQNVLYENQKLIANQFNSAIGKIQDSLSSTASALGKLQDVVNQNAQALNTLVKQLSSNFGAISSVLNDILSRLDKVEAEVQIDRLITGRLQSLQTYVTQQLIRAAEIRASANLAATKMSECVLGQSKRVDFCGKGYHLMSFPQSAPHGVVFLHVTYVCAQEKNFTTAPAICHDGKAHFPREGVFVSNGTHWFVTQRNFYEPQIITTDNTFLSGNCDVVIGIVNNTVYDPLQPELDSGGSGYIPEAPRDGQAYVRKDGEWVLLSTFL

SEQ ID NO: 10182 - protein, 1177 aa, Artificial Sequence
  SARS-CoV-2/USA/UT-00034/2020__EPI_ISL_417977 spike protein (1-1147)(P715C_P1069C) Foldon construct
MFVFLVLLPLVSSQCVNLTTRTQLPPAYTNSFTRGVYYPDKVFRSSVLHSTQDLFLPFFSNVTWFHAIHVSGTNGTKRFDNPVLPFNDGVYFASTEKSNIIRGWIFGTTLDSKTQSLLIVNNATNVVIKVCEFQFCNDPFLGVYYYKNNKSWMESEFRVYSSANNCTFEYVSQPFLMDLEGKQGNFKNLREFVFKNIDGYFKIYSKHTPINLVRDLPQGFSALEPLVDLPIGINITRFQTLLALHRSYLTPGDSSSGWTAGAAAYYVGYLQPRTFLLKYNENGTITDAVDCALDPLSETKCTLKSFTVEKGIYQTSNFRVQPTESIVRFPNITNLCPFGEVFNATRFASVYAWNRKRISNCVADYSVLYNSASFSTFKCYGVSPTKLNDLCFTNVYADSFVIRGDEVRQIAPGQTGKIADYNYKLPDDFTGCVIAWNSNNLDSKVGGNYNYLYRLFRKSNLKPFERDISTEIYQAGSTPCNGVEGFNCYFPLQSYGFQPTNGVGYQPYRVVVLSFELLHAPATVCGPKKSTNLVKNKCVNFNFNGLTGTGVLTESNKKFLPFQQFGRDIADTTDAVRDPQTLEILDITPCSFGGVSVITPGTNTSNQVAVLYQGVNCTEVPVAIHADQLTPTWRVYSTGSNVFQTRAGCLIGAEHVNNSYECDIPIGAGICASYQTQTNSPRRARSVASQSIIAYTMSLGAENSVAYSNNSIAICTNFTISVTTEILPVSMTKTSVDCTMYICGDSTECSNLLLQYGSFCTQLNRALTGIAVEQDKNTQEVFAQVKQIYKTPPIKDFGGFNFSQILPDPSKPSKRSFIEDLLFNKVTLADAGFIKQYGDCLGDIAARDLICAQKFNGLTVLPPLLTDEMIAQYTSALLAGTITSGWTFGAGAALQIPFAMQMAYRFNGIGVTQNVLYENQKLIANQFNSAIGKIQDSLSSTASALGKLQDVVNQNAQALNTLVKQLSSNFGAISSVLNDILSRLDKVEAEVQIDRLITGRLQSLQTYVTQQLIRAAEIRASANLAATKMSECVLGQSKRVDFCGKGYHLMSFPQSAPHGVVFLHVTYVCAQEKNFTTAPAICHDGKAHFPREGVFVSNGTHWFVTQRNFYEPQIITTDNTFVSGNCDVVIGIVNNTVYDPLQPELDSGGSGYIPEAPRDGQAYVRKDGEWVLLSTFL

SEQ ID NO: 10183 - protein, 1177 aa, Artificial Sequence
  SARS-CoV-2/USA/UT-00033/2020__EPI_ISL_417976 spike protein (1-1147)(P715C_P1069C) Foldon construct
MFVFLVLLPLVSSQCVNLTTRTQLPPAYTNSFTRGVYYPDKVFRSSVLHSTQDLFLPFFSNVTWFHAIHVSGTNGTKRFDNPVLPFNDGVYFASTEKSNIIRGWIFGTTLDSKTQSLLIVNNATNVVIKVCEFQFCNDPFLGVYYHKNNKSWMESEFRVYSSANNCTFEYVSQPFLMDLEGKQGNFKNLREFVFKNIDGYFKIYSKHTPINLVRDLPQGFSALEPLVDLPIGINITRFQTLLALHRSYLTPGDSSSGLTAGAAAYYVGYLQPRTFLLKYNENGTITDAVDCALDPLSETKCTLKSFTVEKGIYQTSNFRVQPTESIVRFPNITNLCPFGEVFNATRFASVYAWNRKRISNCVADYSVLYNSASFSTFKCYGVSPTKLNDLCFTNVYADSFVIRGDEVRQIAPGQTGKIADYNYKLPDDFTGCVIAWNSNNLDSKVGGNYNYLYRLFRKSNLKPFERDISTEIYQAGSTPCNGVEGFNCYFPLQSYGFQPTNGVGYQPYRVVVLSFELLHAPATVCGPKKSTNLVKNKCVNFNFNGLTGTGVLTESNKKFLPFQQFGRDIADTTDAVRDPQTLEILDITPCSFGGVSVITPGTNTSNQVAVLYQGVNCTEVPVAIHADQLTPTWRVYSTGSNVFQTRAGCLIGAEHVNNSYECDIPIGAGICASYQTQTNSPRRARSVASQSIIAYTMSLGAENSVAYSNNSIAICTNFTISVTTEILPVSMTKTSVDCTMYICGDSTECSNLLLQYGSFCTQLNRALTGIAVEQDKNTQEVFAQVKQIYKTPPIKDFGGFNFSQILPDPSKPSKRSFIEDLLFNKVTLADAGFIKQYGDCLGDIAARDLICAQKFNGLTVLPPLLTDEMIAQYTSALLAGTITSGWTFGAGAALQIPFAMQMAYRFNGIGVTQNVLYENQKLIANQFNSAIGKIQDSLSSTASALGKLQDVVNQNAQALNTLVKQLSSNFGAISSVLNDILSRLDKVEAEVQIDRLITGRLQSLQTYVTQQLIRAAEIRASANLAATKMSECVLGQSKRVDFCGKGYHLMSFPQSAPHGVVFLHVTYVCAQEKNFTTAPAICHDGKAHFPREGVFVSNGTHWFVTQRNFYEPQIITTDNTFVSGNCDVVIGIVNNTVYDPLQPELDSGGSGYIPEAPRDGQAYVRKDGEWVLLSTFL

SEQ ID NO: 10184 - protein, 1177 aa, Artificial Sequence
  SARS-CoV-2/USA/WI-13/2020__EPI_ISL_417516 spike protein (1-1147)(P715C_P1069C) Foldon construct
MFVFLVLLPLVSSQCVNLTTRTQLPPAYTNSFTRGVYYPDKVFRSSVLHSTQDLFLPFFSNVTWFHAIHVSGTNGTKRFDNPVLPFNDGVYFASTEKSNIIRGWIFGTTLDSKTQSLLIVNNATNVVIKVCEFQFCNDPFLGVYYHKNNKSWMESEFRVYSSANNCTFEYVSQPFLMDLEGKQGNFKNLREFVFKNIDGYFKIYSKHTPINLVRDLPQGFSALEPLVDLPIGINITRFQTLLALHRSYLTPGDSSSGWTAGAAAYYVGYLQPRTFLLKYNENGTITDAVDCALDPLSETKCTLKSFTVEKGIYQTSNFRVLPTESIVRFPNITNLCPFGEVFNATRFASVYAWNRKRISNCVADYSVLYNSASFSTFKCYGVSPTKLNDLCFTNVYADSFVIRGDEVRQIAPGQTGKIADYNYKLPDDFTGCVIAWNSNNLDSKVGGNYNYLYRLFRKSNLKPFERDISTEIYQAGSTPCNGVEGFNCYFPLQSYGFQPTNGVGYQPYRVVVLSFELLHAPATVCGPKKSTNLVKNKCVNFNFNGLTGTGVLTESNKKFLPFQQFGRDIADTTDAVRDPQTLEILDITPCSFGGVSVITPGTNTSNQVAVLYQGVNCTEVPVAIHADQLTPTWRVYSTGSNVFQTRAGCLIGAEHVNNSYECDIPIGAGICASYQTQTNSPRRARSVASQSIIAYTMSLGAENSVAYSNNSIAICTNFTISVTTEILPVSMTKTSVDCTMYICGDSTECSNLLLQYGSFCTQLNRALTGIAVEQDKNTQEVFAQVKQIYKTPPIKDFGGFNFSQILPDPSKPSKRSFIEDLLFNKVTLADAGFIKQYGDCLGDIAARDLICAQKFNGLTVLPPLLTDEMIAQYTSALLAGTITSGWTFGAGAALQIPFAMQMAYRFNGIGVTQNVLYENQKLIANQFNSAIGKIQDSLSSTASALGKLQDVVNQNAQALNTLVKQLSSNFGAISSVLNDILSRLDKVEAEVQIDRLITGRLQSLQTYVTQQLIRAAEIRASANLAATKMSECVLGQSKRVDFCGKGYHLMSFPQSAPHGVVFLHVTYVCAQEKNFTTAPAICHDGKAHFPREGVFVSNGTHWFVTQRNFYEPQIITTDNTFVSGNCDVVIGIVNNTVYDPLQPELDSGGSGYIPEAPRDGQAYVRKDGEWVLLSTFL

SEQ ID NO: 10185 - protein, 1176 aa, Artificial Sequence
  SARS-CoV-2/India/1-27/2020__EPI_ISL_413522 spike protein (1-1146)(P714C_P1068C) Foldon construct
MFVFLVLLPLVSSQCVNLTTRTQLPPAYTNSFTRGVYYPDKVFRSSVLHSTQDLFLPFFSNVTWFHAIHVSGTNGTKRFDNPVLPFNDGVYFASTEKSNIIRGWIFGTTLDSKTQSLLIVNNATNVVIKVCEFQFCNDPFLGVYHKNNKSWMESEFRVYSSANNCTFEYVSQPFLMDLEGKQGNFKNLREFVFKNIDGYFKIYSKHTPINLVRDLPQGFSALEPLVDLPIGINITRFQTLLALHRSYLTPGDSSSGWTAGAAAYYVGYLQPRTFLLKYNENGTITDAVDCALDPLSETKCTLKSFTVEKGIYQTSNFRVQPTESIVRFPNITNLCPFGEVFNATRFASVYAWNRKRISNCVADYSVLYNSASFSTFKCYGVSPTKLNDLCFTNVYADSFVIRGDEVIQIAPGQTGKIADYNYKLPDDFTGCVIAWNSNNLDSKVGGNYNYLYRLFRKSNLKPFERDISTEIYQAGSTPCNGVEGFNCYFPLQSYGFQPTNGVGYQPYRVVVLSFELLHAPATVCGPKKSTNLVKNKCVNFNFNGLTGTGVLTESNKKFLPFQQFGRDIADTTDAVRDPQTLEILDITPCSFGGVSVITPGTNTSNQVAVLYQDVNCTEVPVAIHADQLTPTWRVYSTGSNVFQTRAGCLIGAEHVNNSYECDIPIGAGICASYQTQTNSPRRARSVASQSIIAYTMSLGAENSVAYSNNSIAICTNFTISVTTEILPVSMTKTSVDCTMYICGDSTECSNLLLQYGSFCTQLNRALTGIAVEQDKNTQEVFAQVKQIYKTPPIKDFGGFNFSQILPDPSKPSKRSFIEDLLFNKVTLADAGFIKQYGDCLGDIAARDLICAQKFNGLTVLPPLLTDEMIAQYTSALLAGTITSGWTFGAGAALQIPFAMQMAYRFNGIGVTQNVLYENQKLIANQFNSAIGKIQDSLSSTASALGKLQDVVNQNAQALNTLVKQLSSNFGAISSVLNDILSRLDKVEAEVQIDRLITGRLQSLQTYVTQQLIRAAEIRASANLAATKMSECVLGQSKRVDFCGKGYHLMSFPQSAPHGVVFLHVTYVCAQEKNFTTAPAICHDGKAHFPREGVFVSNGTHWFVTQRNFYEPQIITTDNTFVSGNCDVVIGIVNNTVYDPLQPELDSGGSGYIPEAPRDGQAYVRKDGEWVLLSTFL

SEQ ID NO: 10186 - protein, 1171 aa, Artificial Sequence
  SARS-CoV-2/pangolin/Guangxi/P4L/2017__EPI_ISL_410538 spike protein (1-1141)(P709C_P1063C) Foldon construct
MFVFLFVLPLVSSQCVNLTTRTGIPPGYTNSSTRGVYYPDKVFRSSILHLTQDLFLPFFSNVTWFNTINYQGGFKKFDNPVLPFNDGVYFASTEKSNIIRGWIFGTTLDARTQSLLIVNNATNVVIKVCEFQFCTDPFLGVYYHNNNKTWVENEFRVYSSANNCTFEYISQPFLMDLEGKQGNFKNLREFVFKNVDGYFKIYSKHTPIDLVRDLPRGFAALEPLVDLPIGINITRFQTLLALHRSYLTPGNLESGWTTGAAAYYVGYLQQRTFLLSYNQNGTITDAVDCSLDPLSETKCTLKSLTVEKGIYQTSNFRVQPTISIVRFPNITNLCPFGEVFNASKFASVYAWNRKRISNCVADYSVLYNSTSFSTFKCYGVSPTKLNDLCFTNVYADSFVVKGDEVRQIAPGQTGVIADYNYKLPDDFTGCVIAWNSVKQDALTGGNYGYLYRLFRKSKLKPFERDISTEIYQAGSTPCNGQVGLNCYYPLERYGFHPTTGVNYQPFRVVVLSFELLNGPATVCGPKLSTTLVKDKCVNFNFNGLTGTGVLTTSKKQFLPFQQFGRDISDTTDAVRDPQTLEILDITPCSFGGVSVITPGTNTSNQVAVLYQDVNCTEVPMAIHAEQLTPAWRVYSAGANVFQTRAGCLVGAEHVNNSYECDIPVGAGICASYHSMSSLRSVNQRSIIAYTMSLGAENSVAYSNNSIAICTNFTISVTTEILPVSMTKTSVDCTMYICGDSIECSNLLLQYGSFCTQLNRALTGIAVEQDKNTQEVFAQVKQIYKTPPIKDFGGFNFSQILPDPSKPSKRSFIEDLLFNKVTLADAGFIKQYGDCLGDIAARDLICAQKFNGLTVLPPLLTDEMIAQYTSALLAGTITSGWTFGAGAALQIPFAMQMAYRFNGIGVTQNVLYENQKLIANQFNSAIGKIQDSLSSTASALGKLQDVVNQNAQALNTLVKQLSSNFGAISSVLNDILSRLDKVEAEVQIDRLITGRLQSLQTYVTQQLIRAAEIRASANLAATKMSECVLGQSKRVDFCGKGYHLMSFPQSAPHGVVFLHVTYVCAQEKNFTTAPAICHEGKAHFPREGVFVSNGTHWFITQRNFYEPQIITTDNTFVSGSCDVVIGIVNNTVYDPLQPELDSGGSGYIPEAPRDGQAYVRKDGEWVLLSTFL

SEQ ID NO: 10187 - protein, 1171 aa, Artificial Sequence
  SARS-CoV-2/pangolin/Guangxi/P5L/2017__EPI_ISL_410540 spike protein (1-1141)(P709C_P1063C) Foldon construct
MFVFLFVLPLVSSQCVNLTTRTGIPPGYTNSSTRGVYYPDKVFRSSILHLTQDLFLPFFSNVTWFNTINYQGGFKKFDNPVLPFNDGVYFASTEKSNIIRGWIFGTTLDARTQSLLIVNNATNVVIKVCEFQFCTDPFLGVYYHNNNKTWVENEFRVYSSANNCTFEYISQPFLMDLEGKQGNFKNLREFVFKNVDGYFKIYSKHTPIDLVRDLPRGFAALEPLVDLPIGINITRFQTLLALHRSYLTPGKLESGWTTGAAAYYVGYLQQRTFLLSYNQNGTITDAVDCSLDPLSETKCTLKSLTVEKGIYQTSNFRVQPTISIVRFPNITNLCPFGEVFNASKFASVYAWNRKRISNCVADYSVLYNSTSFSTFKCYGVSPTKLNDLCFTNVYADSFVVKGDEVRQIAPGQTGVIADYNYKLPDDFTGCVIAWNSVKQDALTGGNYGYLYRLFRKSKLKPFERDISTEIYQAGSTPCNGQVGLNCYYPLERYGFHPTTGVNYQPFRVVVLSFELLNGPATVCGPKLSTTLVKDKCVNFNFNGLTGTGVLTTSKKQFLPFQQFGRDISDTTDAVRDPQTLEILDITPCSFGGVSVITPGTNTSNQVAVLYQDVNCTEVPMAIHAEQLTPAWRVYSAGANVFQTRAGCLVGAEHVNNSYECDIPVGAGICASYHSMSSFRSVNQRSIIAYTMSLGAENSVAYSNNSIAICTNFTISVTTEILPVSMTKTSVDCTMYICGDSIECSNLLLQYGSFCTQLNRALTGIAVEQDKNTQEVFAQVKQIYKTPPIKDFGGFNFSQILPDPSKPSKRSFIEDLLFNKVTLADAGFIKQYGDCLGDIAARDLICAQKFNGLTVLPPLLTDEMIAQYTSALLAGTITSGWTFGAGAALQIPFAMQMAYRFNGIGVTQNVLYENQKLIANQFNSAIGKIQDSLSSTASALGKLQDVVNQNAQALNTLVKQLSSNFGAISSVLNDILSRLDKVEAEVQIDRLITGRLQSLQTYVTQQLIRAAEIRASANLAATKMSECVLGQSKRVDFCGKGYHLMSFPQSAPHGVVFLHVTYVCAQEKNFTTAPAICHEGKAHFPREGVFVSNGTHWFITQRNFYEPQIITTDNTFVSGSCDVVIGIVNNTVYDPLQPELDSGGSGYIPEAPRDGQAYVRKDGEWVLLSTFL

SEQ ID NO: 10188 - protein, 1171 aa, Artificial Sequence
  SARS-CoV-2/pangolin/Guangxi/P5E/2017__EPI_ISL_410541 spike protein (1-1141)(P709C_P1063C) Foldon construct
MFVFLFVLPLVSSQCVNLTTRTGIPPGYTNSSTRGVYYPDKVFRSSILHLTQDLFLPFFSNVTWFNTITYQGGSKKFDNPVLPFNDGVYFASTEKSNIIRGWIFGTTLDARTQSLLIVNNATNVVIKVCEFQFCTDPFLGVYYHNNNKTWVENEFRVYSSANNCTFEYISQPFLMDLEGKQGNFKNLREFVFKNVDGYFKIYSKHTPIDLVRDLPRGFAALEPLVDLPIGINITRFQTLLALHRSYLTPGKLESGWTTGAAAYYVGYLQQRTFLLSYNQNGTITDAVDCSLDPLSETKCTLKSLTVEKGIYQTSNFRVQPTISIVRFPNITNLCPFGEVFNASKFASVYAWNRKRISNCVADYSVLYNSTSFSTFKCYGVSPTKLNDLCFTNVYADSFVVKGDEVRQIAPGQTGVIADYNYKLPDDFTGCVIAWNSVKQDALTGDNYGYLYRLFRKSKLKPFERDISTEIYQAGSTPCNGQVGLNCYYPLERYGFHPTTGVNYQPFRVVVLSFELLNGPATVCGPKLSTTLVKDKCVNFNFNGLTGTGVLTTSKKQFLPFQQFGRDISDTTDAVRDPQTLEILDITPCSFGGVSVITPGTNTSNQVAVLYQDVNCTEVPMAIHAEQLTPAWRVYSAGANVFQTRAGCLVGAEHVNNSYECDIPVGAGICASYHSMSSFRSVNQRSIIAYTMSLGAENSVAYSNNSIAICTNFTISVTTEILPVSMTKTSVDCTMYICGDSIECSNLLLQYGSFCTQLNRALTGIAVEQDKNTQEVFAQVKQIYKTPPIKDFGGFNFSQILPDPSKPSKRSFIEDLLFNKVTLADAGFIKQYGDCLGDIAARDLICAQKFNGLTVLPPLLTDEMIAQYTSALLAGTITSGWTFGAGAALQIPFAMQMAYRFNGIGVTQNVLYENQKLIANQFNSAIGKIQDSLSSTASALGKLQDVVNQNAQALNTLVKQLSSNFGAISSVLNDILSRLDKVEAEVQIDRLITGRLQSLQTYVTQQLIRAAEIRASANLAATKMSECVLGQSKRVDFCGKGYHLMSFPQSAPHGVVFLHVTYVCAQEKNFTTAPAICHEGKAHFPREGVFVSNGTHWFITQRNFYEPQIITTDNTFVSGSCDVVIGIVNNTVYDPLQPELDSGGSGYIPEAPRDGQAYVRKDGEWVLLSTFL

SEQ ID NO: 10189 - protein, 1169 aa, Artificial Sequence
  SARS-CoV-2/pangolin/Guangxi/P1E/2017__EPI_ISL_410539 spike protein (1-1139)(P707C_P1061C) Foldon construct
MFVFLFVLPLVSSQCVNLTTRTGIQPGYTNSSTRGVYYPDKVFRSSILHLTQDLFLPFFSNVTWFNTINYQGGFKKFDNPVLPFNDGVYFASTEKSNIIRGWIFGTTLDARTQSLLIVNNATNVVIKVCEFQFCTDPFLGVYYHNNNKTWVENEFRVYSSANNCTFEYISQPFLMDLEGKQGNFKNLREFVFKNVDGYFKIYSKHTPIDLVRDLPRGFAALEPLVDLPIGINITRFQTLLALHRSYLTPGKLESGWTTGAAAYYVGYLQQRTFLLSYNQNGTITDAVDCSLDPLSETKCTLKSLTVEKGIYQTSNFRVQPTISIVRFPNITNLCPFGEVFNASKFASVYAWNRKRISNCVADYSVLYNSTSFSTFKCYGVSPTKLNDLCFTNVYADSFVVKGDEVRQIAPGQTGVIADYNYKLPDDFTGCVIAWNSVKQDALTGGNYLYRLFRKSKLKPFERDISTEIYQAGSTPCNGQVGLNCYYPLERYGFHPTTGVNYQPFRVVVLSFELLNGPATVCGPKLSTTLVKDKCVNFNFNGLTGTGVLTTSKKQFLPFQQFGRDISDTTDAVRDPQTLEILDITPCSFGGVSVITPGTNTSNQVAVLYQDVNCTEVPMAIHAEQLTPAWRVYSAGANVFQTRAGCLVGAEHVNNSYECDIPVGAGICASYHSMSSLRSVNQRSIIAYTMSLGAENSVAYSNNSIAICTNFTISVTTEILPVSMTKTSVDCTMYICGDSIECSNLLLQYGSFCTQLNRALTGIAVEQDKNTQEVFAQVKQIYKTPPIKDFGGFNFSQILPDPSKPSKRSFIEDLLFNKVTLADAGFIKQYGDCLGDIAARDLICAQKFNGLTVLPPLLTDEMIAQYTSALLAGTITSGWTFGAGAALQIPFAMQMAYRFNGIGVTQNVLYENQKLIANQFNSAIGKIQDSLSSTASALGKLQDVVNQNAQALNTLVKQLSSNFGAISSVLNDILSRLDKVEAEVQIDRLITGRLQSLQTYVTQQLIRAAEIRASANLAATKMSECVLGQSKRVDFCGKGYHLMSFPQSAPHGVVFLHVTYVCAQEKNFTTAPAICHEGKAHFPREGVFVSNGTHWFITQRNFYEPQIITTDNTFVSGSCDVVIGIVNNTVYDPLQPELDSGGSGYIPEAPRDGQAYVRKDGEWVLLSTFL

SEQ ID NO: 10190 - protein, 1177 aa, Artificial Sequence
  SARS-CoV-2/Wuhan/WIV05/2019__EPI_ISL_402128 spike protein (1-1147)(G889C_L1034C) Foldon construct
MFVFLVLLPLVSSQCVNLTTRTQLPPAYTNSFTRGVYYPDKVFRSSVLHSTQDLFLPFFSNVTWFHAIHVSGTNGTKRFDNPVLPFNDGVYFASTEKSNIIRGWIFGTTLDSKTQSLLIVNNATNVVIKVCEFQFCNDPFLGVYYHKNNKSWMESEFRVYSSANNCTFEYVSQPFLMDLEGKQGNFKNLREFVFKNIDGYFKIYSKHTPINLVRDLPQGFSALEPLVDLPIGINITRFQTLLALHRSYLTPGDSSSGWTAGAAAYYVGYLQPRTFLLKYNENGTITDAVDCALDPLSETKCTLKSFTVEKGIYQTSNFRVQPTESIVRFPNITNLCPFGEVFNATRFASVYAWNRKRISNCVADYSVLYNSASFSTFKCYGVSPTKLNDLCFTNVYADSFVIRGDEVRQIAPGQTGKIADYNYKLPDDFTGCVIAWNSNNLDSKVGGNYNYLYRLFRKSNLKPFERDISTEIYQAGSTPCNGVEGFNCYFPLQSYGFQPTNGVGYQPYRVVVLSFELLHAPATVCGPKKSTNLVKNKCVNFNFNGLTGTGVLTESNKKFLPFQQFGRDIADTTDAVRDPQTLEILDITPCSFGGVSVITPGTNTSNQVAVLYQDVNCTEVPVAIHADQLTPTWRVYSTGSNVFQTRAGCLIGAEHVNNSYECDIPIGAGICASYQTQTNSPRRARSVASQSIIAYTMSLGAENSVAYSNNSIAIPTNFTISVTTEILPVSMTKTSVDCTMYICGDSTECSNLLLQYGSFCTQLNRALTGIAVEQDKNTQEVFAQVKQIYKTPPIKDFGGFNFSQILPDPSKPSKRSFIEDLLFNKVTLADAGFIKQYGDCLGDIAARDLICAQKFNGLTVLPPLLTDEMIAQYTSALLAGTITSGWTFCAGAALQIPFAMQMAYRFNGIGVTQNVLYENQKLIANQFNSAIGKIQDSLSSTASALGKLQDVVNQNAQALNTLVKQLSSNFGAISSVLNDILSRLDKVEAEVQIDRLITGRLQSLQTYVTQQLIRAAEIRASANLAATKMSECVCGQSKRVDFCGKGYHLMSFPQSAPHGVVFLHVTYVPAQEKNFTTAPAICHDGKAHFPREGVFVSNGTHWFVTQRNFYEPQIITTDNTFVSGNCDVVIGIVNNTVYDPLQPELDSGGSGYIPEAPRDGQAYVRKDGEWVLLSTFL

SEQ ID NO: 10191 - protein, 1173 aa, Artificial Sequence
  SARS-CoV-2/bat/Yunnan/RaTG13/2013__EPI_ISL_402131 spike protein (1-1143)(G885C_L1030C) Foldon construct
MFVFLVLLPLVSSQCVNLTTRTQLPPAYTNSSTRGVYYPDKVFRSSVLHLTQDLFLPFFSNVTWFHAIHVSGTNGIKRFDNPVLPFNDGVYFASTEKSNIIRGWIFGTTLDSKTQSLLIVNNATNVVIKVCEFQFCNDPFLGVYYHKNNKSWMESEFRVYSSANNCTFEYVSQPFLMDLEGKQGNFKNLREFVFKNIDGYFKIYSKHTPINLVRDLPPGFSALEPLVDLPIGINITRFQTLLALHRSYLTPGDSSSGWTAGAAAYYVGYLQPRTFLLKYNENGTITDAVDCALDPLSETKCTLKSFTVEKGIYQTSNFRVQPTDSIVRFPNITNLCPFGEVFNATTFASVYAWNRKRISNCVADYSVLYNSTSFSTFKCYGVSPTKLNDLCFTNVYADSFVITGDEVRQIAPGQTGKIADYNYKLPDDFTGCVIAWNSKHIDAKEGGNFNYLYRLFRKANLKPFERDISTEIYQAGSKPCNGQTGLNCYYPLYRYGFYPTDGVGHQPYRVVVLSFELLNAPATVCGPKKSTNLVKNKCVNFNFNGLTGTGVLTESNKKFLPFQQFGRDIADTTDAVRDPQTLEILDITPCSFGGVSVITPGTNASNQVAVLYQDVNCTEVPVAIHADQLTPTWRVYSTGSNVFQTRAGCLIGAEHVNNSYECDIPIGAGICASYQTQTNSRSVASQSIIAYTMSLGAENSVAYSNNSIAIPTNFTISVTTEILPVSMTKTSVDCTMYICGDSTECSNLLLQYGSFCTQLNRALTGIAVEQDKNTQEVFAQVKQIYKTPPIKDFGGFNFSQILPDPSKPSKRSFIEDLLFNKVTLADAGFIKQYGDCLGDIAARDLICAQKFNGLTVLPPLLTDEMIAQYTSALLAGTITSGWTFCAGAALQIPFAMQMAYRFNGIGVTQNVLYENQKLIANQFNSAIGKIQDSLSSTASALGKLQDVVNQNAQALNTLVKQLSSNFGAISSVLNDILSRLDKVEAEVQIDRLITGRLQSLQTYVTQQLIRAAEIRASANLAATKMSECVCGQSKRVDFCGKGYHLMSFPQSAPHGVVFLHVTYVPAQEKNFTTAPAICHDGKAHFPREGVFVSNGTHWFVTQRNFYEPQIITTDNTFVSGSCDVVIGIVNNTVYDPLQPELDSGGSGYIPEAPRDGQAYVRKDGEWVLLSTFL

SEQ ID NO: 10192 - protein, 1177 aa, Artificial Sequence
  SARS-CoV-2/Wuhan/HBCDC-HB-01/2019__EPI_ISL_402132 spike protein (1-1147)(G889C_L1034C) Foldon construct
MFVFLVLLPLVSSQCVNLTTRTQLPPAYTNSITRGVYYPDKVFRSSVLHSTQDLFLPFFSNVTWFHAIHVSGTNGTKRFDNPVLPFNDGVYFASTEKSNIIRGWIFGTTLDSKTQSLLIVNNATNVVIKVCEFQFCNDPFLGVYYHKNNKSWMESEFRVYSSANNCTFEYVSQPFLMDLEGKQGNFKNLREFVFKNIDGYFKIYSKHTPINLVRDLPQGFSALEPLVDLPIGINITRFQTLLALHRSYLTPGDSSSGWTAGAAAYYVGYLQPRTFLLKYNENGTITDAVDCALDPLSETKCTLKSFTVEKGIYQTSNFRVQPTESIVRFPNITNLCPFGEVFNATRFASVYAWNRKRISNCVADYSVLYNSASFSTFKCYGVSPTKLNDLCFTNVYADSFVIRGDEVRQIAPGQTGKIADYNYKLPDDFTGCVIAWNSNNLDSKVGGNYNYLYRLFRKSNLKPFERDISTEIYQAGSTPCNGVEGFNCYFPLQSYGFQPTNGVGYQPYRVVVLSFELLHAPATVCGPKKSTNLVKNKCVNFNFNGLTGTGVLTESNKKFLPFQQFGRDIADTTDAVRDPQTLEILDITPCSFGGVSVITPGTNTSNQVAVLYQDVNCTEVPVAIHADQLTPTWRVYSTGSNVFQTRAGCLIGAEHVNNSYECDIPIGAGICASYQTQTNSPRRARSVASQSIIAYTMSLGAENSVAYSNNSIAIPTNFTISVTTEILPVSMTKTSVDCTMYICGDSTECSNLLLQYGSFCTQLNRALTGIAVEQDKNTQEVFAQVKQIYKTPPIKDFGGFNFSQILPDPSKPSKRSFIEDLLFNKVTLADAGFIKQYGDCLGDIAARDLICAQKFNGLTVLPPLLTDEMIAQYTSALLAGTITSGWTFCAGAALQIPFAMQMAYRFNGIGVTQNVLYENQKLIANQFNSAIGKIQDSLSSTASALGKLQDVVNQNAQALNTLVKQLSSNFGAISSVLNDILSRLDKVEAEVQIDRLITGRLQSLQTYVTQQLIRAAEIRASANLAATKMSECVCGQSKRVDFCGKGYHLMSFPQSAPHGVVFLHVTYVPAQEKNFTTAPAICHDGKAHFPREGVFVSNGTHWFVTQRNFYEPQIITTDNTFVSGNCDVVIGIVNNTVYDPLQPELDSGGSGYIPEAPRDGQAYVRKDGEWVLLSTFL

SEQ ID NO: 10193 - protein, 1177 aa, Artificial Sequence
  SARS-CoV-2/Guangdong/20SF028/2020__EPI_ISL_403936 spike protein (1-1147)(G889C_L1034C) Foldon construct
MFVFLVLLPLVSSQCVNLTTRTQLPPAYTNSFTRGVYYPDKVFRSSVLYSTQDLFLPFFSNVTWFHAIHVSGTNGTKRFDNPVLPFNDGVYFASTEKSNIIRGWIFGTTLDSKTQSLLIVNNATNVVIKVCEFQFCNDPFLGVYYHKNNKSWMESEFRVYSSANNCTFEYVSQPFLMDLEGKQGNFKNLREFVFKNIDGYFKIYSKHTPINLVRDLPQGFSALEPLVDLPIGINITRFQTLLALHRSYLTPGDSSSGWTAGAAAYYVGYLQPRTFLLKYNENGTITDAVDCALDPLSETKCTLKSFTVEKGIYQTSNFRVQPTESIVRFPNITNLCPFGEVFNATRFASVYAWNRKRISNCVADYSVLYNSASFSTFKCYGVSPTKLNDLCFTNVYADSFVIRGDEVRQIAPGQTGKIADYNYKLPDDFTGCVIAWNSNNLDSKVGGNYNYLYRLFRKSNLKPFERDISTEIYQAGSTPCNGVEGFNCYFPLQSYGFQPTNGVGYQPYRVVVLSFELLHAPATVCGPKKSTNLVKNKCVNFNFNGLTGTGVLTESNKKFLPFQQFGRDIADTTDAVRDPQTLEILDITPCSFGGVSVITPGTNTSNQVAVLYQDVNCTEVPVAIHADQLTPTWRVYSTGSNVFQTRAGCLIGAEHVNNSYECDIPIGAGICASYQTQTNSPRRARSVASQSIIAYTMSLGAENSVAYSNNSIAIPTNFTISVTTEILPVSMTKTSVDCTMYICGDSTECSNLLLQYGSFCTQLNRALTGIAVEQDKNTQEVFAQVKQIYKTPPIKDFGGFNFSQILPDPSKPSKRSFIEDLLFNKVTLADAGFIKQYGDCLGDIAARDLICAQKFNGLTVLPPLLTDEMIAQYTSALLAGTITSGWTFCAGAALQIPFAMQMAYRFNGIGVTQNVLYENQKLIANQFNSAIGKIQDSLSSTASALGKLQDVVNQNAQALNTLVKQLSSNFGAISSVLNDILSRLDKVEAEVQIDRLITGRLQSLQTYVTQQLIRAAEIRASANLAATKMSECVCGQSKRVDFCGKGYHLMSFPQSAPHGVVFLHVTYVPAQEKNFTTAPAICHDGKAHFPREGVFVSNGTHWFVTQRNFYEPQIITTDNTFVSGNCDVVIGIVNNTVYDPLQPELDSGGSGYIPEAPRDGQAYVRKDGEWVLLSTFL

SEQ ID NO: 10194 - protein, 1177 aa, Artificial Sequence
  SARS-CoV-2/Shenzhen/SZTH-001/2020__EPI_ISL_406592 spike protein (1-1147)(G889C_L1034C) Foldon construct
MFVFLVLLPLVSSQCVNLTTRTQLPPAYTNSFTRGVYYPDKVFRSSVLHSTQDLFLPFFSNVTWFHAIHVSGTNGTKRFDNPVLPFNDGVYFASTEKSNIIRGWIFGTTLDSKTQSLLIVNNATNVVIKVCEFQFCNDPFLGVYYHKNNKSWMESEFRVYSSANNCTFEYVSQPFLMDLEGKQGNFKNLREFVFKNIDGYFKIYSKHTPINLVRDLPQGFSALEPLVDLPIGINITRFQTLLALHRSYLTPGDSSSGWTAGAAAYYVGYLQPRTFLLKYNENGTITDAVDCALDPLSETKCTLKSFTVEKGIYQTSNFRVQPTESIVRFPNITNLCPFGEVFNATRFASVYAWNRKRISNCVADYSVLYNSASFSTFKCYGVSPTKLNDLCFTNVYADSFVIRGDEVRQIAPGQTGKIADYNYKLPDDFTGCVIAWNSNNLDSKVGGNYNYLYRLFRKSNLKPFERDISTEIYQAGSTPCNGVEGFNCYFPLQSYGFQPTNGVGYQPYRVVVLSFELLHAPATVCGPKKSTNLVKNKCVNFNFNGLTGTGVLTESNKKFLPFQQFGRDIADTTDAVRDPQTLEILDITPCSFGGVSVITPGTNTSNQVAVLYQDVNCTEVPVAIHADQLTPTWRVYSTGSNVFQTRAGCLIGAEHVNNSYECDIPIGAGICASYQTQTNSPRRARSVASQSIIAYTMSLGAENSVAYSNNSIAIPTNFTISVTTEILPVSMTKTSVDCTMYICGDSTECSNLLLQYGSFCTQLNRALTGIAVEQDKNTQEVFAQVKQIYKTPPIKDFGGFNFSQILPDPSKPSKRSFIEDLLFNKVTLADAGFIKQYGDCLGDIAARDLICAQKFNGLTVLPPLLTDEMIAQYTSALLAGTITSGWTFCAGAALQIPFAMQMAYRFNGIGVTQNVLYENQKLIANQFNSAIGKIQDSLSSTASALGKLQDVVNQNAQALNTLVKQLSSNFGAISSVLNDILSRLDKVEAEVQIDRLITGRLQSLQTYVTQQLIRAAEIRASANLAATKMSECVCGQSKRVDFCGKGYHLMSFPQSAPHGVVFLHVTYVPAQEKNFTTAPAICHDGKAHFPREGVFVSNGTHWFVTQRNFYEPQIITTDNTFVSGNCDVLIGIVNNTVYDPLQPELDSGGSGYIPEAPRDGQAYVRKDGEWVLLSTFL

SEQ ID NO: 10195 - protein, 1177 aa, Artificial Sequence
  SARS-CoV-2/Shenzhen/SZTH-004/2020__EPI_ISL_406595 spike protein (1-1147)(G889C_L1034C) Foldon construct
MFVFLVLLPLVSSQCVNLTTRTQLPPAYTNSFTRGVYYPDKVFRSSVLHSTQDLFLPFFSNVTWFHAIHVSGTNGTKRFDNPVLPFNDGVYFASTEKSNIIRGWIFGTTLDSKTQSLLIVNNATNVVIKVCEFQFCNDPFLGVYYHKNNKSWMESEFRVYSSANNCTFEYVSQPFLMDLEGKQGNFKNLREFVFKNIDGYFKIYSKHTPINLVRDLPQGFSALEPLVDLPIGINITRFQTLLALHRSYLTPGDSSSGWTAGAAAYYVGYLQPRTFLLKYNENGTITDAVDCALDPLSETKCTLKSFTVEKGIYQTSNFRVQPTESIVRFPNITNLCPFGEVFNATRFASVYAWDRKRISNCVAYYSVLYNSASFSTFKCYGVSPTKLNDLCFTNVYADSFVIRGDEVRQIAPGQTGKIADYNYKLPDDFTGCVIAWNSNNLDSKVGGNYNYLYRLFRKSNLKPFERDISTEIYQAGSTPCNGVEGFNCYFPLQSYGFQPTNGVGYQPYRVVVLSFELLHAPATVCGPKKSTNLVKNKCVNFNFNGLTGTGVLTESNKKFLPFQQFGRDIADTTDAVRDPQTLEILDITPCSFGGVSVITPGTNTSNQVAVLYQDVNCTEVPVAIHADQLTPTWRVYSTGSNVFQTRAGCLIGAEHVNNSYECDIPIGAGICASYQTQTNSPRRARSVASQSIIAYTMSLGAENSVAYSNNSIAIPTNFTISVTTEILPVSMTKTSVDCTMYICGDSTECSNLLLQYGSFCTQLNRALTGIAVEQDKNTQEVFAQVKQIYKTPPIKDFGGFNFSQILPDPSKPSKRSFIEDLLFNKVTLADAGFIKQYGDCLGDIAARDLICAQKFNGLTVLPPLLTDEMIAQYTSALLAGTITSGWTFCAGAALQIPFAMQMAYRFNGIGVTQNVLYENQKLIANQFNSAIGKIQDSLSSTASALGKLQDVVNQNAQALNTLVKQLSSNFGAISSVLNDILSRLDKVEAEVQIDRLITGRLQSLQTYVTQQLIRAAEIRASANLAATKMSECVCGQSKRVDFCGKGYHLMSFPQSAPHGVVFLHVTYVPAQEKNFTTAPAICHDGKAHFPREGVFVSNGTHWFVTQRNFYEPQIITTDNTFVSGNCDVVIGIVNNTVYDPLQPELDSGGSGYIPEAPRDGQAYVRKDGEWVLLSTFL

SEQ ID NO: 10196 - protein, 1177 aa, Artificial Sequence
  SARS-CoV-2/France/IDF0372/2020__EPI_ISL_406596 spike protein (1-1147)(G889C_L1034C) Foldon construct
MFVFLVLLPLVSSQCVNLTTRTQLPPAYTNSFTRGVYYPDKVFRSSVLHSTQDLFLPFFSNVTWFHAIHVSGTNGTKRFDNPVLPFNDGVYFASTEKSNIIRGWIFGTTLDSKTQSLLIVNNATNVVIKVCEFQFCNDPFLGVYYHKNNKSWMESEFRVYSSANNCTFEYVSQPFLMDLEGKQGNFKNLREFVFKNIDGYFKIYSKHTPINLVRDLPQGFSALEPLVDLPIGINITRFQTLLALHRSYLTPGDSSSGWTAGAAAYYVGYLQPRTFLLKYNENGTITDAVDCALDPLSETKCTLKSFTVEKGIYQTSNFRVQPTESIVRFPNITNLCPFGEVFNATRFASVYAWNRKRISNCVADYSFLYNSASFSTFKCYGVSPTKLNDLCFTNVYADSFVIRGDEVRQIAPGQTGKIADYNYKLPDDFTGCVIAWNSNNLDSKVGGNYNYLYRLFRKSNLKPFERDISTEIYQAGSTPCNGVEGFNCYFPLQSYGFQPTNGVGYQPYRVVVLSFELLHAPATVCGPKKSTNLVKNKCVNFNFNGLTGTGVLTESNKKFLPFQQFGRDIADTTDAVRDPQTLEILDITPCSFGGVSVITPGTNTSNQVAVLYQDVNCTEVPVAIHADQLTPTWRVYSTGSNVFQTRAGCLIGAEHVNNSYECDIPIGAGICASYQTQTNSPRRARSVASQSIIAYTMSLGAENSVAYSNNSIAIPTNFTISVTTEILPVSMTKTSVDCTMYICGDSTECSNLLLQYGSFCTQLNRALTGIAVEQDKNTQEVFAQVKQIYKTPPIKDFGGFNFSQILPDPSKPSKRSFIEDLLFNKVTLADAGFIKQYGDCLGDIAARDLICAQKFNGLTVLPPLLTDEMIAQYTSALLAGTITSGWTFCAGAALQIPFAMQMAYRFNGIGVTQNVLYENQKLIANQFNSAIGKIQDSLSSTASALGKLQDVVNQNAQALNTLVKQLSSNFGAISSVLNDILSRLDKVEAEVQIDRLITGRLQSLQTYVTQQLIRAAEIRASANLAATKMSECVCGQSKRVDFCGKGYHLMSFPQSAPHGVVFLHVTYVPAQEKNFTTAPAICHDGKAHFPREGVFVSNGTHWFVTQRNFYEPQIITTDNTFVSGNCDVVIGIVNNTVYDPLQPELDSGGSGYIPEAPRDGQAYVRKDGEWVLLSTFL

SEQ ID NO: 10197 - protein, 1177 aa, Artificial Sequence
  SARS-CoV-2/Australia/VIC01/2020__EPI_ISL_406844 spike protein (1-1147)(G889C_L1034C) Foldon construct
MFVFLVLLPLVSSQCVNLTTRTQLPPAYTNSFTRGVYYPDKVFRSSVLHSTQDLFLPFFSNVTWFHAIHVSGTNGTKRFDNPVLPFNDGVYFASTEKSNIIRGWIFGTTLDSKTQSLLIVNNATNVVIKVCEFQFCNDPFLGVYYHKNNKSWMESEFRVYSSANNCTFEYVSQPFLMDLEGKQGNFKNLREFVFKNIDGYFKIYSKHTPINLVRDLPQGFSALEPLVDLPIGINITRFQTLLALHRRYLTPGDSSSGWTAGAAAYYVGYLQPRTFLLKYNENGTITDAVDCALDPLSETKCTLKSFTVEKGIYQTSNFRVQPTESIVRFPNITNLCPFGEVFNATRFASVYAWNRKRISNCVADYSVLYNSASFSTFKCYGVSPTKLNDLCFTNVYADSFVIRGDEVRQIAPGQTGKIADYNYKLPDDFTGCVIAWNSNNLDSKVGGNYNYLYRLFRKSNLKPFERDISTEIYQAGSTPCNGVEGFNCYFPLQSYGFQPTNGVGYQPYRVVVLSFELLHAPATVCGPKKSTNLVKNKCVNFNFNGLTGTGVLTESNKKFLPFQQFGRDIADTTDAVRDPQTLEILDITPCSFGGVSVITPGTNTSNQVAVLYQDVNCTEVPVAIHADQLTPTWRVYSTGSNVFQTRAGCLIGAEHVNNSYECDIPIGAGICASYQTQTNSPRRARSVASQSIIAYTMSLGAENSVAYSNNSIAIPTNFTISVTTEILPVSMTKTSVDCTMYICGDSTECSNLLLQYGSFCTQLNRALTGIAVEQDKNTQEVFAQVKQIYKTPPIKDFGGFNFSQILPDPSKPSKRSFIEDLLFNKVTLADAGFIKQYGDCLGDIAARDLICAQKFNGLTVLPPLLTDEMIAQYTSALLAGTITSGWTFCAGAALQIPFAMQMAYRFNGIGVTQNVLYENQKLIANQFNSAIGKIQDSLSSTASALGKLQDVVNQNAQALNTLVKQLSSNFGAISSVLNDILSRLDKVEAEVQIDRLITGRLQSLQTYVTQQLIRAAEIRASANLAATKMSECVCGQSKRVDFCGKGYHLMSFPQSAPHGVVFLHVTYVPAQEKNFTTAPAICHDGKAHFPREGVFVSNGTHWFVTQRNFYEPQIITTDNTFVSGNCDVVIGIVNNTVYDPLQPELDSGGSGYIPEAPRDGQAYVRKDGEWVLLSTFL

SEQ ID NO: 10198 - protein, 1177 aa, Artificial Sequence
  SARS-CoV-2/Germany/BavPat1/2020__EPI_ISL_406862 spike protein (1-1147)(G889C_L1034C) Foldon construct
MFVFLVLLPLVSSQCVNLTTRTQLPPAYTNSFTRGVYYPDKVFRSSVLHSTQDLFLPFFSNVTWFHAIHVSGTNGTKRFDNPVLPFNDGVYFASTEKSNIIRGWIFGTTLDSKTQSLLIVNNATNVVIKVCEFQFCNDPFLGVYYHKNNKSWMESEFRVYSSANNCTFEYVSQPFLMDLEGKQGNFKNLREFVFKNIDGYFKIYSKHTPINLVRDLPQGFSALEPLVDLPIGINITRFQTLLALHRSYLTPGDSSSGWTAGAAAYYVGYLQPRTFLLKYNENGTITDAVDCALDPLSETKCTLKSFTVEKGIYQTSNFRVQPTESIVRFPNITNLCPFGEVFNATRFASVYAWNRKRISNCVADYSVLYNSASFSTFKCYGVSPTKLNDLCFTNVYADSFVIRGDEVRQIAPGQTGKIADYNYKLPDDFTGCVIAWNSNNLDSKVGGNYNYLYRLFRKSNLKPFERDISTEIYQAGSTPCNGVEGFNCYFPLQSYGFQPTNGVGYQPYRVVVLSFELLHAPATVCGPKKSTNLVKNKCVNFNFNGLTGTGVLTESNKKFLPFQQFGRDIADTTDAVRDPQTLEILDITPCSFGGVSVITPGTNTSNQVAVLYQGVNCTEVPVAIHADQLTPTWRVYSTGSNVFQTRAGCLIGAEHVNNSYECDIPIGAGICASYQTQTNSPRRARSVASQSIIAYTMSLGAENSVAYSNNSIAIPTNFTISVTTEILPVSMTKTSVDCTMYICGDSTECSNLLLQYGSFCTQLNRALTGIAVEQDKNTQEVFAQVKQIYKTPPIKDFGGFNFSQILPDPSKPSKRSFIEDLLFNKVTLADAGFIKQYGDCLGDIAARDLICAQKFNGLTVLPPLLTDEMIAQYTSALLAGTITSGWTFCAGAALQIPFAMQMAYRFNGIGVTQNVLYENQKLIANQFNSAIGKIQDSLSSTASALGKLQDVVNQNAQALNTLVKQLSSNFGAISSVLNDILSRLDKVEAEVQIDRLITGRLQSLQTYVTQQLIRAAEIRASANLAATKMSECVCGQSKRVDFCGKGYHLMSFPQSAPHGVVFLHVTYVPAQEKNFTTAPAICHDGKAHFPREGVFVSNGTHWFVTQRNFYEPQIITTDNTFVSGNCDVVIGIVNNTVYDPLQPELDSGGSGYIPEAPRDGQAYVRKDGEWVLLSTFL

SEQ ID NO: 10199 - protein, 1177 aa, Artificial Sequence
  SARS-CoV-2/Wuhan/HBCDC-HB-02/2020__EPI_ISL_412978 spike protein (1-1147)(G889C_L1034C) Foldon construct
MFVFLVLLPLVSSQCVNLTTRTQLPPAYTNSFTRGVYYPDKVFRSSVLHSTQDLFLPFFSNVTWFHAIHVSGTNGTKRFDNPVLPFNDGVYFASTEKSNIIRGWIFGTTLDSKTQSLLIVNNATNVVIKVCEFQFCNDPFLGVYYHKNNKSWMESEFRVYSSANNCTFEYVSQPFLMDLEGKQGNFKNLREFVFKNIDGYFKIYSKHTPINLVRDLPQGFSALEPLVDLPIGINITRFQTLLALHRSYLTPGDSSSGWTAGAAAYYVGYLQPRTFLLKYNENGTITDAVDCALDPLSETKCTLKSFTVEKGIYQTSNFRVQPTESIVRFPNITNLCPFGEVFNATRFASVYAWNRKRISNCVADYSVLYNSASFSTFKCYGVSPTKLNDLCFTNVYADSFVIRGDEVRQIAPGQTGKIADYNYKLPDDFTGCVIAWNSNNLDSKVGGNYNYLYRLFRKSNLKPFERDISTEIYQAGSTPCNGVEGFNCYFPLQSYGFQPTNGVGYQPYRVVVLSFELLHAPATVCGPKKSTNLVKNKCVNFNFNGLTGTGVLTESNKKFLPFQQFGRDIADTTDAVRDPQTLEILDITPCSFGGVSVITPGTNTSNQVAVLYQDVNCTEVPVAIHADQLTPTWRVYSTGSNVFQTRAGCLIGAEHVNNSYECDIPIGAGICASYQTQTNSPRRARSVASQSIIAYTMSLGAENSVAYSNNSIAIPTNFTISVTTEILPVSMTKTSVDCTMYICGDSTECSNFLLQYGSFCTQLNRALTGIAVEQDKNTQEVFAQVKQIYKTPPIKDFGGFNFSQILPDPSKPSKRSFIEDLLFNKVTLADAGFIKQYGDCLGDIAARDLICAQKFNGLTVLPPLLTDEMIAQYTSALLAGTITSGWTFCAGAALQIPFAMQMAYRFNGIGVTQNVLYENQKLIANQFNSAIGKIQDSLSSTASALGKLQDVVNQNAQALNTLVKQLSSNFGAISSVLNDILSRLDKVEAEVQIDRLITGRLQSLQTYVTQQLIRAAEIRASANLAATKMSECVCGQSKRVDFCGKGYHLMSFPQSAPHGVVFLHVTYVPAQEKNFTTAPAICHDGKAHFPREGVFVSNGTHWFVTQRNFYEPQIITTDNTFVSGNCDVVIGIVNNTVYDPLQPELDSGGSGYIPEAPRDGQAYVRKDGEWVLLSTFL

SEQ ID NO: 10200 - protein, 1177 aa, Artificial Sequence
  SARS-CoV-2/Australia/QLD02/2020__EPI_ISL_407896 spike protein (1-1147)(G889C_L1034C) Foldon construct
MFVFLVLLPLVSSQCVNLTTRTQLPPAYTNSFTRGVYYPDKVFRSSVLHSTQDLFLPFFSNVTWFHAIHVSGTNGTKRFDNPVLPFNDGVYFASTEKSNIIRGWIFGTTLDSKTQSLLIVNNATNVVIKVCEFQFCNDPFLGVYYHKNNKSWMESEFRVYSSANNCTFEYVSQPFLMDLEGKQGNFKNLREFVFKNIDGYFKIYSKHTPINLVRDLPQGFSALEPLVDLPIGINITRFQTLLALHRSYLTPGDSSSGWTAGAAAYYVGYLQPRTFLLKYNENGTITDAVDCALDPLSETKCTLKSFTVEKGIYQTSNFRVQPTESIVRFPNITNLCPFGEVFNATRFASVYAWNRKRISNCVADYSVLYNSASFSTFKCYGVSPTKLNDLCFTNVYADSFVIRGDEVRQIAPGQTGKIADYNYKLPDDFTGCVIAWNSNNLDSKVGGNYNYLYRLFRKSNLKPFERDISTEIYQAGSTPCNGVEGFNCYFPLQSYGFQPTNGVGYQPYRVVVLSFELLHAPATVCGPKKSTNLVKNKCVNFNFNGLTGTGVLTESNKKFLPFQQFGRDIADTTDAVRDPQTLEILDITPCSFGGVSVITPGTNTSNQVAVLYQDVNCTEVPVAIHADQLTPTWRVYSTGSNVFQTRAGCLIGAEHVNNSYECDIPIGAGICASYQTQTNSPRRARSVASQSIIAYTMSLGAENSVAYSNNSIAIPTNFTISVTTEILPVSMTKTSVDCTMYICGDSTECSNLLLQYGSFCTQLNRALTGIAVEQDKNTQEVFAQVKQIYKTPPIKDFGGFNFSQILPDPSKPSKRSFIEDLLFNKVTLADAGFIKQYGDCLGDIAARDLICAQKFNGLTVLPPLLTDEMIAQYTSALLAGTITSGWTFCAGAALQIPFAMQMAYRFNGIGVTQNVLYENQKLIANQFNSAIGKIQDSLSSTASALGKLQDVVNQNAQALNTLVKQLSSNFGAISSVLNDILSRLDKVEAEVQIDRLITGRLQSLQTYVTQQLIRAAEIRASANLAATKMSECVCGQSKRVDFCGKGYHLMSFPQSAPHGVVFLHVTYVPAQEKNFTTAPAICHDGKAHFPREGVFVSNGTHWFVTQRNFYEPQIITTDNTFVSGNCDVVIGIVNNTVYDPLQLELDSGGSGYIPEAPRDGQAYVRKDGEWVLLSTFL

SEQ ID NO: 10201 - protein, 1177 aa, Artificial Sequence
  SARS-CoV-2/India/1-31/2020__EPI_ISL_413523 spike protein (1-1147)(G889C_L1034C) Foldon construct
MFVFLVLLPLVSSQCVNLTTRTQLPPAYTNSFTRGVYYPDKVFRSSVLHSTQDLFLPFFSNVTWFHAIHVSGTNGTKRFDNPVLPFNDGVYFASTEKSNIIRGWIFGTTLDSKTQSLLIVNNATNVVIKVCEFQFCNDPFLGVYYHKNNKSWMESEFRVYSSANNCTFEYVSQPFLMDLEGKQGNFKNLREFVFKNIDGYFKIYSKHTPINLVRDLPQGFSALEPLVDLPIGINITRFQTLLALHRSYLTPGDSSSGWTAGAAAYYVGYLQPRTFLLKYNENGTITDAVDCALDPLSETKCTLKSFTVEKGIYQTSNFRVQPTESIVRFPNITNLCPFGEVFNATRFASVYAWNRKRISNCVADYSVLYNSASFSTFKCYGVSPTKLNDLCFTNVYADSFVIRGDEVRQIAPGQTGKIADYNYKLPDDFTGCVIAWNSNNLDSKVGGNYNYLYRLFRKSNLKPFERDISTEIYQAGSTPCNGVEGFNCYFPLQSYGFQPTNGVGYQPYRVVVLSFELLHAPATVCGPKKSTNLVKNKCVNFNFNGLTGTGVLTESNKKFLPFQQFGRDIADTTDAVRDPQTLEILDITPCSFGGVSVITPGTNTSNQVAVLYQDVNCTEVPVAIHADQLTPTWRVYSTGSNVFQTRAGCLIGAEHVNNSYECDIPIGAGICASYQTQTNSPRRARSVASQSIIAYTMSLGAENSVAYSNNSIAIPTNFTISVTTEILPVSMTKTSVDCTMYICGDSTECSNLLLQYGSFCTQLNRALTGIAVEQDKNTQEVFAQVKQIYKTPPIKDFGGFNFSQILPDPSKPSKRSFIEDLLFNKVTLADAGFIKQYGDCLGDIAARDLICAQKFNGLTVLPPLLTDEMIAQYTSALLAGTITSGWTFCAGAALQIPFAMQMAYRFNGIGVTQNVLYENQKLIANQFNSVIGKIQDSLSSTASALGKLQDVVNQNAQALNTLVKQLSSNFGAISSVLNDILSRLDKVEAEVQIDRLITGRLQSLQTYVTQQLIRAAEIRASANLAATKMSECVCGQSKRVDFCGKGYHLMSFPQSAPHGVVFLHVTYVPAQEKNFTTAPAICHDGKAHFPREGVFVSNGTHWFVTQRNFYEPQIITTDNTFVSGNCDVVIGIVNNTVYDPLQPELDSGGSGYIPEAPRDGQAYVRKDGEWVLLSTFL

SEQ ID NO: 10202 - protein, 1177 aa, Artificial Sequence
  SARS-CoV-2/Guangdong/GD2020087-P0008/2020__EPI_ISL_413863 spike protein (1-1147)(G889C_L1034C) Foldon construct
MFVFLVLLPLVSSQCVNLTTRTQLPPAYTNSFTRGVYYPDKVFRSSVLHSTQDLFLPFFSNVTWFHAIHVSGTNGTKRFDNPVLPFNDGVYFASTEKSNIIRGWIFGTTLDSKTQSLLIVNNATNVVIKVCEFQFCNDPFLGVYYHKNNKSWMESEFRVYSSANNCTFEYVSQPFLMDLEGKQGNFKNLREFVFKNIDGYFKIYSKHTPINLVRDLPQGFSALEPLVDLPIGINITRFQTLLALHRSYLTPGDSSSGWTAGAAAYYVGYLQPRTFLLKYNENGTITDAVDCALDPLSETKCTLKSFTVEKGIYQTSNFRVQPTESIVRFPNITNLCPFGEVFNATRFASVYAWNRKRISNCVADYSVLYNSASFSTFKCYGVSPTKLNDLCFTNVYADSFVIRGDEVREIAPGQTGKIADYNYKLPDDFTGCVIAWNSNNLDSKVGGNYNYLYRLFRKSNLKPFERDISTEIYQAGSTPCNGVEGFNCYFPLQSYGFQPTNGVGYQPYRVVVLSFELLHAPATVCGPKKSTNLVKNKCVNFNFNGLTGTGVLTESNKKFLPFQQFGRDIADTTDAVRDPQTLEILDITPCSFGGVSVITPGTNTSNQVAVLYQDVNCTEVPVAIHADQLTPTWRVYSTGSNVFQTRAGCLIGAEHVNNSYECDIPIGAGICASYQTQTNSPRRARSVASQSIIAYTMSLGAENSVAYSNNSIAIPTNFTISVTTEILPVSMTKTSVDCTMYICGDSTECSNLLLQYGSFCTQLNRALTGIAVEQDKNTQEVFAQVKQIYKTPPIKDFGGFNFSQILPDPSKPSKRSFIEDLLFNKVTLADAGFIKQYGDCLGDIAARDLICAQKFNGLTVLPPLLTDEMIAQYTSALLAGTITSGWTFCAGAALQIPFAMQMAYRFNGIGVTQNVLYENQKLIANQFNSAIGKIQDSLSSTASALGKLQDVVNQNAQALNTLVKQLSSNFGAISSVLNDILSRLDKVEAEVQIDRLITGRLQSLQTYVTQQLIRAAEIRASANLAATKMSECVCGQSKRVDFCGKGYHLMSFPQSAPHGVVFLHVTYVPAQEKNFTTAPAICHDGKAHFPREGVFVSNGTHWFVTQRNFYEPQIITTDNTFVSGNCDVVIGIVNNTVYDPLQPELDSGGSGYIPEAPRDGQAYVRKDGEWVLLSTFL

SEQ ID NO: 10203 - protein, 1177 aa, Artificial Sequence
  SARS-CoV-2/Sweden/01/2020__EPI_ISL_411951 spike protein (1-1147)(G889C_L1034C) Foldon construct
MFVFLVLLPLVSSQCVNLTTRTQLPPAYTNSFTRGVYYPDKVFRSSVLHSTQDLFLPFFSNVTWFHAIHVSGTNGTKRFDNPVLPFNDGVYFASTEKSNIIRGWIFGTTLDSKTQSLLIVNNATNVVIKVCEFQFCNDPFLGVYYHKNNKSWMESEFRVYSSANNCTFEYVSQPFLMDLEGKQGNFKNLREFVFKNIDGYFKIYSKHTPINLVRDLPQGFSALEPLVDLPIGINITRFQTLLALHRSYLTPGDSSSGWTAGAAAYYVGYLQPRTFLLKYNENGTITDAVDCALDPLSETKCTLKSFTVEKGIYQTSNFRVQPTESIVRFPNITNLCPFGEVFNATRFASVYAWNRKRISNCVADYSVLYNSASFSTFKCYGVSPTKLNDLCFTNVYADSFVIRGDEVRQIAPGQTGKIADYNYKLPDDFTGCVIAWNSNNLDSKVGGNYNYLYRLFRKSNLKPFERDISTEIYQAGSTPCNGVEGFNCYFPLQSYGFQPTNGVGYQPYRVVVLSFELLHAPATVCGPKKSTNLVKNKCVNFNFNGLTGTGVLTESNKKFLPFQQFGRDIADTTDAVRDPQTLEILDITPCSFGGVSVITPGTNTSNQVAVLYQDVNCTEVPVAIHADQLTPTWRVYSTGSNVFQTRAGCLIGAEHVNNSYECDIPIGAGICASYQTQTNSPRRARSVASQSIIAYTMSLGAENSVAYSNNSIAIPTNFTISVTTEILPVSMTKTSVDCTMYICGDSTECSNLLLQYGSFCTQLNRALTGIAVEQDKNTQEVFAQVKQIYKTPPIKDCGGFNFSQILPDPSKPSKRSFIEDLLFNKVTLADAGFIKQYGDCLGDIAARDLICAQKFNGLTVLPPLLTDEMIAQYTSALLAGTITSGWTFCAGAALQIPFAMQMAYRFNGIGVTQNVLYENQKLIANQFNSAIGKIQDSLSSTASALGKLQDVVNQNAQALNTLVKQLSSNFGAISSVLNDILSRLDKVEAEVQIDRLITGRLQSLQTYVTQQLIRAAEIRASANLAATKMSECVCGQSKRVDFCGKGYHLMSFPQSAPHGVVFLHVTYVPAQEKNFTTAPAICHDGKAHFPREGVFVSNGTHWFVTQRNFYEPQIITTDNTFVSGNCDVVIGIVNNTVYDPLQPELDSGGSGYIPEAPRDGQAYVRKDGEWVLLSTFL

SEQ ID NO: 10204 - protein, 1177 aa, Artificial Sequence
  SARS-CoV-2/Tianmen/HBCDC-HB-07/2020__EPI_ISL_412983 spike protein (1-1147)(G889C_L1034C) Foldon construct
MFVFLVLLPLVSSQCVNLTTRTQLPPAYTNSFTRGVYYPDKVFRSSVLHSTQDLFLPFFSNVTWFHAIHVSGTNGTKRFDNPVLPFNDGVYFASTEKSNIIRGWIFGTTLDSKTQSLLIVNNATNVVIKVCEFQFCNDPFLGVYYHKNNKSWMESEFRVYSSANNCTFEYVSQPFLMDLEGKQGNFKNLREFVFKNIDGYFKIYSKHTPINLVRDLPQGFSALEPLVDLPIGINITRFQTLLALHRSYLTPGDSSSGWTAGAAAYYVGYLQPRTFLLKYNENGTITDAVDCALDPLSETKCTLKSFTVEKGIYQTSNFRVQPTESIVRFPNITNLCPFGEVFNATRFASVYAWNRKRISNCVADYSVLYNSASFSTFKCYGVSPTKLNDLCFTNVYADSFVIRGDEVRQIAPGQTGKIADYNYKLPDDFTGCVIAWNSNNLDSKVGGNYNYLYRLFRKSNLKPFERDISTEIYQAGSTPCNGVEGFNCYFPLQSYGFQPTNGVGYQPYRVVVLSFELLHAPATVCGPKKSTNLVKNKCVNFNFNGLTGTGVLTESNKKFLPFQQFGRDIADTTDAVRDPQTLEILDITPCSFGGVSVITPGTNTSNQVAVLYQDLNCTEVPVAIHADQLTPTWRVYSTGSNVFQTRAGCLIGAEHVNNSYECDIPIGAGICASYQTQTNSPRRARSVASQSIIAYTMSLGAENSVAYSNNSIAIPTNFTISVTTEILPVSMTKTSVDCTMYICGDSTECSNLLLQYGSFCTQLNRALTGIAVEQDKNTQEVFAQVKQIYKTPPIKDFGGFNFSQILPDPSKPSKRSFIEDLLFNKVTLADAGFIKQYGDCLGDIAARDLICAQKFNGLTVLPPLLTDEMIAQYTSALLAGTITSGWTFCAGAALQIPFAMQMAYRFNGIGVTQNVLYENQKLIANQFNSAIGKIQDSLSSTASALGKLQDVVNQNAQALNTLVKQLSSNFGAISSVLNDILSRLDKVEAEVQIDRLITGRLQSLQTYVTQQLIRAAEIRASANLAATKMSECVCGQSKRVDFCGKGYHLMSFPQSAPHGVVFLHVTYVPAQEKNFTTAPAICHDGKAHFPREGVFVSNGTHWFVTQRNFYEPQIITTDNTFVSGNCDVVIGIVNNTVYDPLQPELDSGGSGYIPEAPRDGQAYVRKDGEWVLLSTFL

SEQ ID NO: 10205 - protein, 1177 aa, Artificial Sequence
  SARS-CoV-2/Hong Kong/case42_VM20002493/2020__EPI_ISL_414527 spike protein (1-1147)(G889C_L1034C) Foldon construct
MFVFLVLLPLVSSQCVNLTTRTQLPPAYTNSFTRGVYYPDKVFRSSVLHSTQDLFLPFFSNVTWFHAIHVSGTNGTKRFDNPVLPFNDGVYFASTEKSNIIRGWIFGTTLDSKTQSLLIVNNATNVVIKVCEFQFCNDPFLGVYYHKNNKSWMESEFRVYSSANNCTFEYVSQPFLMDLEGKQGNFKNLREFVFKNIDGYFKIYSKHTPINLVRDLPQGFSALEPLVDLPIGINITRFQTLLALHRSYLTPGDSSSGWTAGAAAYYVGYLQPRTFLLKYNENGTITDAVDCALDPLSETKCTLKSFTVEKGIYQTSNFRVQPTESIVRFPNITNLCPFGEVFNATRFASVYAWNRKRISNCVADYSVLYNSASFSTFKCYGVSPTKLNDLCFTNVYADSFVIRGDEVRQIAPGQTGKIADYNYKLPDDFTGCVIAWNSNNLDSKVGGNYNYLYRLFRKSNLKPFERDISTEIYQAGSTPCNGVEGFNCYFPLQSYGFQPTNGVGYQPYRVVVLSFELLHAPATVCGPKKSTNLVKNKCVNFNFNGLTGTGVLTESNKKFLPFQQFGRDIADTTDAVRDPQTLEILDITPCSFGGVSVITPGTNTSNQVAVLYQDVNCTEVPVAIHADQLTPTWRVYSTGSNVFQTRAGCLIGAEHVNNSYECDIPIGAGICASYQTQTNSPRRARSVASQSIIAYTMSLGAENSVAYSNNSIAIPTNFAISVTTEILPVSMTKTSVDCTMYICGDSTECSNLLLQYGSFCTQLNRALTGIAVEQDKNTQEVFAQVKQIYKTPPIKDFGGFNFSQILPDPSKPSKRSFIEDLLFNKVTLADAGFIKQYGDCLGDIAARDLICAQKFNGLTVLPPLLTDEMIAQYTSALLAGTITSGWTFCAGAALQIPFAMQMAYRFNGIGVTQNVLYENQKLIANQFNSAIGKIQDSLSSTASALGKLQDVVNQNAQALNTLVKQLSSNFGAISSVLNDILSRLDKVEAEVQIDRLITGRLQSLQTYVTQQLIRAAEIRASANLAATKMSECVCGQSKRVDFCGKGYHLMSFPQSAPHGVVFLHVTYVPAQEKNFTTAPAICHDGKAHFPREGVFVSNGTHWFVTQRNFYEPQIITTDNTFVSGNCDVVIGIVNNTVYDPLQPELDSGGSGYIPEAPRDGQAYVRKDGEWVLLSTFL

SEQ ID NO: 10206 - protein, 1177 aa, Artificial Sequence
  SARS-CoV-2/USA/CruiseA-23/2020__EPI_ISL_414482 spike protein (1-1147)(G889C_L1034C) Foldon construct
MFVFLVLLPLVSSQCVNLTTRTQLPPAYTNSFTRGVYYPDKVFRSSVLHSTQDLFLPFFSNVTWFHAIHVSGTNGTKRFDNPVLPFNDGVYFASTEKSNIIRGWIFGTTLDSKTQSLLIVNNATNVVIKVCEFQFCNDPFLGVYYHKNNKSWMESEFRVYSSANNCTFEYVSQPFLMDLEVKQGNFKNLREFVFKNIDGYFKIYSKHTPINLVRDLPQGFSALEPLVDLPIGINITRFQTLLALHRSYLTPGDSSSGWTAGAAAYYVGYLQPRTFLLKYNENGTITDAVDCALDPLSETKCTLKSFTVEKGIYQTSNFRVQPTESIVRFPNITNLCPFGEVFNATRFASVYAWNRKRISNCVADYSVLYNSASFSTFKCYGVSPTKLNDLCFTNVYADSFVIRGDEVRQIAPGQTGKIADYNYKLPDDFTGCVIAWNSNNLDSKVGGNYNYLYRLFRKSNLKPFERDISTEIYQAGSTPCNGVEGFNCYFPLQSYGFQPTNGVGYQPYRVVVLSFELLHAPATVCGPKKSTNLVKNKCVNFNFNGLTGTGVLTESNKKFLPFQQFGRDIADTTDAVRDPQTLEILDITPCSFGGVSVITPGTNTSNQVAVLYQDVNCTEVPVAIHADQLTPTWRVYSTGSNVFQTRAGCLIGAEHVNNSYECDIPIGAGICASYQTQTNSPRRARSVASQSIIAYTMSLGAENSVAYSNNSIAIPTNFTISVTTEILPVSMTKTSVDCTMYICGDSTECSNLLLQYGSFCTQLNRALTGIAVEQDKNTQEVFAQVKQIYKTPPIKDFGGFNFSQILPDPSKPSKRSFIEDLLFNKVTLADAGFIKQYGDCLGDIAARDLICAQKFNGLTVLPPLLTDEMIAQYTSALLAGTITSGWTFCAGAALQIPFAMQMAYRFNGIGVTQNVLYENQKLIANQFNSAIGKIQDSLSSTASALGKLQDVVNQNAQALNTLVKQLSSNFGAISSVLNDILSRLDKVEAEVQIDRLITGRLQSLQTYVTQQLIRAAEIRASANLAATKMSECVCGQSKRVDFCGKGYHLMSFPQSAPHGVVFLHVTYVPAQEKNFTTAPAICHDGKAHFPREGVFVSNGTHWFVTQRNFYEPQIITTDNTFVSGNCDVVIGIVNNTVYDPLQPELDSGGSGYIPEAPRDGQAYVRKDGEWVLLSTFL

SEQ ID NO: 10207 - protein, 1177 aa, Artificial Sequence
  SARS-CoV-2/Hong Kong/case85_VM20002868/2020__EPI_ISL_414519 spike protein (1-1147)(G889C_L1034C) Foldon construct
MFVFLVLVPLVSSQCVNLTTRTQLPPAYTNSFTRGVYYPDKVFRSSVLHSTQDLFLPFFSNVTWFHAIHVSGTNGTKRFDNPVLPFNDGVYFASTEKSNIIRGWIFGTTLDSKTQSLLIVNNATNVVIKVCEFQFCNDPFLGVYYHKNNKSWMESEFRVYSSANNCTFEYVSQPFLMDLEGKQGNFKNLREFVFKNIDGYFKIYSKHTPINLVRDLPQGFSALEPLVDLPIGINITRFQTLLALHRSYLTPGDSSSGWTAGAAAYYVGYLQPRTFLLKYNENGTITDAVDCALDPLSETKCTLKSFTVEKGIYQTSNFRVQPTESIVRFPNITNLCPFGEVFNATRFASVYAWNRKRISNCVADYSVLYNSASFSTFKCYGVSPTKLNDLCFTNVYADSFVIRGDEVRQIAPGQTGKIADYNYKLPDDFTGCVIAWNSNNLDSKVGGNYNYLYRLFRKSNLKPFERDISTEIYQAGSTPCNGVEGFNCYFPLQSYGFQPTNGVGYQPYRVVVLSFELLHAPATVCGPKKSTNLVKNKCVNFNFNGLTGTGVLTESNKKFLPFQQFGRDIADTTDAVRDPQTLEILDITPCSFGGVSVITPGTNTSNQVAVLYQDVNCTEVPVAIHADQLTPTWRVYSTGSNVFQTRAGCLIGAEHVNNSYECDIPIGAGICASYQTQTNSPRRARSVASQSIIAYTMSLGAENSVAYSNNSIAIPTNFTISVTTEILPVSMTKTSVDCTMYICGDSTECSNLLLQYGSFCTQLNRALTGIAVEQDKNTQEVFAQVKQIYKTPPIKDFGGFNFSQILPDPSKPSKRSFIEDLLFNKVTLADAGFIKQYGDCLGDIAARDLICAQKFNGLTVLPPLLTDEMIAQYTSALLAGTITSGWTFCAGAALQIPFAMQMAYRFNGIGVTQNVLYENQKLIANQFNSAIGKIQDSLSSTASALGKLQDVVNQNAQALNTLVKQLSSNFGAISSVLNDILSRLDKVEAEVQIDRLITGRLQSLQTYVTQQLIRAAEIRASANLAATKMSECVCGQSKRVDFCGKGYHLMSFPQSAPHGVVFLHVTYVPAQEKNFTTAPAICHDGKAHFPREGVFVSNGTHWFVTQRNFYEPQIITTDNTFVSGNCDVVIGIVNNTVYDPLQPELDSGGSGYIPEAPRDGQAYVRKDGEWVLLSTFL

SEQ ID NO: 10208 - protein, 1177 aa, Artificial Sequence; identical to SEQ ID NO: 10198
  SARS-CoV-2/England/200990660/2020__EPI_ISL_414523 spike protein (1-1147)(G889C_L1034C) Foldon construct

SEQ ID NO: 10209 - protein, 1177 aa, Artificial Sequence
  SARS-CoV-2/Australia/NSW09/2020__EPI_ISL_413595 spike protein (1-1147)(G889C_L1034C) Foldon construct
MFVFLVLLPLVSSQCVNLTTRTQLPPAYTNSFTRGVYYPDKVFRSSVLHSTQDLFLPFFSNVTWFHAIHVSGTNGTKRFDNPVLPFNDGVYFASTEKSNIIRGWIFGTTLDSKTQSLLIVNNATNVVIKVCEFQFCNDPFLGVYYHKNNKSWMESEFRVYSSANNCTFEYVSQPFLMDLEGKQGNFKNLREFVFKNIDGYFKIYSKHTPINLVRDLPQGFSALEPLVDLPIGINITRFQTLLALHRSYLTPGDSSSGWTAGAAAYYVGYLQPRTFLLKYNENGTITDAVDCALDPLSETKCTLKSFTVEKGIYQTSNFRVQPTESIVRFPNITNLCPFGEVFNATRFASVYAWNRKRISNCVADYSVLYNSASFSTFKCYGVSPTKLNDLCFTNVYADSFVIRGDEVRQIAPGQTGKIADYNYKLPDDFTGCVIAWNSNNLDSKVGGNYNYLYRLFRKSNLKPFERDISTEIYQAGSTPCNGVEGFNCYFPLQSYGFQPTNGVGYQPYRVVVLSFELLHAPATVCGPKKSTNLVKNKCVNFNFNGLTGTGVLTESNKKFLPFQQFGRDIADTTDAVRDPQTLEILDITPCSFGGVSVITPGTNTSNQVAVLYQDVNCTEVPVAIHADQLTPTWRVYSTGSNVFQTRAGCLIGAEHVNNSYECDIPIGAGICASYQTQTNSPRRARSVASQSIIAYTMSLGAENSVAYSNNSIAIPTNFTISVTTEILPVSMTKTSVDCTMYICGDSTECSNLLLQYGSFCTQLNRALTGIAVEQDKNTQEVFAQVKQIYKTPPIKDFGGFNFSQILPDPSKPSKRSFIEDLLFNKVTLADAGFIKQYGDCLGDIAARDLICAQKFNGLTVLPPLLTDEMIAQYTSALLAGTITSGWTFCAGAALQIPFAMQMAYRFNGIGVTQNVLYENQKLIANQFNSAIGKIQDSLSFTASALGKLQDVVNQNAQALNTLVKQLSSNFGAISSVLNDILSRLDKVEAEVQIDRLITGRLQSLQTYVTQQLIRAAEIRASANLAATKMSECVCGQSKRVDFCGKGYHLMSFPQSAPHGVVFLHVTYVPAQEKNFTTAPAICHDGKAHFPREGVFVSNGTHWFVTQRNFYEPQIITTDNTFVSGNCDVVIGIVNNTVYDPLQPELDSGGSGYIPEAPRDGQAYVRKDGEWVLLSTFL

SEQ ID NO: 10210 - protein, 1177 aa, Artificial Sequence; identical to SEQ ID NO: 10190
  SARS-CoV-2/Australia/NSW10/2020__EPI_ISL_413596 spike protein (1-1147)(G889C_L1034C) Foldon construct

SEQ ID NO: 10211 - protein, 1177 aa, Artificial Sequence
  SARS-CoV-2/Switzerland/1000477797/2020__EPI_ISL_413023 spike protein (1-1147)(G889C_L1034C) Foldon construct
MFVFLVLLPLVSSQCVNLTTRTQLPPAYTNSFTRGVYYPDKVFRSSVLHSTQDLFLPFFSNVTWFHAIHVSGTNGTKRFDNPVLPFNDGVYFASTEKSNIIRGWIFGTTLDSKTQSLLIVNNATNVVIKVCEFQFCNDPFLGVYYHKNNKSWMESEFRVYSSANNCTFEYVSQPFLMDLEGKQGNFKNLREFVFKNIDGYFNIYSKHTPINLVRDLPQGFSALEPLVDLPIGINITRFQTLLALHRSYLTPGDSSSGWTAGAAAYYVGYLQPRTFLLKYNENGTITDAVDCALDPLSETKCTLKSFTVEKGIYQTSNFRVQPTESIVRFPNITNLCPFGEVFNATRFASVYAWNRKRISNCVADYSVLYNSASFSTFKCYGVSPTKLNDLCFTNVYADSFVIRGDEVRQIAPGQTGKIADYNYKLPDDFTGCVIAWNSNNLDSKVGGNYNYLYRLFRKSNLKPFERDISTEIYQAGSTPCNGVEGFNCYFPLQSYGFQPTNGVGYQPYRVVVLSFELLHAPATVCGPKKSTNLVKNKCVNFNFNGLTGTGVLTESNKKFLPFQQFGRDIADTTDAVRDPQTLEILDITPCSFGGVSVITPGTNTSNQVAVLYQGVNCTEVPVAIHADQLTPTWRVYSTGSNVFQTRAGCLIGAEHVNNSYECDIPIGAGICASYQTQTNSPRRARSVASQSIIAYTMSLGAENSVAYSNNSIAIPTNFTISVTTEILPVSMTKTSVDCTMYICGDSTECSNLLLQYGSFCTQLNRALTGIAVEQDKNTQEVFAQVKQIYKTPPIKDFGGFNFSQILPDPSKPSKRSFIEDLLFNKVTLADAGFIKQYGDCLGDIAARDLICAQKFNGLTVLPPLLTDEMIAQYTSALLAGTITSGWTFCAGAALQIPFAMQMAYRFNGIGVTQNVLYENQKLIANQFNSAIGKIQDSLSSTASALGKLQDVVNQNAQALNTLVKQLSSNFGAISSVLNDILSRLDKVEAEVQIDRLITGRLQSLQTYVTQQLIRAAEIRASANLAATKMSECVCGQSKRVDFCGKGYHLMSFPQSAPHGVVFLHVTYVPAQEKNFTTAPAICHDGKAHFPREGVFVSNGTHWFVTQRNFYEPQIITTDNTFVSGNCDVVIGIVNNTVYDPLQPELDSGGSGYIPEAPRDGQAYVRKDGEWVLLSTFL

SEQ ID NO: 10212 - protein, 1177 aa, Artificial Sequence
  SARS-CoV-2/Belgium/BA-02291/2020__EPI_ISL_415159 spike protein (1-1147)(G889C_L1034C) Foldon construct
MFVFLVLLPLVSSQCVNLTTRTQLPPAYTNSFTRGVYYPDKVFRSSVLHSTQDLFLPFFSNVTWFHAIHVSGTNGTKRFDNPVLPFNDGVYFASTEKSNIIRGWIFGTTLDSKTQSLLIVNNATNVVIKVCEFQFCNDPFLGVYYHKNNKSWMESEFRVYSSANNCTFEYVSQPFLMDLEGKQGNFKNLREFVFKNIDGYFKIYSKHTPINLVRDLPQGFSALEPLVDLPIGINITRFQTLLALHRSYLTPGDSSSGWTAGAAAYYVGYLQPRTFLLKYNENGTITDAVDCALDPLSETKCTLKSFTVEKGIYQTSNFRVQPTESIVRFPNITNLCPFGEVFNATRFASVYAWNRKRISNCVADYSVLYNSASFSTFKCYGVSPTKLNDLCFTNVYADSFVIRGDEVRQIAPGQTGKIADYNYKLPDDFTGCVIAWNSNNLDSKVGGNYNYLYRLFRRSNLKPFERDISTEIYQAGSTPCNGVEGFNCYFPLQSYGFQPTNGVGYQPYRVVVLSFELLPAPATVCGPKKSTNLVKNKCVNFNFNGLTGTGVLTESNKKFLPFQQFGRDIADTTDAVRDPQTLEILDITPCSFGGVSVITPGTNTSNQVAVLYQGVNCTEVPVAIHADQLTPTWRVYSTGSNVFQTRAGCLIGAEHVNNSYECDIPIGAGICASYQTQTNSPRRARSVASQSIIAYTMSLGAENSVAYSNNSIAIPTNFTISVTTEILPVSMTKTSVDCTMYICGDSTECSNLLLQYGSFCTQLNRALTGIAVEQDKNTQEVFAQVKQIYKTPPIKDFGGFNFSQILPDPSKPSKRSFIEDLLFNKVTLADAGFIKQYGDCLGDIAARDLICAQKFNGLTVLPPLLTDEMIAQYTSALLAGTITSGWTFCAGAALQIPFAMQMAYRFNGIGVTQNVLYENQKLIANQFNSAIGKIQDSLSSAAPALGKLQDVVNQNAQALNTLVKQLSSNFGAISSVLNDILSRLDKVEAEVQIDRLITGRLQSLQTYVTQQLIRAAEIRASANLAATKMSECVCGQSKRVDFCGKGYHLMSFPQSAPHGVVFLHVTYVPAQEKNFTTAPAICHDGKAHFPREGVFVSNGTHWFVTQRNFYEPQIITTDNTFVSGNCDVVIGIVNNTVYDPLQPELDSGGSGYIPEAPRDGQAYVRKDGEWVLLSTFL

SEQ ID NO: 10213 - protein, 1177 aa, Artificial Sequence
  SARS-CoV-2/USA/WA8-UW5/2020__EPI_ISL_413486 spike protein (1-1147)(G889C_L1034C) Foldon construct
MFVFLVLLPLVSSQCVNLTTRTQLPPAYTNSFTRGVYYPDKVFRSSVLHSTQDLFLPFFSNVTWFHAIHVSGTNGTKRFDNPVLPFNDGVYFASTEKSNIIRGWIFGTTLDSKTQSLLIVNNATNVVIKVCEFQFCNDPFLGVYYHKNNKSWMESEFRVYSSANNCTFEYVSQPFLMDLEGKQGNFKNLREFVFKNIDGYFKIYSKHTPINLVRDLPQGFSALEPLVDLPIGINITRFQTLLALHRSYLTPGDSSSGWTAGAAAYYVGYLQPRTFLLKYNENGTITDAVDCALDPLSETKCTLKSFTVEKGIYQTSNFRVQPTESIVRFPNITNLCPFGEVFNATRFASVYAWNRKRISNCVADYSVLYNSASFSTFKCYGVSPTKLNDLCFTNVYADSFVIRGDEVRQIAPGQTGKIADYNYKLPDDFTGCVIAWNSNNLDSKVGGNYNYLYRLFRKSNLKPFERDISTEIYQAGSTPCNGVEGFNCYFPLQSYGFQPTNGVGYQPYRVVVLSFELLHAPATVCGPKKSTNLVKNKCVNFNFNGLTGTGVLTESNKKFLPFQQFGRDIADTTDAVRDPQTLEILDITPCSFGGVSVITPGTNTSNQVAVLYQDVNCTEVPVAIHADQLTPTWRVYSTGSNVFQTRAGCLIGAEYVNNSYECDIPIGAGICASYQTQTNSPRRARSVASQSIIAYTMSLGAENSVAYSNNSIAIPTNFTISVTTEILPVSMTKTSVDCTMYICGDSTECSNLLLQYGSFCTQLNRALTGIAVEQDKNTQEVFAQVKQIYKTPPIKDFGGFNFSQILPDPSKPSKRSFIEDLLFNKVTLADAGFIKQYGDCLGDIAARDLICAQKFNGLTVLPPLLTDEMIAQYTSALLAGTITSGWTFCAGAALQIPFAMQMAYRFNGIGVTQNVLYENQKLIANQFNSAIGKIQDSLSSTASALGKLQDVVNQNAQALNTLVKQLSSNFGAISSVLNDILSRLDKVEAEVQIDRLITGRLQSLQTYVTQQLIRAAEIRASANLAATKMSECVCGQSKRVDFCGKGYHLMSFPQSAPHGVVFLHVTYVPAQEKNFTTAPAICHDGKAHFPREGVFVSNGTHWFVTQRNFYEPQIITTDNTFVSGNCDVVIGIVNNTVYDPLQPELDSGGSGYIPEAPRDGQAYVRKDGEWVLLSTFL

SEQ ID NO: 10214 - protein, 1177 aa, Artificial Sequence
  SARS-CoV-2/England/20102000506/2020__EPI_ISL_415147 spike protein (1-1147)(G889C_L1034C) Foldon construct
MFVFLVLLPLVSSQCVNLTTRTQLPPAYTNSFTRGVYYPDKVFRSSVLHSTQDLFLPFFSNVTWFHAIHVSGTNGTKRFDNPVLPFNDGVYFASTEKSNIIRGWIFGTTLDSKTQSLLIVNNATNVVIKVCEFQFCNDPFLGVYYHKNNKSWMESEFRVYSSANNCTFEYVSQPFLMDLEGKQGNFKNLREFVFKNIDGYFKIYSKHTPINLVRDLPQGFSALEPLVDLPIGINITRFQTLLALHRSYLTPGDSSSGWTAGAAAYYVGYLQPRTFLLKYNENGTITDAVDCALDPLSETKCTLKSFTVEKGIYQTSNFRVQPTESIVRFPNITNLCPFGEVFNATRFASVYAWNRKRISNCVADYSVLYNSASFSTFKCYGVSPTKLNDLCFTNVYADSFVIRGDEVRQIAPGQTGKIADYNYKLPDDFTGCVIAWNSNNLDSKVGGNYNYLYRLFRKSNLKPFERDISTEIYQAGSTPCNGVEGFNCYFPLQSYGFQPTNGVGYQPYRVVVLSFELLHAPATVCGPKKSTNLVKNKCVNFNFNGLTGTGVLTESNKKFLPFQQFGRDIADTTDAVRDPQTLEILDITPCSFGGVSVITPGTNTSNQVAVLYQGVNCTEVPVAIHADQLTPTWRVYSTGSNVFQTRAGCLIGAEHVNNSYECDIPIGAGICASYQTQTNSPRRARSVASQSIIAYTMSLGAENSVAYSNNSIAIPTNFTISVTTEILPVSMTKTSVDCTMYICGDSTECSNLLLQYGSFCTQLNRALTGIAVEQDKNTQEVFAQVKQIYKTPPIKDFGGFNFSQILPDPSKPSKRSFIEDLLFNKVTLADAGFIKQYGYCLGDIAARDLICAQKFNGLTVLPPLLTDEMIAQYTSALLAGTITSGWTFCAGAALQIPFAMQMAYRFNGIGVTQNVLYENQKLIANQFNSAIGKIQDSLSSTASALGKLQDVVNQNAQALNTLVKQLSSNFGAISSVLNDILSRLDKVEAEVQIDRLITGRLQSLQTYVTQQLIRAAEIRASANLAATKMSECVCGQSKRVDFCGKGYHLMSFPQSAPHGVVFLHVTYVPAQEKNFTTAPAICHDGKAHFPREGVFVSNGTHWFVTQRNFYEPQIITTDNTFVSGNCDVVIGIVNNTVYDPLQPELDSGGSGYIPEAPRDGQAYVRKDGEWVLLSTFL

SEQ ID NO: 10215 - protein, 1177 aa, Artificial Sequence
  SARS-CoV-2/Belgium/VAG-03013/2020__EPI_ISL_415155 spike protein (1-1147)(G889C_L1034C) Foldon construct
MFVFLVLLPLVSSQCVNLTTRTQLPPAYTNSFTRGVYYPDKVFRSSVLHSTQDLFLPFFSNVTWFHAIHVSGTNGTKRFDNPVLPFNDGVYFASTEKSNIIRGWIFGTTLDSKTQSLLIVNNATNVVIKVCEFQFCNDPFLGVYYHKNNKSWMESEFRVYSSANNCTFEYVSQPFLMDLEGKQGNFKNLREFVFKNIDGYFKIYSKHTPINLVRDLPQGFSALEPLVDLPIGINITRFQTLLALHRSYLTPGDSSSGWTAGAAAYYVGYLQPRTFLLKYNENGTITDAVDCALDPLSETKCTLKSFTVEKGIYQTSNFRVQPTESIVRFPNITNLCPFGEVFNATRFASVYAWNRKRISNCVADYSVLYNSASFSTFKCYGVSPTKLNDLCFTNVYADSFVIRGDEVRQIAPGQTGKIADYNYKLPDDFTGCVIAWNSNNLDSKVGGNYNYLYRLFRKSNLKPFERDISTEIYQAGSTPCNGVEGFNCYFPLQSYGFQPTNGVGYQPYRVVVLSFELLHAPATVCGPKKSTNLVKNKCVNFNFNGLTGTGVLTESNKKFLPFQQFGRDIADTTDAVRDPQTLEILDITPCSFGGVSVITPGTNTSNQVAVLYQGVNCTEVPVAIHADQLTPTWRVYSTGSNVFQTRAGCLIGAEHVNNSYECDIPIGAGICASYQTQTNSPRRARSVASQSIIAYTMSLGAENSVAYSNNSIAIPTNFTISVTTEILPVSMTKTSVDCTMYICGDSTECSNLLLQYGSFCTQLNRALTGIAVEQDKNTQEVFAQVKQIYKTPPIKDFGGFNFSQILPDPSKPSKRSFIEDLLFNKVTLADAGFIKQYGDCLGDIAARDLICAQKFNGLTVLPPLLTDEMIAQYTSALLAGTITSGWTFCAGAALQIPFAMQMAYRFNGIGVTQNVLYENQKLIANQFNSAIGKIQDSLSSTATALGKLQDVVNQNAQALNTLVKQLSSNFGAISSVLNDILSRLDKVEAEVQIDRLITGRLQSLQTYVTQQLIRAAEIRASANLAATKMSECVCGQSKRVDFCGKGYHLMSFPQSAPHGVVFLHVTYVPAQEKNFTTAPAICHDGKAHFPREGVFVSNGTHWFVTQRNFYEPQIITTDNTFVSGNCDVVIGIVNNTVYDPLQPELDSGGSGYIPEAPRDGQAYVRKDGEWVLLSTFL

SEQ ID NO: 10216 - protein, 1177 aa, Artificial Sequence
  SARS-CoV-2/Belgium/BC-03016/2020__EPI_ISL_415157 spike protein (1-1147)(G889C_L1034C) Foldon construct
MFVFLVLLPLVSSQCVNLTTRTQLPPAYTNSFTRGVYYPDKVFRSSVLHSTQDLFLPFFSNVTWFHAIHVSGTNGTKRFDNPVLPFNDGVYFASTEKSNIIRGWIFGTTLDSKTQSLLIVNNATNVVIKVCEFQFCNDPFLGVYYHKNNKSWMESEFRVYSSANNCTFEYVSQPFLMDLEGKQGNFKNLREFVFKNIDGYFKIYSKHTPINLVRDLPQGFSALEPLVDLPIGINITRFQTLLALHRSYLTPGDSSSGWTAGAAAYYVGYLQPRTFLLKYNENGTITDAVDCALDPLSETKCTLKSFTVEKGIYQTSNFRVQPTESIVRFPNITNLCPFGEVFNATRFASVYAWNRKRISNCVADYSVLYNSASFSTFKCYGVSPTKLNDLCFTNVYADSFVIRGDEVRQIAPGQTGKIADYNYKLPDDFTGCVIAWNSNNLDSKVGGNYNYLYRLFRKSNLKPFERDISTEIYQAGSTPCNGVEGFNCYFPLQSYGFQPTNGVGYQPYRVVVLSFELLHAPATVCGPKKSTNLVKNKCVNFNFNGLTGTGVLTESNKKFLPFQQFGRDIADTTDAVRDPQTLEILDITPCSFGGVSVITPGTNTSNQVAVLYQGVNCTEVPVAIHADQLTPTWRVYSTGSNVFQTRAGCLIGAEHVNNSYECDIPIGAGICASYQTQTNSPRRARSVASQSIIAYTMSLGAENSVAYSNNSIAIPTNFTISVTTEILPVSMTKTSVDCTMYICGDSTECSNLLLQYGSFCTQLNRALTGIAVEQDKNTQEVFAQVKQIYKTPPIKDFGGFNFSQILPDPSKPSKRSFIEDLLFNKVTLADAGFIKQYGDCLGDIAARDLICAQKFNGLTVLPPLLTDEMIAQYTSALLAGTITSGWTFCAGAALQIPFAMQMAYRFNGIGVTQNVLYENQKLIANQFNSAIGKIQDSLSSTAPALGKLQDVVNQNAQALNTLVKQLSSNFGAISSVLNDILSRLDKVEAEVQIDRLITGRLQSLQTYVTQQLIRAAEIRASANLAATKMSECVCGQSKRVDFCGKGYHLMSFPQSAPHGVVFLHVTYVPAQEKNFTTAPAICHDGKAHFPREGVFVSNGTHWFVTQRNFYEPQIITTDNTFVSGNCDVVIGIVNNTVYDPLQPELDSGGSGYIPEAPRDGQAYVRKDGEWVLLSTFL

SEQ ID NO: 10217 - protein, 1177 aa, Artificial Sequence
  SARS-CoV-2/Germany/BavPat3/2020__EPI_ISL_414521 spike protein (1-1147)(G889C_L1034C) Foldon construct
MFVFLVLLPLVSSQCVNLTTRTQLPPAYTNSFTRGVYYPDKVFRSSVLHSTQDLFLPFFSNVTWFHAIHVSGTNGTKRFDNPVLPFNDGVYFASTEKSNIIRGWIFGTTLDSKTQSLLIVNNATNVVIKVCEFQFCNDPFLGVYYHKNNKSWMESEFRVYSSANNCTFEYVSQPFLMDLEGKQGNFKNLREFVFKNIDGYFKIYSKHTPINLVRDLPQGFSALEPLVDLPIGINITRFQTLLALHRSYLTPGDSSSGWTAGAAAYYVGYLQPRTFLLKYNENGTITDAVDCALDPLSETKCTLKSFTVEKGIYQTSNFRVQPTESIVRFPNITNLCPFGEVFNATRFASVYAWNRKRISNCVADYSVLYNSASFSTFKCYGVSPTKLNDLCFTNVYADSFVIRGDEVRQIAPGQTGKIADYNYKLPDDFTGCVIAWNSNNLDSKVGGNYNYLYRLFRKSNLKPFERDISTEIYQAGSTPCNGVEGFNCYFPLQSYGFQPTNGVGYQPYRVVVLSFELLHAPATVCGPKKSTNLVKNKCVNFNFNGLTGTGVLTESNKKFLPFQQFGRDIADTTDAVRDPQTLEILDITPCSFGGVSVITPGTNTSNQVAVLYQDVNCTEVPVAIHADQLTPTWRVYSTGSNVFQTRAGCLIGAEHVNNSYECDIPIGAGICASYQTQTNSPRRARSVASQSIIAYTMSLGAENSVAYSNNSIAIPTNFTISVTTEILPVSMTKTSVDCTMYICGDSTECSNLLLQYGSFCTQLNRALTGIAVEQDKNTQQVFAQVKQIYKTPPIKDFGGFNFSQILPDPSKPSKRSFIEDLLFNKVTLADAGFIKQYGDCLGDIAARDLICAQKFNGLTVLPPLLTDEMIAQYTSALLAGTITSGWTFCAGAALQIPFAMQMAYRFNGIGVTQNVLYENQKLIANQFNSAIGKIQDSLSSTASALGKLQDVVNQNAQALNTLVKQLSSNFGAISSVLNDILSRLDKVEAEVQIDRLITGRLQSLQTYVTQQLIRAAEIRASANLAATKMSECVCGQSKRVDFCGKGYHLMSFPQSAPHGVVFLHVTYVPAQEKNFTTAPAICHDGKAHFPREGVFVSNGTHWFVTQRNFYEPQIITTDNTFVSGNCDVVIGIVNNTVYDPLQPELDSGGSGYIPEAPRDGQAYVRKDGEWVLLSTFL

SEQ ID NO: 10218 - protein, 1177 aa, Artificial Sequence
  SARS-CoV-2/France/HF1805/2020__EPI_ISL_414628 spike protein (1-1147)(G889C_L1034C) Foldon construct
MFVFLVLLPLVSSQCVNLTTRTQLPPAYTNSFTRGVYYPDKVFRSSVLHSTQDLFLPFFSNVTWFHAIHVSGTNGTKRFDNPVLPFNDGVYFASTEKSNIIRGWIFGTTLDSKTQSLLIVNNATNVVIKVCEFQFCNDPFLGVYYHKNNKSWMESEFRVYSSANNCTFEYVSQPFLMDLEGKQGNFKNLREFVFKNIDGYFKIYSKHTPINLVRDLPQGFSALEPLVDLPIGINITRFQTLLALHRSYLTPGDSSSGWTAGAAAYYVGYLQPRTFLLKYNENGTITDAVDCALDPLSETKCTLKSFTVEKGIYQTSNFRVQPTESIVRFPNITNLCPFGEVFNATRFASVYAWNRKRISNCVADYSVLYNSASFSTFKCYGVSPTKLNDLCFTNVYADSFVIRGDEVRQIAPGQTGKIADYNYKLPDDFTGCVIAWNSNNLDSKVGGNYNYLYRLFRKSNLKPFERDISTEIYQAGSTPCNGVEGFNCYFPLQSYGFQPTNGVGYQPYRVVVLSFELLHAPATVCGPKKSTNLVKNKCVNFNFNGLTGTGVLTESNKKFLPFQQFGRDIADTTDAVRDPQTLEILDITPCSFGGVSVITPGTNTSNQVAVLYQGVNCTEVPVAIHADQLTPTWRVYSTGSNVFQTRAGCLIGAEHVNNSYECDIPIGAGICASYQTQTNSPRRARSVASQSIIAYTMSLGAENSVAYSNNSIAIPTNFTISVTTEILPVSMTKTSVDCTMYICGDSTECSNLLLQYGSFCTQLNRALTGIAVEQDKNTQEVFAQVKQIYKTPPIKDFGGFNFSQILPDPSKPSKRSFIEDLLFNKVTLADAGFIKQYGDCLGDIAARDLICAQKFNGLTVLPPLLTDEMIAQYTSALLAGTITSGWTFCAGAALQIPFAMQMAYRFNGIGVTQNVLYENQKLIANQFNSAIGKIQDSLSSTASALGKLQDVVNQNAQALNTLVKQLSSNFGAISSVLNDILSRLDKVEAEVQIDRLITGRLQSLQTYVTQQLIRAAEIRASANLAATKMSECVCGQSKRVDFCGKGYHLMSFPQSAPHGVVFLHVTYVPAQEKNFTTAPAICHDGKAHFPREGVFVSNGTHWFVTQRNFYEPQIITTDNTFVSGNCDVVIGVVNNTVYDPLQPELDSGGSGYIPEAPRDGQAYVRKDGEWVLLSTFL

SEQ ID NO: 10219 - protein, 1177 aa, Artificial Sequence
  SARS-CoV-2/Netherlands/ZuidHolland_9/2020__EPI_ISL_414445 spike protein (1-1147)(G889C_L1034C) Foldon construct
MFVFLVLLPLVSSQCVNLTTRTQLPPAYTNSFTRGVYYPDKVFRSSVLHSTQDLFLPFFSNVTWFHAIHVSGTNGTKRFDNPVLPFNDGVYFASTEKSNIIRGWIFGTTLDSKTQSLLIVNNATNVVIKVCEFQFCNDPFLGVYYHKNNKSWMESEFRVYSSANNCTFEYVSQPFLMDLEGKQGNFKNLREFVFKNIDGYFKIYSKHTPINLVRDLPQGFSALEPLVDLPIGINITRFQTLLALHRSYLTPGDSSSGWTAGAAAYYVGYLQPRTFLLKYNENGTITDAVDCALDPLSETKCTLKSFTVEKGIYQTSNFRVQPTESIVRFPNITNLCPFGEVFNATRFASVYAWNRKRISNCVADYSVLYNSASFSTFKCYGVSPTKLNDLCFTNVYADSFVIRGDEVRQIAPGQTGKIADYNYKLPDDFTGCVIAWNSNNLDSKVGGNYNYLYRLFRKSNLKPFERDISTEIYQAGSTPCNGVEGFNCYFPLQSYGFQPTNGVGYQPYRVVVLSFELLHAPATVCGPKKSTNLVKNKCVNFNFNGLTGTGVLTESNKKFLPFQQFGRDIADTTDAVRDPQTLEILDITPCSFGGVSVITPGTNTSNQVAVLYQGVNCTEVPVAIHADQLTPTWRVYSTGSNVFQTRAGCLIGAEHVNNSYECDIPIGAGICASYQTQTNSPRRARSVASQSIIAYTMSLGAENSVAYSNNSIAIPTNFTISVTTEILPVSMTKTSVDCTMYICGDSTECSNLLLQYGSFCTQLNRALTGIAVEQDKNTQEVFAQVKQIYKTPPIKDFGGFNFSQILPDPSKPSKRSFIEDLLFNKVTLADAGFIKQYGDCLGDIAARDLICVQKFNGLTVLPPLLTDEMIAQYTSALLAGTITSGWTFCAGAALQIPFAMQMAYRFNGIGVTQNVLYENQKLIANQFNSAIGKIQDSLSSTASALGKLQDVVNQNAQALNTLVKQLSSNFGAISSVLNDILSRLDKVEAEVQIDRLITGRLQSLQTYVTQQLIRAAEIRASANLAATKMSECVCGQSKRVDFCGKGYHLMSFPQSAPHGVVFLHVTYVPAQEKNFTTAPAICHDGKAHFPREGVFVSNGTHWFVTQRNFYEPQIITTDNTFVSGNCDVVIGIVNNTVYDPLQPELDSGGSGYIPEAPRDGQAYVRKDGEWVLLSTFL

SEQ ID NO: 10220 - protein, 1177 aa, Artificial Sequence
  SARS-CoV-2/Finland/FIN03032020A/2020__EPI_ISL_413602 spike protein (1-1147)(G889C_L1034C) Foldon construct
MFVFLVLLPLVSSQCVNLTTRTQLPPAYTNSFTRGVYYPDKVFRSSVLHSTQDLFLPFFSNVTWFHAIHVSGTNGTKRFDNPVLPFNDGVYFASTEKSNIIRGWIFGTTLDSKTQSLLIVNNATNVVIKVCEFQFCNDPFLGVYYHKNNKSWMESEFRVYSSANNCTFEYVSQPFLMDLEGKQGNFKNLREFVFKNIDGYFKIYSKHTPINLVRDLPQGFSALEPLVDLPIGINITRFQTLLALHRSYLTPGDSSSGWTAGAAAYYVGYLQPRTFLLKYNENGTITDAVDCALDPLSETKCTLKSFTVEKGIYQTSNFRVQPTESIVRFPNITNLCPFGEVFNATRFASVYAWNRKRISNCVADYSVLYNSASFSTFKCYGVSPTKLNDLCFTNVYADSFVIRGDEVRQIAPGQTGKIADYNYKLPDDFTGCVISWNSNNLDSKVGGNYNYLYRLFRKSNLKPFERDISTEIYQAGSTPCNGVEGFNCYFPLQSYGFQPTNGVGYQPYRVVVLSFELLHAPATVCGPKKSTNLVKNKCVNFNFNGLTGTGVLTESNKKFLPFQQFGRDIADTTDAVRDPQTLEILDITPCSFGGVSVITPGTNTSNQVAVLYQGVNCTEVPVAIHADQLTPTWRVYSTGSNVFQTRAGCLIGAEHVNNSYECDIPIGAGICASYQTQTNSPRRARSVASQSIIAYTMSLGAENSVAYSNNSIAIPTNFTISVTTEILPVSMTKTSVDCTMYICGDSTECSNLLLQYGSFCTQLNRALTGIAVEQDKNTQEVFAQVKQIYKTPPIKDFGGFNFSQILPDPSKPSKRSFIEDLLFNKVTLADAGFIKQYGDCLGDIAARDLICAQKFNGLTVLPPLLTDEMIAQYTSALLAGTITSGWTFCAGAALQIPFAMQMAYRFNGIGVTQNVLYENQKLIANQFNSAIGKIQDSLSSTASALGKLQDVVNQNAQALNTLVKQLSSNFGAISSVLNDILSRLDKVEAEVQIDRLITGRLQSLQTYVTQQLIRAAEIRASANLAATKMSECVCGQSKRVDFCGKGYHLMSFPQSAPHGVVFLHVTYVPAQEKNFTTAPAICHDGKAHFPREGVFVSNGTHWFVTQRNFYEPQIITTDNTFVSGNCDVVIGIVNNTVYDPLQPELDSGGSGYIPEAPRDGQAYVRKDGEWVLLSTFL

SEQ ID NO: 10221 - protein, 1177 aa, Artificial Sequence
  SARS-CoV-2/France/GE1977/2020__EPI_ISL_414632 spike protein (1-1147)(G889C_L1034C) Foldon construct
MFVFLVLLPLVSSQCVNLTTRTQLPPAYTNSFTRGVYYPDKVFRSSVLHSTQDLFLPFFSNVTWFHAIHVSGTNGTKRFDNPVLPFNDGVYFASTEKSNIIRGWIFGTTLDSKTQSLLIVNNATNVVIKVCEFQFCNDPFLGVYYHKNNKSWMESEFRVYSSANNCTFEYVSQPFLMDLEGKQGNFKNLREFVFKNIDGYFKIYSKHTPINLVRDLPQGFSALEPLVDLPIGINITRFQTLLALHRSYLTPGDSSSGWTAGAAAYYVGYLQPRTFLLKYNENGTITDAVDCALDPLSETKCTLKSFTVEKGIYQTSNFRVQPTESIVRFPNITNLCPFGEVFNATRFASVYAWNRKRISNCVADYSVLYNSASFSTFKCYGVSPTKLNDLCFTNVYADSFVIRGDEVRQIAPGQTGKIADYNYKLPDDFTGCVIAWNSNNLDSKVGGNYNYLYRLFRKSNLKPFERDISTEIYQAGSTPCNGVEGFNCYFPLQSYGFQPTNGVGYQPYRVVVLSFELLHAPATVCGPKKSTNLVKNKCVNFNFNGLTGTGVLTESNKKFLPFQQFGRDIADTTDAVRDPQTLEILDITPCSFGGVSVITPGTNTSNQVAVLYQGVNCTEVPVAIHADQLTPTWRVYSTGSNVFQTRAGCLIGAEHVNNSYECDIPIGAGICASYQTQTNSPRRARSVASQSIIAYTMSLGAENSVAYSNNSIAIPTNFTISVTTEILPVSMTKTSVDCTMYICGDSTECSNLLLQYGSFCTQLNRALTGIAVEQDKNTQEVFAQVKQIYKTPPIKDFGGFNFSQILPDPSKPSKRSFIEDLLFNKVTLADAGFIKQYGDCLGDIAARDLICAQKFNGLTVLPPLLTDEMIAQYTSALLAGTITSGWTFCAGAALQIPFAMQMAYRFNGIGVTQNVLYENQKLIANQFNSAIGKIQDSLFSTASALGKLQDVVNQNAQALNTLVKQLSSNFGAISSVLNDILSRLDKVEAEVQIDRLITGRLQSLQTYVTQQLIRAAEIRASANLAATKMSECVCGQSKRVDFCGKGYHLMSFPQSAPHGVVFLHVTYVPAQEKNFTTAPAICHDGKAHFPREGVFVSNGTHWFVTQRNFYEPQIITTDNTFVSGNCDVVIGIVNNTVYDPLQPELDSGGSGYIPEAPRDGQAYVRKDGEWVLLSTFL

SEQ ID NO: 10222 - protein, 1177 aa, Artificial Sequence
  SARS-CoV-2/Finland/FIN-313/2020__EPI_ISL_414641 spike protein (1-1147)(G889C_L1034C) Foldon construct
MFVFLVLLPLVSSQCVNLTTRTQLPPAYTNSFTRGVYYPDKVFRSSVLHSTQDLFLPFFSNVTWFHAIHVSGTNGTKRFDNPVLPFNDGVYFASTEKSNIIRGWIFGTTLDSKTQSLLIVNNATNVVIKVCEFQFCNDPFLGVYYHKNNKSWMESEFRVYSSANNCTFEYVSQPFLMDLEGKQGNFKNLREFVFKNIDGYFKIYSKHTPINLVRDLPQGFSALEPLVDLPIGINITRFKTLLALHRSYLTPGDSSSGWTAGAAAYYVGYLQPRTFLLKYNENGTITDAVDCALDPLSETKCTLKSFTVEKGIYQTSNFRVQPTESIVRFPNITNLCPFGEVFNATRFASVYAWNRKRISNCVADYSVLYNSASFSTFKCYGVSPTKLNDLCFTNVYADSFVIRGDEVRQIAPGQTGKIADYNYKLPDDFTGCVIAWNSNNLDSKVGGNYNYLYRLFRKSNLKPFERDISTEIYQAGSTPCNGVEGFNCYFPLQSYGFQPTNGVGYQPYRVVVLSFELLHAPATVCGPKKSTNLVKNKCVNFNFNGLTGTGVLTESNKKFLPFQQFGRDIADTTDAVRDPQTLEILDITPCSFGGVSVITPGTNTSNQVAVLYQGVNCTEVPVAIHADQLTPTWRVYSTGSNVFQTRAGCLIGAEHVNNSYECDIPIGAGICASYQTQTNSPRRARSVASQSIIAYTMSLGAENSVAYSNNSIAIPTNFTISVTTEILPVSMTKTSVDCTMYICGDSTECSNLLLQYGSFCTQLNRALTGIAVEQDKNTQEVFAQVKQIYKTPPIKDFGGFNFSQILPDPSKPSKRSFIEDLLFNKVTLADAGFIKQYGDCLGDIAARDLICAQKFNGLTVLPPLLTDEMIAQYTSALLAGTITSGWTFCAGAALQIPFAMQMAYRFNGIGVTQNVLYENQKLIANQFNSAIGKIQDSLSSTASALGKLQDVVNQNAQALNTLVKQLSSNFGAISSVLNDILSRLDKVEAEVQIDRLITGRLQSLQTYVTQQLIRAAEIRASANLAATKMSECVCGQSKRVDFCGKGYHLMSFPQSAPHGVVFLHVTYVPAQEKNFTTAPAICHDGKAHFPREGVFVSNGTHWFVTQRNFYEPQIITTDNTFVSGNCDVVIGIVNNTVYDPLQPELDSGGSGYIPEAPRDGQAYVRKDGEWVLLSTFL

SEQ ID NO: 10223 - protein, 1177 aa, Artificial Sequence
  SARS-CoV-2/Netherlands/ZuidHolland_2/2020__EPI_ISL_414556 spike protein (1-1147)(G889C_L1034C) Foldon construct
MFVFLVLLPLVSSQCVNLTTRTQLPPAYTNSFTRGVYYPDKVFRSSVLHSTQDLFLPFFSNVTWFHAIHVSGTNGTKRFDNPVLPFNDGVYFASTEKSNIIRGWIFGTTLDSKTQSLLIVNNATNVVIKVCEFQFCNDPFLGVYYHKNNKSWMESEFRVYSSANNCTFEYVSQPFLMDLEGKQGNFKNLREFVFKNIDGYFKIYSKHTPINLVRDLPQGFSALEPLVDLPIGINITRFQTLLALHRSYLTPGDSSSGWTAGAAAYYVGYLQPRTFLLKYNENGTITDAVDCALDPLSETKCTLKSFTVEKGIYQTSNFRVQPTESIVRFPNITNLCPFGEVFNATRFASVYAWNRKRISNCVADYSVLYNSASFSTFKCYGVSPTKLNDLCFTNVYADSFVIRGDEVRQIAPGQTGKIADYNYKLPDDFTGCVIAWNSNNLDSKVGGNYNYLYRLFRKSNLKPFERDISTEIYQAGSTPCNGVEGFNCYFPLQSYGFQPTNGVGYQPYRVVVLSFELLHAPATVCGPKKSTNLVKNKCVNFNFNGLTGTGVLTESNKKFLPFQQFGRDIADTTDAVRDPQTLEILDITPCSFGGVSVITPGTNTSNQVAVLYQGVNCTEVPVAIHADQLTPTWRVYSTGSNVFQTRAGCLIGAEHVNNSYECDIPIGAGICASYQTQTNSPRRARSVASQSIIAYTMSLGAENSVAYSNNSIAIPTNFTISVTTEILPVSMTKTSVDCTMYICGDSTECSNLLLQYGSFCTQLNRALTGIALEQDKNTQEVFAQVKQIYKTPPIKDFGGFNFSQILPDPSKPSKRSFIEDLLFNKVTLADAGFIKQYGDCLGDIAARDLICAQKFNGLTVLPPLLTDEMIAQYTSALLAGTITSGWTFCAGAALQIPFAMQMAYRFNGIGVTQNVLYENQKLIANQFNSAIGKIQDSLSSTASALGKLQDVVNQNAQALNTLVKQLSSNFGAISSVLNDILSRLDKVEAEVQIDRLITGRLQSLQTYVTQQLIRAAEIRASANLAATKMSECVCGQSKRVDFCGKGYHLMSFPQSAPHGVVFLHVTYVPAQEKNFTTAPAICHDGKAHFPREGVFVSNGTHWFVTQRNFYEPQIITTDNTFVSGNCDVVIGIVNNTVYDPLQPELDSGGSGYIPEAPRDGQAYVRKDGEWVLLSTFL

SEQ ID NO: 10224 - protein, 1177 aa, Artificial Sequence
  SARS-CoV-2/USA/WA-UW31/2020__EPI_ISL_414618 spike protein (1-1147)(G889C_L1034C) Foldon construct
MFVFLVLLPLVSSQCVNLTTRTQLPPAYTNSFTRGVYYPDKVFRSSVLHSTQDLFLPFFSNVTWFHAIHVSGTNGTKRFDNPVLPFNDGVYFASTEKSNIIRGWIFGTTLDSKTQSLLIVNNATNVVIKVCEFQFCNDPFLGVYYHKNNKSWMESEFRVYSSANNCTFEYVSQPFLMDLEGKQGNFKNLREFVFKNIDGYFKIYSKHTPINLVRDLPQGFSALEPLVDLPIGINITRFQTLLALHRSYLTPGDSSSGWTAGAAAYYVGYLQPRTFLLKYNENGTITDAVDCALDPLSETKCTLKSFTVEKGIYQTSNFRVQPTESIVRFPNITNLCPFGEVFNATRFASVYAWNRKRISNCVADYSVLYNSASFSTFKCYGVSPTKLNDLCFTNVYADSFVIRGDEVRQIAPGQTGKIADYNYKLPDDFTGCVIAWNSNNLDSKVGGNYNYLYRLFRKSNLKPFERDISTEIYQAGSTPCNGAEGFNCYFPLQSYGFQPTNGVGYQPYRVVVLSFELLHAPATVCGPKKSTNLVKNKCVNFNFNGLTGTGVLTESNKKFLPFQQFGRDIADTTDAVRDPQTLEILDITPCSFGGVSVITPGTNTSNQVAVLYQDVNCTEVPVAIHADQLTPTWRVYSTGSNVFQTRAGCLIGAEHVNNSYECDIPIGAGICASYQTQTNSPRRARSVASQSIIAYTMSLGAENSVAYSNNSIAIPTNFTISVTTEILPVSMTKTSVDCTMYICGDSTECSNLLLQYGSFCTQLNRALTGIAVEQDKNTQEVFAQVKQIYKTPPIKDFGGFNFSQILPDPSKPSKRSFIEDLLFNKVTLADAGFIKQYGDCLGDIAARDLICAQKFNGLTVLPPLLTDEMIAQYTSALLAGTITSGWTFCAGAALQIPFAMQMAYRFNGIGVTQNVLYENQKLIANQFNSAIGKIQDSLSSTASALGKLQDVVNQNAQALNTLVKQLSSNFGAISSVLNDILSRLDKVEAEVQIDRLITGRLQSLQTYVTQQLIRAAEIRASANLAATKMSECVCGQSKRVDFCGKGYHLMSFPQSAPHGVVFLHVTYVPAQEKNFTTAPAICHDGKAHFPREGVFVSNGTHWFVTQRNFYEPQIITTDNTFVSGNCDVVIGIVNNTVYDPLQPELDSGGSGYIPEAPRDGQAYVRKDGEWVLLSTFL

SEQ ID NO: 10225 - protein, 1177 aa, Artificial Sequence
  SARS-CoV-2/South Korea/SNU01/2020__EPI_ISL_411929 spike protein (1-1147)(G889C_L1034C) Foldon construct
MFVFLVLLPLVSSQCVNLTTRTQLPPAYTNSFTRGVYYPDKVFRSSVLHSTQDLFLPFFSNVTWFHAIHVSGTNGTKRFDNPVLPFNDGVYFASTEKSNIIRGWIFGTTLDSKTQSLLIVNNATNVVIKVCEFQFCNDPFLGVYYHKNNKSWMESEFRVYSSANNCTFEYVSQPFLMDLEGKQGNFKNLREFVFKNIDGYFKIYSKHTPINLVRDLPQGFWALEPLVDLPIGINITRFQTLLALHRSYLTPGDSSSGWTAGAAAYYVGYLQPRTFLLKYNENGTITDAVDCALDPLSETKCTLKSFTVEKGIYQTSNFRVQPTESIVRFPNITNLCPFGEVFNATRFASVYAWNRKRISNCVADYSVLYNSASFSTFKCYGVSPTKLNDLCFTNVYADSFVIRGDEVRQIAPGQTGKIADYNYKLPDDFTGCVIAWNSNNLDSKVGGNYNYLYRLFRKSNLKPFERDISTEIYQAGSTPCNGVEGFNCYFPLQSYGFQPTNGVGYQPYRVVVLSFELLHAPATVCGPKKSTNLVKNKCVNFNFNGLTGTGVLTESNKKFLPFQQFGRDIADTTDAVRDPQTLEILDITPCSFGGVSVITPGTNTSNQVAVLYQDVNCTEVPVAIHADQLTPTWRVYSTGSNVFQTRAGCLIGAEHVNNSYECDIPIGAGICASYQTQTNSPRRARSVASQSIIAYTMSLGAENSVAYSNNSIAIPTNFTISVTTEILPVSMTKTSVDCTMYICGDSTECSNLLLQYGSFCTQLNRALTGIAVEQDKNTQEVFAQVKQIYKTPPIKDFGGFNFSQILPDPSKPSKRSFIEDLLFNKVTLADAGFIKQYGDCLGDIAARDLICAQKFNGLTVLPPLLTDEMIAQYTSALLAGTITSGWTFCAGAALQIPFAMQMAYRFNGIGVTQNVLYENQKLIANQFNSAIGKIQDSLSSTASALGKLQDVVNQNAQALNTLVKQLSSNFGAISSVLNDILSRLDKVEAEVQIDRLITGRLQSLQTYVTQQLIRAAEIRASANLAATKMSECVCGQSKRVDFCGKGYHLMSFPQSAPHGVVFLHVTYVPAQEKNFTTAPAICHDGKAHFPREGVFVSNGTHWFVTQRNFYEPQIITTDNTFVSGNCDVVIGIVNNTVYDPLQPELDSGGSGYIPEAPRDGQAYVRKDGEWVLLSTFL

SEQ ID NO: 10226 - protein, 1177 aa, Artificial Sequence
  SARS-CoV-2/China/WF0004/2020__EPI_ISL_413694 spike protein (1-1147)(G889C_L1034C) Foldon construct
MFVFLVLLPLVSSQCVNLTTRTQLPPAYTNSFTRGVYYPDKVFRSSVLHSTQDLFLPFFSNVTWFHAIHVSGTNGTKRFDNPVLPFNDGVYFASTEKSNIIRGWIFGTTLDSKTQSLLIVNNATNVVIKVCEFQFCNDPFLGVYYHKNNKSWTESEFRVYSSANNCTFEYVSQPFLMDLEGKQGNFKNLREFVFKNIDGYFKIYSKHTPINLVRDLPQGFSALEPLVDLPIGINITRFQTLLALHRSYLTPGDSSSGWTAGAAAYYVGYLQPRTFLLKYNENGTITDAVDCALDPLSETKCTLKSFTVEKGIYQTSNFRVQPTESIVRFPNITNLCPFGEVFNATRFASVYAWNRKRISNCVADYSVLYNSASFSTFKCYGVSPTKLNDLCFTNVYADSFVIRGDEVRQIAPGQTGKIADYNYKLPDDFTGCVIAWNSNNLDSKVGGNYNYLYRLFRKSNLKPFERDISTEIYQAGSTPCNGVEGFNCYFPLQSYGFQPTNGVGYQPYRVVVLSFELLHAPATVCGPKKSTNLVKNKCVNFNFNGLTGTGVLTESNKKFLPFQQFGRDIADTTDAVRDPQTLEILDITPCSFGGVSVITPGTNTSNQVAVLYQDVNCTEVPVAIHADQLTPTWRVYSTGSNVFQTRAGCLIGAEHVNNSYECDIPIGAGICASYQTQTNSPRRARSVASQSIIAYTMSLGAENSVAYSNNSIAIPTNFTISVTTEILPVSMTKTSVDCTMYICGDSTECSNLLLQYGSFCTQLNRALTGIAVEQDKNTQEVFAQVKQIYKTPPIKDFGGFNFSQILPDPSKPSKRSFIEDLLFNKVTLADAGFIKQYGDCLGDIAARDLICAQKFNGLTVLPPLLTDEMIAQYTSALLAGTITSGWTFCAGAALQIPFAMQMAYRFNGIGVTQNVLYENQKLIANQFNSAIGKIQDSLSSTASALGKLQDVVNQNAQALNTLVKQLSSNFGAISSVLNDILSRLDKVEAEVQIDRLITGRLQSLQTYVTQQLIRAAEIRASANLAATKMSECVCGQSKRFDFCGKGYHLMSFPQSAPHGVVFLHVTYVPAQEKNFTTAPAICHDGKAHFPREGVFVSNGTHWFVTQRNFYEPQIITTDNTFVSGNCDVVIGIVNNTVYDPLQPELDSGGSGYIPEAPRDGQAYVRKDGEWVLLSTFL

SEQ ID NO: 10227 - protein, 1177 aa, Artificial Sequence
  SARS-CoV-2/China/WF0028/2020__EPI_ISL_413791 spike protein (1-1147)(G889C_L1034C) Foldon construct
MFVFLVLLPLVSSQCVNLTTRTQLPPAYTNSFTRGVYYPDKVFRSSVLHSTQDLFLPFFSNVTWFHAIHVSGTNGTKRFDNPVLPFNDGVYFASTEKSNIIRGWIFGTTLDSKTQSLLIVNNATNVVIKVCEFQFCNDPFLGVYYHKNNKSWMESEFRVYSSANNCTFEYVSQPFLMDLEGKQGNFKNLREFVFKNIDGYFKIYSKHTPINLVRDLPQGFSALEPLVDLPIGINITRFQTLLALHRSYLTPGDSSSGWTAGAAAYYVGYLQPRTFLLKYNENGTITDAVDCALDPLSETKCTLKSFTVEKGIYQTSNFRVQPTESIVRFPNITNLCPFGEVFNATRFASVYAWNRKRISNCVADYSVLYNSASFSTFKCYGVSPTKLNDLCFTNVYADSFVIRGDEVRQIAPGQTGKIADYNYKLPDDFTGCVIAWNSNNLDSKVGGNYNYLYRLFRKSNLKPFERDISTEIYQAGSTPCNGVEGFNCYFPLQSYGFQPTNGVGYQPYRVVVLSFELLHAPATVCGPKKSTNLVKNKCVNFNFNGLTGTGVLTESNKKFLPFQQFGRDIADTTDAVRDPQTLEILDITPCSFGGVSVITPGTNTSNQVAVLYQDVNCTEVPVAIHADQLTPTWRVYSTGSNVFQTRAGCLIGAEHVNNSYECDIPIGAGICASYQTQTNSPRRARSVASQSIIAYTMSLGAENSVAYSNNSIAIPTNFTISVTTEILPVSMTKTSVDCTMYICGDSTECSNLLLQYGSFCTQLNRALTGIAVEQDKNTQEVFAQVKQIYKTPPIKDFGGFNFSQILPDPSKPSKRSFIEDLLFNKVTLADAGFIKQYGDCLGDIAARDLICAQKFNGLTVLPPLLTDEMIAQYTSALLAGTITSGWTFCAGAALQIPFAMQMAYRFNGIGVTQNVLYENQKLIANQFNSAIGKIQDSLSSTASALGKLQDVVNQNAQALNTLVKQLSSNFGAISSVLNDILSRLDKVEAEVQIDRLITGRLQSLQTYVTQQLIRAAEIRASANLAATKMSECVCGQSKRVDFCGKGYHLMSFPQSAPHGVVFLHVTYVPAQEKNFTTAPAICHDGKAHFPREGVFVSNGTHWFVTQRNFYEPQIITTDNTFVSGNCDVVIGIVNNTVYDPLQPELESGGSGYIPEAPRDGQAYVRKDGEWVLLSTFL

SEQ ID NO: 10228 - protein, 1177 aa, Artificial Sequence
  SARS-CoV-2/2019-nCoV/USA-CruiseA-18/2020__MT159716.1 spike protein (1-1147)(G889C_L1034C) Foldon construct
MFVFLVLLPLVSSQCVNLTTRTQLPPAYTNSFTRGVYYPDKVFRSSVLHSTQDLFLPFFSNVTWFHAIHVSGTNGTKRFDNPVLPFNDGVYFASTEKSNIIRGWIFGTTLDSKTQSLLIVNNATNVVIKVCEFQFCNDPFLGVYYHKNNKSWMESELRVYSSANNCTFEYVSQPFLMDLEGKQGNFKNLREFVFKNIDGYFKIYSKHTPINLVRDLPQGFSALEPLVDLPIGINITRFQTLLALHRSYLTPGDSSSGWTAGAAAYYVGYLQPRTFLLKYNENGTITDAVDCALDPLSETKCTLKSFTVEKGIYQTSNFRVQPTESIVRFPNITNLCPFGEVFNATRFASVYAWNRKRISNCVADYSVLYNSASFSTFKCYGVSPTKLNDLCFTNVYADSFVIRGDEVRQIAPGQTGKIADYNYKLPDDFTGCVIAWNSNNLDSKVGGNYNYLYRLFRKSNLKPFERDISTEIYQAGSTPCNGVEGFNCYFPLQSYGFQPTNGVGYQPYRVVVLSFELLHAPATVCGPKKSTNLVKNKCVNFNFNGLTGTGVLTESNKKFLPFQQFGRDIADTTDAVRDPQTLEILDITPCSFGGVSVITPGTNTSNQVAVLYQDVNCTEVPVAIHADQLTPTWRVYSTGSNVFQTRAGCLIGAEHVNNSYECDIPIGAGICASYQTQTNSPRRARSVASQSIIAYTMSLGAENSVAYSNNSIAIPTNFTISVTTEILPVSMTKTSVDCTMYICGDSTECSNLLLQYGSFCTQLNRALTGIAVEQDKNTQEVFAQVKQIYKTPPIKDFGGFNFSQILPDPSKPSKRSFIEDLLFNKVTLADAGFIKQYGDCLGDIAARDLICAQKFNGLTVLPPLLTDEMIAQYTSALLAGTITSGWTFCAGAALQIPFAMQMAYRFNGIGVTQNVLYENQKLIANQFNSAIGKIQDSLSSTASALGKLQDVVNQNAQALNTLVKQLSSNFGAISSVLNDILSRLDKVEAEVQIDRLITGRLQSLQTYVTQQLIRAAEIRASANLAATKMSECVCGQSKRVDFCGKGYHLMSFPQSAPHGVVFLHVTYVPAQEKNFTTAPAICHDGKAHFPREGVFVSNGTHWFVTQRNFYEPQIITTDNTFVSGNCDVVIGIVNNTVYDPLQPELDSGGSGYIPEAPRDGQAYVRKDGEWVLLSTFL

SEQ ID NO: 10229 - protein, 1177 aa, Artificial Sequence
  SARS-CoV-2/SARS-CoV-2/Yunnan-01/human/2020/CHN__MT049951.1 spike protein (1-1147)(G889C_L1034C) Foldon construct
MFVFLVLLPLVSSQCVNLTTRTQLPPANTNSFTRGVYYPDKVFRSSVLHSTQDLFLPFFSNVTWFHAIHVSGTNGTKRFDNPVLPFNDGVYFASTEKSNIIRGWIFGTTLDSKTQSLLIVNNATNVVIKVCEFQFCNDPFLGVYYHKNNKSWMESEFRVYSSANNCTFEYVSQPFLMDLEGKQGNFKNLREFVFKNIDGYFKIYSKHTPINLVRDLPQGFSALEPLVDLPIGINITRFQTLLALHRSYLTPGDSSSGWTAGAAAYYVGYLQPRTFLLKYNENGTITDAVDCALDPLSETKCTLKSFTVEKGIYQTSNFRVQPTESIVRFPNITNLCPFGEVFNATRFASVYAWNRKRISNCVADYSVLYNSASFSTFKCYGVSPTKLNDLCFTNVYADSFVIRGDEVRQIAPGQTGKIADYNYKLPDDFTGCVIAWNSNNLDSKVGGNYNYLYRLFRKSNLKPFERDISTEIYQAGSTPCNGVEGFNCYFPLQSYGFQPTNGVGYQPYRVVVLSFELLHAPATVCGPKKSTNLVKNKCVNFNFNGLTGTGVLTESNKKFLPFQQFGRDIADTTDAVRDPQTLEILDITPCSFGGVSVITPGTNTSNQVAVLYQDVNCTEVPVAIHADQLTPTWRVYSTGSNVFQTRAGCLIGAEHVNNSYECDIPIGAGICASYQTQTNSPRRARSVASQSIIAYTMSLGAENSVAYSNNSIAIPTNFTISVTTEILPVSMTKTSVDCTMYICGDSTECSNLLLQYGSFCTQLNRALTGIAVEQDKNTQEVFAQVKQIYKTPPIKDFGGFNFSQILPDPSKPSKRSFIEDLLFNKVTLADAGFIKQYGDCLGDIAARDLICAQKFNGLTVLPPLLTDEMIAQYTSALLAGTITSGWTFCAGAALQIPFAMQMAYRFNGIGVTQNVLYENQKLIANQFNSAIGKIQDSLSSTASALGKLQDVVNQNAQALNTLVKQLSSNFGAISSVLNDILSRLDKVEAEVQIDRLITGRLQSLQTYVTQQLIRAAEIRASANLAATKMSECVCGQSKRVDFCGKGYHLMSFPQSAPHGVVFLHVTYVPAQEKNFTTAPAICHDGKAHFPREGVFVSNGTHWFVTQRNFYEPQIITTDNTFVSGNCDVVIGIVNNTVYDPLQPELDSGGSGYIPEAPRDGQAYVRKDGEWVLLSTFL

SEQ ID NO: 10230 - protein, 1177 aa, Artificial Sequence
  SARS-CoV-2/USA/WA-UW292/2020__EPI_ISL_418077 spike protein (1-1147)(G889C_L1034C) Foldon construct
MFVFLVLLPLVSSQCVNLTTRTQLPPAYTNSFTRGVYYPDKVFRSSVLHSTQDLFLPFFSNVTWFHAIHVSGTNGTKRFDNPVLPFNDGVYFASTEKSNIIRGWIFGTTLDSKTQSLLIVNNATNVVIKVCEFQFCNDPFLGVYYHKNNKSWMESEFRVYSSANNCTFEYVSQPFLMDLEGKQGNFKNLREFVFKNIDGYFKIYSKHTPINLVRDLPQGFSALEPLVDLPIGINITRFQTLLALHRSYLTPGDSSSGWTAGAAAYYVGYLQPRTFLLKYNENGTITDAVDCALDPLSETKCTLKSFTVEKGIYQTSNFRVQPTESIVRFPNITNLCPFGEVFNATRFASVYAWNRKRISNCVADYSVLYNSASFSTFKCYGVSPTKLNDLCFTNVYADSFVIRGDEVRQIAPGQTGKIADYNYKLPDDFTGCVIAWNSNNLDSKVGGNYNYLYRLFRKSNLKPFERDISTEIYQASSTPCNGVEGFNCYFPLQSYGFQPTNGVGYQPYRVVVLSFELLHAPATVCGPKKSTNLVKNKCVNFNFNGLTGTGVLTESNKKFLPFQQFGRDIADTTDAVRDPQTLEILDITPCSFGGVSVITPGTNTSNQVAVLYQDVNCTEVPVAIHADQLTPTWRVYSTGSNVFQTRAGCLIGAEHVNNSYECDIPIGAGICASYQTQTNSPRRARSVASQSIIAYTMSLGAENSVAYSNNSIAIPTNFTISVTTEILPVSMTKTSVDCTMYICGDSTECSNLLLQYGSFCTQLNRALTGIAVEQDKNTQEVFAQVKQIYKTPPIKDFGGFNFSQILPDPSKPSKRSFIEDLLFNKVTLADAGFIKQYGDCLGDIAARDLICAQKFNGLTVLPPLLTDEMIAQYTSALLAGTITSGWTFCAGAALQIPFAMQMAYRFNGIGVTQNVLYENQKLIANQFNSAIGKIQDSLSSTASALGKLQDVVNQNAQALNTLVKQLSSNFGAISSVLNDILSRLDKVEAEVQIDRLITGRLQSLQTYVTQQLIRAAEIRASANLAATKMSECVCGQSKRVDFCGKGYHLMSFPQSAPHGVVFLHVTYVPAQEKNFTTAPAICHDGKAHFPREGVFVSNGTHWFVTQRNFYEPQIITTDNTFVSGNCDVVIGIVNNTVYDPLQPELDSGGSGYIPEAPRDGQAYVRKDGEWVLLSTFL

SEQ ID NO: 10231 - protein, 1177 aa, Artificial Sequence
  SARS-CoV-2/Iceland/192/2020__EPI_ISL_417819 spike protein (1-1147)(G889C_L1034C) Foldon construct
MFVFFVLLPLVSSQCVNLTTRTQLPPAYTNSFTRGVYYPDKVFRSSVLHSTQDLFLPFFSNVTWFHAIHVSGTNGTKRFDNPVLPFNDGVYFASTEKSNIIRGWIFGTTLDSKTQSLLIVNNATNVVIKVCEFQFCNDPFLGVYYHKNNKSWMESEFRVYSSANNCTFEYVSQPFLMDLEGKQGNFKNLREFVFKNIDGYFKIYSKHTPINLVRDLPQGFSALEPLVDLPIGINITRFQTLLALHRSYLTPGDSSSGWTAGAAAYYVGYLQPRTFLLKYNENGTITDAVDCALDPLSETKCTLKSFTVEKGIYQTSNFRVQPTESIVRFPNITNLCPFGEVFNATRFASVYAWNRKRISNCVADYSVLYNSASFSTFKCYGVSPTKLNDLCFTNVYADSFVIRGDEVRQIAPGQTGKIADYNYKLPDDFTGCVIAWNSNNLDSKVGGNYNYLYRLFRKSNLKPFERDISTEIYQAGSTPCNGVEGFNCYFPLQSYGFQPTNGVGYQPYRVVVLSFELLHAPATVCGPKKSTNLVKNKCVNFNFNGLTGTGVLTESNKKFLPFQQFGRDIADTTDAVRDPQTLEILDITPCSFGGVSVITPGTNTSNQVAVLYQGVNCTEVPVAIHADQLTPTWRVYSTGSNVFQTRAGCLIGAEHVNNSYECDIPIGAGICASYQTQTNSPRRARSVASQSIIAYTMSLGAENSVAYSNNSIAIPTNFTISVTTEILPVSMTKTSVDCTMYICGDSTECSNLLLQYGSFCTQLNRALTGIAVEQDKNTQEVFAQVKQIYKTPPIKDFGGFNFSQILPDPSKPSKRSFIEDLLFNKVTLADAGFIKQYGDCLGDIAARDLICAQKFNGLTVLPPLLTDEMIAQYTSALLAGTITSGWTFCAGAALQIPFAMQMAYRFNGIGVTQNVLYENQKLIANQFNSAIGKIQDSLSSTASALGKLQDVVNQNAQALNTLVKQLSSNFGAISSVLNDILSRLDKVEAEVQIDRLITGRLQSLQTYVTQQLIRAAEIRASANLAATKMSECVCGQSKRVDFCGKGYHLMSFPQSAPHGVVFLHVTYVPAQEKNFTTAPAICHDGKAHFPREGVFVSNGTHWFVTQRNFYEPQIITTDNTFVSGNCDVVIGIVNNTVYDPLQPELDSGGSGYIPEAPRDGQAYVRKDGEWVLLSTFL

SEQ ID NO: 10232 - protein, 1177 aa, Artificial Sequence
  SARS-CoV-2/Belgium/ULG-6939/2020__EPI_ISL_417020 spike protein (1-1147)(G889C_L1034C) Foldon construct
MFVFLVLLPLVSSQCVNLTTRTQLPPAYTNSFTRGVYYPDKVFRSSVLHSTQDLFLPFFSNVTWFHAIHVSGTNGTKRFDNPVLPFNDGVYFASTEKSNIIRGWIFGTTLDSKTQSLLIVNNATNVVIKVCEFQFCNDPFLGVYYHKNNKSWMESEFRVYSSANNCTFEYVSQPFLMDLEGKQGNFKNLREFVFKNIDGYFKIYSKHTPINLVRDLPQGFSALEPLVDLPIGINITRFQTLLALHRSYLTPGDSSSGWTAGAAAYYVGYLQPRTFLLKYNENGTITDAVDCALDPLSETKCTLKSFTVEKGIYQTSNFRVQPTESIVRFPNITNLCPFGEVFNATRFASVYAWNRKRISNCVADYSVLYNSASFSTFKCYGVSPTKLNDLCFTNVYADSFVIRGDEVRQIAPGQTGKIADYNYKLPDDFTGCVIAWNSNNLDSKVGGNYNYLYRLFRKSNLKPFERDISTEIYQAGSTPCNGVEGFNCYFPLQSYGFQPTNGVGYQPYRVVVLSFELLHAPATVCGPKKSTNLVKNKCVNFNFNGLTGTGVLTESNKKFLPFQQFGRDIADTTDAVRDPQTLEILDITPCSFGGVSVITPGTNTSNQVAVLYQGVNCTEVPVAIHADQLTPTWRVYSTGSNVFQTRAGCLIGAEHVNNSYECDIPIGAGICASYQTQTNSPRRARSVASQSIIAYTMSLGAENSVVYSNNSIAIPTNFTISVTTEILPVSMTKTSVDCTMYICGDSTECSNLLLQYGSFCTQLNRALTGIAVEQDKNTQEVFAQVKQIYKTPPIKDFGGFNFSQILPDPSKPSKRSFIEDLLFNKVTLADAGFIKQYGDCLGDIAARDLICAQKFNGLTVLPPLLTDEMIAQYTSALLAGTITSGWTFCAGAALQIPFAMQMAYRFNGIGVTQNVLYENQKLIANQFNSAIGKIQDSLSSTASALGKLQDVVNQNAQALNTLVKQLSSNFGAISSVLNDILSRLDKVEAEVQIDRLITGRLQSLQTYVTQQLIRAAEIRASANLAATKMSECVCGQSKRVDFCGKGYHLMSFPQSAPHGVVFLHVTYVPAQEKNFTTAPAICHDGKAHFPREGVFVSNGTHWFVTQRNFYEPQIITTDNTFVSGNCDVVIGIVNNTVYDPLQPELDSGGSGYIPEAPRDGQAYVRKDGEWVLLSTFL

SEQ ID NO: 10233 - protein, 1177 aa, Artificial Sequence
  SARS-CoV-2/France/HF2496/2020__EPI_ISL_418231 spike protein (1-1147)(G889C_L1034C) Foldon construct
MFVFLVLLPLVSSQCVNLTTRTQLPPAYTNSFTRGVYYPDKVFRSSVLHSTQDLFLPFFSNVTWFHAIHVSGTNGTKRFDNPVLPFNDGVYFASTEKSNIIRGWIFGTTLDSKTQSLLIVNNATNVVIKVCEFQFCNDPFLGVYYHKNNKSWMESEFRVYSSANNCTFEYVSQPFLMDLEGKQGNFKNLREFVFKNIDGYFKIYSKHTPINLVRDLPQGFSALEPLVDLPIGINITRFQTLLALHRSYLTPGDSSSGWTAGAAAYYVGYLQPRTFLLKYNENGTITDAVDCALDPLSETKCTLKSFTVEKGIYQTSNFRVQPTESIVRFPNITNLCPFGEVFNATRFASVYAWNRKRISNCVADYSVLYNSASFSTFKCYGVSPTKLNDLCFTNVYADSFVIRGDEVRQIAPGQTGKIADYNYKLPDDFTGCVIAWNSNNLDSKVGGNYNYLYRLFRKSNLKPFERDISTEIYQAGSTPCNGVEGFNCYFPLQSYGFQPTNGVGYQPYRVVVLSFELLHAPATVCGPKKSTNLVKNKCVNFNFNGLTGTGVLTESNKKFLPFQQFGRDIADTTDAVRDPQTLEILDITPCSFGGVSVITPGTNTSNQVAVLYQGVNCTEVPVAIHADQLTPTWRVYSTGSNVFQTRAGCLIGAEHVNNSYECDIPIGAGICASYQTQTNSPRRARSVASQSIIAYTMSLGAENSVAYSNNSIAIPTNFTISVTTEILPVSMTKTSVDCTMYICGDSTECSNLLLQYGSFCTQLNRALTGIAVEQDKNTQEVFAQVKQIYKTPPIKDFGGFNFSQILPDPSKPSKRSFIEDLLFNKVTLADAGFIKQYGDCLGDIVARDLICAQKFNGLTVLPPLLTDEMIAQYTSALLAGTITSGWTFCAGAALQIPFAMQMAYRFNGIGVTQNVLYENQKLIANQFNSAIGKIQDSLSSTASALGKLQDVVNQNAQALNTLVKQLSSNFGAISSVLNDILSRLDKVEAEVQIDRLITGRLQSLQTYVTQQLIRAAEIRASANLAATKMSECVCGQSKRVDFCGKGYHLMSFPQSAPHGVVFLHVTYVPAQEKNFTTAPAICHDGKAHFPREGVFVSNGTHWFVTQRNFYEPQIITTDNTFVSGNCDVVIGIVNNTVYDPLQPELDSGGSGYIPEAPRDGQAYVRKDGEWVLLSTFL

SEQ ID NO: 10234 - protein, 1177 aa, Artificial Sequence
  SARS-CoV-2/USA/WA-UW291/2020__EPI_ISL_418076 spike protein (1-1147)(G889C_L1034C) Foldon construct
MFVFLVLLPLVSSQCVNLTTRTQLPPAYTNSFTRGVYYPDKVFRSSVLHSTQDLFLPFFSNVTWFHAIHVSGTNGTKRFDNPVLPFNDGVYFASTEKSNIIRGWIFGTTLDSKTQSLLIVNNATNVVIKVCEFQFCNDPFLGVYYHKNNKSWMESEFRVYSSANNCTFEYVSQPFLMDLEGKQGNFKNLREFVFKNIDGYFKIYSKHTPINLVRDLPQGFSALEPLVDLPIGINITRFQTLLALHRSYLTPGDSSSGWTAGAAAYYVGYLQPRTFLLKYNENGTITDAVDCALDPLSETKCTLKSFTVEKGIYQTSNFRVQPTESIVRFPNITNLCPFGEVFNATRFASVYAWNRKRISNCVADYSVLYNSASFSTFKCYGVSPTKLNDLCFTNVYADSFVIRGDEVRQIAPGQTGKIADYNYKLPDDFTGCVIAWNSNNLDSKVGGNYNYLYRLFRKSNLKPFERDISTEIYQAGSTPCNGVEGFNCYFPLQSYGFQPTNGVGYQPYRVVVLSFELLHAPATVCGPKKSTNLVKNKCVNFNFNGLTGTGVLTESNKKFLPFQQFGRDIADTTDAVRDPQTLEILDITPCSFGGVSVITPGTNTSNQVAVLYQGVNCTEVPVAIHADQLTPTWRVYSTGSNVFQTRAGCLIGAEHVNNSYECDIPIGAGICASYQTQTNSPRRARSVASQSIIAYTMSLGAENSVAYSNNSIAIPTNFTISVTTEILPVSMTKTSVDCTMYICGDSTECSNLLLQYGSFCTQLNRALTGIAVEQDKNTQEVFAQVKQIYKTPPIKDFGGFNFSQILPDPSKPSKRSFIEDLLFNKVTLADAGFIKQYGDCLGDIAARDLICAQKFNGLTVLPPLLTDEMIAQYTSALLAGTITSGWTFCAGAALQIPFAMQMAYRFNGIGVTQNVLYENQKLIANQFNSAIGKIQYSLSSTASALGKLQDVVNQNAQALNTLVKQLSSNFGAISSVLNDILSRLDKVEAEVQIDRLITGRLQSLQTYVTQQLIRAAEIRASANLAATKMSECVCGQSKRVDFCGKGYHLMSFPQSAPHGVVFLHVTYVPAQEKNFTTAPAICHDGKAHFPREGVFVSNGTHWFVTQRNFYEPQIITTDNTFVSGNCDVVIGIVNNTVYDPLQPELDSGGSGYIPEAPRDGQAYVRKDGEWVLLSTFL

SEQ ID NO: 10235 - protein, 1177 aa, Artificial Sequence; identical to SEQ ID NO: 10198
  SARS-CoV-2/Portugal/PT0034/2020__EPI_ISL_418019 spike protein (1-1147)(G889C_L1034C) Foldon construct

SEQ ID NO: 10236 - protein, 1177 aa, Artificial Sequence; identical to SEQ ID NO: 10190
  SARS-CoV-2/Iceland/202/2020__EPI_ISL_417750 spike protein (1-1147)(G889C_L1034C) Foldon construct

SEQ ID NO: 10237 - protein, 1177 aa, Artificial Sequence
  SARS-CoV-2/USA/WA-UW261/2020__EPI_ISL_418046 spike protein (1-1147)(G889C_L1034C) Foldon construct
MFVFLVLLPLVSSQCVNLTTRTQLPPAYTNSFTRGVYYPDKVFRSSVLHSTQDLFLPFFSNVTWFHAIHVSGTNGTKRFDNPVLPFNDGVYFASTEKSNIIRGWIFGTTLDSKTQSLLIVNNATNVVIKVCEFQFCNDPFLGVYYHKNNKSWMESEFRVYSSANNCTFEYVSQPFLMDLEGKQGNFKNLREFVFKNIDGYFKIYSKHTPINLVRDLPQGFSALEPLVDLPIGINITRFQTLLALHRSYLTPGDSSSGWTAGAAAYYVGYLQPRTFLLKYNENGTITDAVDCALDPLSETKCTLKSFTVEKGIYQTSNFRVQPTESIVRFPNITNLCPFGEVFNATRFTSVYAWNRKRISNCVADYSVLYNSASFSTFKCYGVSPTKLNDLCFTNVYADSFVIRGDEVRQIAPGQTGKIADYNYKLPDDFTGCVIAWNSNNLDSKVGGNYNYLYRLFRKSNLKPFERDISTEIYQAGSTPCNGVEGFNCYFPLQSYGFQPTNGVGYQPYRVVVLSFELLHAPATVCGPKKSTNLVKNKCVNFNFNGLTGTGVLTESNKKFLPFQQFGRDIADTTDAVRDPQTLEILDITPCSFGGVSVITPGTNTSNQVAVLYQDVNCTEVPVAIHADQLTPTWRVYSTGSNVFQTRAGCLIGAEHVNNSYECDIPIGAGICASYQTQTNSPRRARSVASQSIIAYTMSLGAENSVAYSNNSIAIPTNFTISVTTEILPVSMTKTSVDCTMYICGDSTECSNLLLQYGSFCTQLNRALTGIAVEQDKNTQEVFAQVKQIYKTPPIKDFGGFNFSQILPDPSKPSKRSFIEDLLFNKVTLADAGFIKQYGDCLGDIAARDLICAQKFNGLTVLPPLLTDEMIAQYTSALLAGTITSGWTFCAGAALQIPFAMQMAYRFNGIGVTQNVLYENQKLIANQFNSAIGKIQDSLSSTASALGKLQDVVNQNAQALNTLVKQLSSNFGAISSVLNDILSRLDKVEAEVQIDRLITGRLQSLQTYVTQQLIRAAEIRASANLAATKMSECVCGQSKRVDFCGKGYHLMSFPQSAPHGVVFLHVTYVPAQEKNFTTAPAICHDGKAHFPREGVFVSNGTHWFVTQRNFYEPQIITTDNTFVSGNCDVVIGIVNNTVYDPLQPELDSGGSGYIPEAPRDGQAYVRKDGEWVLLSTFL

SEQ ID NO: 10238 - protein, 1177 aa, Artificial Sequence
  SARS-CoV-2/Portugal/PT0035/2020__EPI_ISL_418020 spike protein (1-1147)(G889C_L1034C) Foldon construct
MFVFLVLLPLVSSQCVNLTTRTQLPPAYTNSFTRGVYYPDKVFRSSVLHSTQDLFLPFFSNVTWFHAIHVSGTNGTKRFDNPVLPFNDGVYFASTEKSNIIRGWIFGTTLDSKTQSLLIVNNATNVVIKVCEFQFCNDPFLGVYYHKNNKSWMESEFRVYSSANNCTFEYVSQPFLMDLEGKQGNFKNLREFVFKNIDGYFKIYSKHTPINLVRDLPQGFSALEPLVDLPIGINITRFQTLLALHRSYLTPGDSSSGWTAGAAAYYVGYLQPRTFLLKYNENGTITDAVDCALDPLSETKCTLKSFTVEKGIYQTSNFRVQPTESIVRFPNITNLCPFGEVFNATRFASVYAWNRKRISNCVADYSVLYNSASFSTFKCYGVSPTKLNDLCFTNVYADSFVIRGDEVRQIAPGQTGKIADYNYKLPDDFTGCVIAWNSNNLDSKVGGNYNYLYRLFRKSNLKPFERDISTEIYQAGSTPCNGVEGFNCYFPLQSYGFQPTNGVGYQPYRVVVLSFELLHAPATVCGPKKSTNLVKNKCVNFNFNGLTGTGVLTESNKKFLPFQQFGRDIADTTDAVRDPQTLEILDITPCSFGGVSVITPGTNTSNQVAVLYQDVNCTEVPVAIHADQLTPTWRVYSTGSNVFQTRAGCLIGAEHVNNSYECDIPIGAGICASYQTQTNSPRRARSVASQSIIAYTMSLGAENSVAYSNNSIAIPTNFTISVTTEILPVSMTKTSVDCTMYICGDSTECSNLLLQYGSFCTQLNRALTGIAVEQDKNTQEVFAQVKQIYKTPPIKDFGGFNFSQILPDPSKPSKRSFIEDLLFNKVTLADAGFIKQYGDCLGDISARDLICAQKFNGLTVLPPLLTDEMIAQYTSALLAGTITSGWTFCAGAALQIPFAMQMAYRFNGIGVTQNVLYENQKLIANQFNSAIGKIQDSLSSTASALGKLQDVVNQNAQALNTLVKQLSSNFGAISSVLNDILSRLDKVEAEVQIDRLITGRLQSLQTYVTQQLIRAAEIRASANLAATKMSECVCGQSKRVDFCGKGYHLMSFPQSAPHGVVFLHVTYVPAQEKNFTTAPAICHDGKAHFPREGVFVSNGTHWFVTQRNFYEPQIITTDNTFVSGNCDVVIGIVNNTVYDPLQPELDSGGSGYIPEAPRDGQAYVRKDGEWVLLSTFL

SEQ ID NO: 10239 - protein, 1177 aa, Artificial Sequence
  SARS-CoV-2/USA/NY-NYUMC7/2020__EPI_ISL_418192 spike protein (1-1147)(G889C_L1034C) Foldon construct
MFVFLVLLPLVSSQCVNLTTRTQLPPAYTNSFTRGVYYPDKVFRSSVLHSTQDLFLPFFSNVTWFHAIHVSGTNGTKRFDNPVLPFNDGVYFASTEKSNIIRGWIFGTTLDSKTQSLLIVNNATNVVIKVCEFQFCNDPFLGVYHHKNNKSWMESEFRVYSSANNCTFEYVSQPFLMDLEGKQGNFKNLREFVFKNIDGYFKIYSKHTPINLVRDLPQGFSALEPLVDLPIGINITRFQTLLALHRSYLTPGDSSSGWTAGAAAYYVGYLQPRTFLLKYNENGTITDAVDCALDPLSETKCTLKSFTVEKGIYQTSNFRVQPTESIVRFPNITNLCPFGEVFNATRFASVYAWNRKRISNCVADYSVLYNSASFSTFKCYGVSPTKLNDLCFTNVYADSFVIRGDEVRQIAPGQTGKIADYNYKLPDDFTGCVIAWNSNNLDSKVGGNYNYLYRLFRKSNLKPFERDISTEIYQAGSTPCNGVEGFNCYFPLQSYGFQPTNGVGYQPYRVVVLSFELLHAPATVCGPKKSTNLVKNKCVNFNFNGLTGTGVLTESNKKFLPFQQFGRDIADTTDAVRDPQTLEILDITPCSFGGVSVITPGTNTSNQVAVLYQGVNCTEVPVAIHADQLTPTWRVYSTGSNVFQTRAGCLIGAEHVNNSYECDIPIGAGICASYQTQTNSPRRARSVASQSIIAYTMSLGAENSVAYSNNSIAIPTNFTISVTTEILPVSMTKTSVDCTMYICGDSTECSNLLLQYGSFCTQLNRALTGIAVEQDKNTQEVFAQVKQIYKTPPIKDFGGFNFSQILPDPSKPSKRSFIEDLLFNKVTLADAGFIKQYGDCLGDIAARDLICAQKFNGLTVLPPLLTDEMIAQYTSALLAGTITSGWTFCAGAALQIPFAMQMAYRFNGIGVTQNVLYENQKLIANQFNSAIGKIQDSLSSTASALGKLQDVVNQNAQALNTLVKQLSSNFGAISSVLNDILSRLDKVEAEVQIDRLITGRLQSLQTYVTQQLIRAAEIRASANLAATKMSECVCGQSKRVDFCGKGYHLMSFPQSAPHGVVFLHVTYVPAQEKNFTTAPAICHDGKAHFPREGVFVSNGTHWFVTQRNFYEPQIITTDNTFVSGNCDVVIGIVNNTVYDPLQPELDSGGSGYIPEAPRDGQAYVRKDGEWVLLSTFL

SEQ ID NO: 10240 - protein, 1177 aa, Artificial Sequence
  SARS-CoV-2/Iceland/189/2020__EPI_ISL_417709 spike protein (1-1147)(G889C_L1034C) Foldon construct
MFVFLVLLPLVSSQCVNLTTRTQLPPAYTNSFTRGVYYPDKVFRSSVLHSTQDLFLPFFSNVTWFHAIHVSGTNGTKRFDNPVLPFNDGVYFASTEKSNIIRGWIFGTTLDSKTQSLLIVNNATNVVIKVCEFQFCNDPFLGVYYHKNNKSWMESEFRVYSSANNCTFEYVSQPFLMDLEGKQGNFKNLREFVFKNIDGYFKIYSKHTPINLVRDLPQGFSALEPLVDLPIGINITRFQTLLALHRSYLTPGDSSSGWTAGAAAYYVGYLQPRTFLLKYNENGTITDAVDCALDPLSETKCTLKSFTVEKGIYQTSNFRVQPTESIVRFPNITNLCPFGEVFNATRFASVYAWNRKRISNCVADYSVLYNSASFSTFKCYGVSPTKLNDLCFTNVYADSFVIRGDEVRQIAPGQTGKIADYNYKLPDDFTGCVIAWNSNNLDSKVGGNYNYLYRLFRKSNLKPFERDISTEIYQAGSTPCNGVEGFNCYFPLQSYGFQPTNGVGYQPYRVVVLSFELLHAPATVCGPKKSTNLVKNKCVNFNFNGLTGTGVLTESNKKFLPFQQFGRDIADTTDAVRDPQTLEILDITPCSFGGVSVITPGTNTSNQVAVLYQGVNCTEVPVAIHADQLTPTWRVYSTGSNVFQTRAGCLIGAEHVNNSYECDIPIGAGICASYQTQTNSPRRARSVASQSIIAYTMSLGAENSVAYSNNSIAIPTNFTISVTTEILPVSMTKTSVDCTMYICGDSTECSNLLLQYGSFCTQLNRALTGIAVEQDKNTQEVFAQVKQIYKTPPIKDFGGFNFSQILPDPSKPSKRSFIEDLLFNKVTLADAGFTKQYGDCLGDIAARDLICAQKFNGLTVLPPLLTDEMIAQYTSALLAGTITSGWTFCAGAALQIPFAMQMAYRFNGIGVTQNVLYENQKLIANQFNSAIGKIQDSLSSTASALGKLQDVVNQNAQALNTLVKQLSSNFGAISSVLNDILSRLDKVEAEVQIDRLITGRLQSLQTYVTQQLIRAAEIRASANLAATKMSECVCGQSKRVDFCGKGYHLMSFPQSAPHGVVFLHVTYVPAQEKNFTTAPAICHDGKAHFPREGVFVSNGTHWFVTQRNFYEPQIITTDNTFVSGNCDVVIGIVNNTVYDPLQPELDSGGSGYIPEAPRDGQAYVRKDGEWVLLSTFL

SEQ ID NO: 10241 - protein, 1177 aa, Artificial Sequence
  SARS-CoV-2/Australia/NSW56/2020__EPI_ISL_417408 spike protein (1-1147)(G889C_L1034C) Foldon construct
MFVFLVLLPLVSSQCVNLTTRTQLPPAYTNSFTRGVYYPDKVFRSSVLHSTQDLFLPFFSNVTWFHAIHVSGTNGTKRFDNPVLPFNDGVYFASTEKSNIIRGWIFGTTLDSKTQSLLIVNNATNVVIKVCEFQFCNDPFLGVYYHKNNKSWMESEFRVYSSANNCTFEYVSQPFLMDLEGKQGNFKNLREFVFKNIDGYFKIYSKHTPINLVRDLPQGFSALEPLVDLPIGINITRFQTLLALHRSYLTPGDSSSGWTAGAAAYYVGYLQPRTFLLKYNENGTITDAVDCALDPLSETKCTLKSFTVEKGIYQTSNFRVQPTESIVRFPNITNLCPFGEVFNATRFASVYAWNRKRISNCVADYSVLYNSASFSTFKCYGVSPTKLNDLCFTNVYADSFVIRGDEVRQIAPGQTGKIADYNYKLPDDFTGCVIAWNSNNLDSKVGGNYNYLYRLFRKSNLKPFERDISTEIYQAGSTPCNGVEGFNCYFPLQSYGFQPTNGVGYQPYRVVVLSFELLHAPATVCGPKKSTNLVKNKCVNFNFNGLTGTGVLTESNKKFLPFQQFGRDIADTTDAVRDPQTLEILDITPCSFGGVSVITPGTNTSNQVAVLYQDVNCTEVPVAIHADQLTPTWRVYSTGSNVFQTRAGCLIGAEHVNNSYECDIPIGAGICASYQTQTNSPRRARSVASQSIIAYTMSLGAENSVAYSNNSIAIPTNFTISVTTEILPVSMTKTSVDCTMYICGDSTECSNLLLQYGSFCTQLNRALTGIAVEQDKNTQEVFAQVKQIYKTPPIKDFGGFNFSQILPDSSKPSKRSFIEDLLFNKVTLADAGFIKQYGDCLGDIAARDLICAQKFNGLTVLPPLLTDEMIAQYTSALLAGTITSGWTFCAGAALQIPFAMQMAYRFNGIGVTQNVLYENQKLIANQFNSAIGKIQDSLSSTASALGKLQDVVNQNAQALNTLVKQLSSNFGAISSVLNDILSRLDKVEAEVQIDRLITGRLQSLQTYVTQQLIRAAEIRASANLAATKMSECVCGQSKRVDFCGKGYHLMSFPQSAPHGVVFLHVTYVPAQEKNFTTAPAICHDGKAHFPREGVFVSNGTHWFVTQRNFYEPQIITTDNTFVSGNCDVVIGIVNNTVYDPLQPELDSGGSGYIPEAPRDGQAYVRKDGEWVLLSTFL

SEQ ID NO: 10242 - protein, 1177 aa, Artificial Sequence
  SARS-CoV-2/Iceland/280/2020__EPI_ISL_417608 spike protein (1-1147)(G889C_L1034C) Foldon construct
MFVFLVLLPLVSSQCVNLTTRTQLPPAYTNSFTRGVYYPDKVFRSSVLHSTQDLFLPFFSNVTWFHAIHVSGTNGTKRFDNPVLPFNDGVYFASTEKSNIIRGWIFGTTLDSKTQSLLIVNNATNVVIKVCEFQFCNDPFLGVYYHKNNKSWMESEFRVYSSANNCTFEYVSQPFLMDLEGKQGNFKNLREFVFKNIDGYFKIYSKHTPINLVRDLPQGFSALEPLVDLPIGINITRFQTLLALHRSYLTPGDSSSGWTAGAAAYYVGYLQPRTFLLKYNENGTITDAVDCALDPLSETKCTLKSFTVEKGIYQTSNFRVQPTESIVRFPNITNLCPFGEVFNATRFASVYAWNRKRISNCVADYSVLYNSASFSTFKCYGVSPTKLNDLCFTNVYADSFVIRGDEVRQIAPGQTGKIADYNYKLPDDFTGCVIAWNSNNLDSKVGGNYNYLYRLFRKSNLKPFERDISTEIYQAGSTPCNGVEGFNCYFPLQSYGFQPTNGVGYQPYRVVVLSFELLHAPATVCGPKKSTNLVKNKCVNFNFNGLTGTGVLTESNKKFLPFQQFGRDIADTTDAVRDPQTLEILDITPCSFGGVSVITPGTNTSNQVAVLYQGVNCTEVPVAIHADQLTPTWRVYSTGSNVFQTRAGCLIGAEHVNNSYECDIPIGAGICASYHTQTNSPRRARSVASQSIIAYTMSLGAENSVAYSNNSIAIPTNFTISVTTEILPVSMTKTSVDCTMYICGDSTECSNLLLQYGSFCTQLNRALTGIAVEQDKNTQEVFAQVKQIYKTPPIKDFGGFNFSQILPDPSKPSKRSFIEDLLFNKVTLADAGFIKQYGDCLGDIAARDLICAQKFNGLTVLPPLLTDEMIAQYTSALLAGTITSGWTFCAGAALQIPFAMQMAYRFNGIGVTQNVLYENQKLIANQFNSAIGKIQDSLSSTASALGKLQDVVNQNAQALNTLVKQLSSNFGAISSVLNDILSRLDKVEAEVQIDRLITGRLQSLQTYVTQQLIRAAEIRASANLAATKMSECVCGQSKRVDFCGKGYHLMSFPQSAPHGVVFLHVTYVPAQEKNFTTAPAICHDGKAHFPREGVFVSNGTHWFVTQRNFYEPQIITTDNTFVSGNCDVVIGIVNNTVYDPLQPELDSGGSGYIPEAPRDGQAYVRKDGEWVLLSTFL

SEQ ID NO: 10243 - protein, 1177 aa, Artificial Sequence; identical to SEQ ID NO: 10198
  SARS-CoV-2/Iceland/247/2020__EPI_ISL_417575 spike protein (1-1147)(G889C_L1034C) Foldon construct

SEQ ID NO: 10244 - protein, 1177 aa, Artificial Sequence
  SARS-CoV-2/Iceland/238/2020__EPI_ISL_417566 spike protein (1-1147)(G889C_L1034C) Foldon construct
MFVFLVLLPLVSSQCVNLTTRTQLPPAYTNSFTRGVYYPDKVFRSSVLHSTQDLFLPFFSNVTWFHAIHVSGTNGTKRFDNPVLPFNDGVYFASTEKSNIIRGWIFGTTLDSKTQSLLIVNNATNVVIKVCEFQFCNDPFLGVYYHKNNKSWMESEFRVYSSANNCTFEYVSQPFLMDLEGKQGNFKNLREFVFKNIDGYFKIYSKHTPINLVRDLPQGFSALEPLVDLPIGINITRFQTLLALHRSYLTPGDSSSGWTAGAAAYYVGYLQPRTFLLKYNENGTITDAVDCALDPLSETKCTLKSFTVEKGIYQTSNFRVQPTESIVRFPNITNLCPFGEVFNATRFASVYAWNRKRISNCVADYSVLYNSASFSTFKCYGVSPTKLNDLCFTNVYADSFVIRGDEVRQIAPGQTGKIADYNYKLPDDFTGCVIAWNSNNLDSKVGGNYNYLYRLFRKSNLKPFERDISTEIYQAGSTPCNGVEGFNCYFPLQSYGFQPTNGVGYQPYRVVVLSFELLHAPATVCGPKKSTNLVKNKCVNFNFNGLTGTGVLTESNKKFLPFQQFGRDIADTTDAVRDPQTLEILDITPCSFGGVSVITPGTNTSNQVAVLYQGVNCTEVPVAIHADQLTPTWRVYSTGSNVFQTRAGCLIGAEHVNNSYECDIPIGAGICASYQTQTNSPRRARSVASQSIIAYTMSLGAENSVAYSNNSIAIPTNFTISVTTEILPVSMTKTSVDCTMYICGDSTECSNLLLQYGSFCTQLNRALTGIAVEQDKNTQEVFAQVKQIYKTPPIKDFGGFNFSQILPDPSKPSKRSFIEDLLFNKVTLADVGFIKQYGDCLGDIAARDLICAQKFNGLTVLPPLLTDEMIAQYTSALLAGTITSGWTFCAGAALQIPFAMQMAYRFNGIGVTQNVLYENQKLIANQFNSAIGKIQDSLSSTASALGKLQDVVNQNAQALNTLVKQLSSNFGAISSVLNDILSRLDKVEAEVQIDRLITGRLQSLQTYVTQQLIRAAEIRASANLAATKMSECVCGQSKRVDFCGKGYHLMSFPQSAPHGVVFLHVTYVPAQEKNFTTAPAICHDGKAHFPREGVFVSNGTHWFVTQRNFYEPQIITTDNTFVSGNCDVVIGIVNNTVYDPLQPELDSGGSGYIPEAPRDGQAYVRKDGEWVLLSTFL

SEQ ID NO: 10245 - protein, 1177 aa, Artificial Sequence
  SARS-CoV-2/Greece/16/2020__EPI_ISL_418265 spike protein (1-1147)(G889C_L1034C) Foldon construct
MFVFLVLLPLVSSQCVNLTTRTQLPPAYTNSFTRGVYYPDKVFRSSVLHSTQDLFLPFFSNVTWFHAIHVSGTNGTKRFDNPVLPFNDGVYFASTEKSNIIRGWIFGTTLDSKTQSLLIVNNATNVVIKVCEFQFCNDPFLGVYYHKNNKSWMESEFRVYSSANNCTFEYVSQPFLMDLEGKQGNFKNLREFVFKNVDGYFKIYSKHTPINLVRDLPQGFSALEPLVDLPIGINITRFQTLLALHRSYLTPGDSSSGWTAGAAAYYVGYLQPRTFLLKYNENGTITDAVDCALDPLSETKCTLKSFTVEKGIYQTSNFRVQPTESIVRFPNITNLCPFGEVFNATRFASVYAWNRKRISNCVADYSVLYNSASFSTFKCYGVSPTKLNDLCFTNVYADSFVIRGDEVRQIAPGQTGKIADYNYKLPDDFTGCVIAWNSNNLDSKVGGNYNYLYRLFRKSNLKPFERDISTEIYQAGSTPCNGVEGFNCYFPLQSYGFQPTNGVGYQPYRVVVLSFELLHAPATVCGPKKSTNLVKNKCVNFNFNGLTGTGVLTESNKKFLPFQQFGRDIADTTDAVRDPQTLEILDITPCSFGGVSVITPGTNTSNQVAVLYQDVNCTEVPVAIHADQLTPTWRVYSTGSNVFQTRAGCLIGAEHVNNSYECDIPIGAGICASYQTQTNSPRRARSVASQSIIAYTMSLGAENSVAYSNNSIAIPTNFTISVTTEILPVSMTKTSVDCTMYICGDSTECSNLLLQYGSFCTQLNRALTGIAVEQDKNTQEVFAQVKQIYKTPPIKDFGGFNFSQILPDPSKPSKRSFIEDLLFNKVTLADAGFIKQYGDCLGDIAARDLICAQKFNGLTVLPPLLTDEMIAQYTSALLAGTITSGWTFCAGAALQIPFAMQMAYRFNGIGVTQNVLYENQKLIANQFNSAIGKIQDSLSSTASALGKLQDVVNQNAQALNTLVKQLSSNFGAISSVLNDILSRLDKVEAEVQIDRLITGRLQSLQTYVTQQLIRAAEIRASANLAATKMSECVCGQSKRVDFCGKGYHLMSFPQSAPHGVVFLHVTYVPAQEKNFTTAPAICHDGKAHFPREGVFVSNGTHWFVTQRNFYEPQIITTDNTFVSGNCDVVIGIVNNTVYDPLQPELDSGGSGYIPEAPRDGQAYVRKDGEWVLLSTFL

SEQ ID NO: 10246 - protein, 1177 aa, Artificial Sequence
  SARS-CoV-2/Iceland/319/2020__EPI_ISL_417648 spike protein (1-1147)(G889C_L1034C) Foldon construct
MFVFLVLLPLVSSQCVNLTTRTQLPPAYTNSFTRGVYYPDKVFRSSVLHSTQDLFLPFFSNVTWFHAIHVSGTNGTKRFDNPVLPFNDGVYFASTEKSNIIRGWIFGTTLDSKTQSLLIVNNATNVVIKVCEFQFCNDPFLGVYYHKNNKSWMESEFRVYSSANNCTFEYVSQPFLIDLEGKQGNFKNLREFVFKNIDGYFKIYSKHTPINLVRDLPQGFSALEPLVDLPIGINITRFQTLLALHRSYLTPGDSSSGWTAGAAAYYVGYLQPRTFLLKYNENGTITDAVDCALDPLSETKCTLKSFTVEKGIYQTSNFRVQPTESIVRFPNITNLCPFGEVFNATRFASVYAWNRKRISNCVADYSVLYNSASFSTFKCYGVSPTKLNDLCFTNVYADSFVIRGDEVRQIAPGQTGKIADYNYKLPDDFTGCVIAWNSNNLDSKVGGNYNYLYRLFRKSNLKPFERDISTEIYQAGSTPCNGVEGFNCYFPLQSYGFQPTNGVGYQPYRVVVLSFELLHAPATVCGPKKSTNLVKNKCVNFNFNGLTGTGVLTESNKKFLPFQQFGRDIADTTDAVRDPQTLEILDITPCSFGGVSVITPGTNTSNQVAVLYQGVNCTEVPVAIHADQLTPTWRVYSTGSNVFQTRAGCLIGAEHVNNSYECDIPIGAGICASYQTQTNSPRRARSVASQSIIAYTMSLGAENSVAYSNNSIAIPTNFTISVTTEILPVSMTKTSVDCTMYICGDSTECSNLLLQYGSFCTQLNRALTGIAVEQDKNTQEVFAQVKQIYKTPPIKDFGGFNFSQILPDPSKPSKRSFIEDLLFNKVTLADAGFIKQYGDCLGDIAARDLICAQKFNGLTVLPPLLTDEMIAQYTSALLAGTITSGWTFCAGAALQIPFAMQMAYRFNGIGVTQNVLYENQKLIANQFNSAIGKIQDSLSSTASALGKLQDVVNQNAQALNTLVKQLSSNFGAISSVLNDILSRLDKVEAEVQIDRLITGRLQSLQTYVTQQLIRAAEIRASANLAATKMSECVCGQSKRVDFCGKGYHLMSFPQSAPHGVVFLHVTYVPAQEKNFTTAPAICHDGKAHFPREGVFVSNGTHWFVTQRNFYEPQIITTDNTFVSGNCDVVIGIVNNTVYDPLQPELDSGGSGYIPEAPRDGQAYVRKDGEWVLLSTFL

SEQ ID NO: 10247 - protein, 1177 aa, Artificial Sequence
  SARS-CoV-2/Congo/94/2020__EPI_ISL_417947 spike protein (1-1147)(G889C_L1034C) Foldon construct
MFVFLVLLPLVSSQCVNLTTRTQLPPAYTNSFTRGVYYPDKVFRSSVLHSTQDLFLPFFSNVTWFHAIHVSGTNGTKRFDNPVLPFNDGVYFASTEKSNIIRGWIFGTTLDSKTQSLLIVNNATNVVIKVCEFQFCNDPFLGVYYHKNNKSWMESEFRVYSSANNCTFEYVSQPFLMDLEGKQGNFKNLREFVFKNIDGYFKIYSKHTPINLVRDLPQGFSALEPLVDLPIGINITRFQTLLALHRSYLTPGDSSSGWTAGAAAYYVGYLQPRTFLLKYNENGTITDAVDCALDPLSETKCTLKSFTVEKGIYQTSNFRVQPTESIVRFPNITNLCPFGEVFNATRFASVYAWNRKRISNCVADYSVLYNSASFSTFKCYGVSPTKLNDLCFTNVYADSFVIRGDEVRQIAPGQTGKIADYNYKLPDDFTGCVIAWNSNNLDSKVGGNYNYLYRLFRKSNLKPFERDISTEIYQAGSTPCNGVEGFNCYFPLQSYGFQPTNGVGYQPYRVVVLSFELLHAPATVCGPKKSTNLVKNKCVNFNFNGLTGTGVLTESNKKFLPFQQFGRDIADTTDAVRDPQTLEILDITPCSFGGVSVITPGTNTSNQVAVLYQGVNCTEVPVAIHADQLTPTWRVYSTGSNVFQTRAGCLIGAEHVNNSYECDIPIGAGICASYQTQTNSPRRARSVASQSIIAYTMSLGAENSVAYSNNSIAIPTNFTISVTTEILPVSMTKTSVDCTMYICGDSTECSNLLLQYGSFCTQLNRALTGIAVEQDKNTQEVFAQVKQIYKTPPIKDFGGFNFSQILPDPSKPSKRSFIEDILFNKVTLADAGFIKQYGDCLGDIAARDLICAQKFNGLTVLPPLLTDEMIAQYTSALLAGTITSGWTFCAGAALQIPFAMQMAYRFNGIGVTQNVLYENQKLIANQFNSAIGKIQDSLSSTASALGKLQDVVNQNAQALNTLVKQLSSNFGAISSVLNDILSRLDKVEAEVQIDRLITGRLQSLQTYVTQQLIRAAEIRASANLAATKMSECVCGQSKRVDFCGKGYHLMSFPQSAPHGVVFLHVTYVPAQEKNFTTAPAICHDGKAHFPREGVFVSNGTHWFVTQRNFYEPQIITTDNTFVSGNCDVVIGIVNNTVYDPLQPELDSGGSGYIPEAPRDGQAYVRKDGEWVLLSTFL

SEQ ID NO: 10248 - protein, 1177 aa, Artificial Sequence
  SARS-CoV-2/Congo/158/2020__EPI_ISL_417950 spike protein (1-1147)(G889C_L1034C) Foldon construct
MFVFLVLLPLVSSQCVNLTTRTQLPPAYTNSFTRGVYYPDKVFRSSVLHSTQDLFLPFFSNVTWFHAIHVSGTNGTKRFDNPVLPFNDGVYFASTEKSNIIRGWIFGTTLDSKTQSLLIVNNATNVVIKVCEFQFCNDPFLGVYYHKNNKSWMESEFRVYSSANNCTFEYVSQPFLMDLEGKQGNFKNLREFVFKNIDGYFKIYSKHTPINLVRDLPQGFSALEPLVDLPIGINITRFQTLLALHRSYLTPGDSSSGWTAGAAAYYVGYLQPRTFLLKYNENGTITDAVDCALDPLSETKCTLKSFTVEKGIYQTSNFRVQPTESIVRFPNITNLCPFGEVFNATRFASVYAWNRKRISNCVADYSVLYNSASFSTFKCYGVSPTKLNDLCFTNVYADSFVIRGDEVRQIAPGQTGKIADYNYKLPDDFTGCVIAWNSNNLDSKVGGNYNYLYRLFRKSNLKPFERDISTEIYQAGSTPCNGVEGFNCYFPLQSYGFQPTNGVGYQPYRVVVLSFELLHAPATVCGPKKSTNLVKNKCVNFNFNGLTGTGVLTESNKKFLPFQQFGRDIADTTDAVRDPQTLEILDITPCSFGGVSVITPGTNTSNQVAVLYQDVNCTEVPVAIHADQLTPTWRVYSTGSNVFQTRAGCLIGAEHVNNSYECDIPIGAGICASYQTQTNSPRRARSVASQSIIAYTMSLGAENSVAYSNNSIAIPTNFTISVTTEILPVSMTKTSVDCTMYICGDSTECSNLLLQYGSFCTQLNRALTGIAVEQDKNTQEVFAQVKQIYKTPPIKDFGGFNFSQILPDPSKPSKRSFIEDLLFNKVTLADAGFIKQYGDCLGDIAARDLICAQKFNGLTVLPPLLTDEMIAQYTSALLAGTITSGWTFCAGAALQIPFAMQMAYRFNGIGVTQNVLYENQKLIANQFNSAIGKIQDSLSSTASALGKLQDVVNQNAQALNTLVKQLSSNFGAISSVLNDILSRLDKVEAEVQIDRLITGRLQSLQTYVTQQLIRAAEIRASANLAATKMSECVCGQSKRVDFCGKGYHLMSFPQSAPHGVVFLHVTYVPAQEKNFTTAPAICHDGKAHFPREGVFVSNGTHWFVTQRNFYEPQIITTDNTFLSGNCDVVIGIVNNTVYDPLQPELDSGGSGYIPEAPRDGQAYVRKDGEWVLLSTFL

SEQ ID NO: 10249 - protein, 1177 aa, Artificial Sequence
  SARS-CoV-2/USA/UT-00034/2020__EPI_ISL_417977 spike protein (1-1147)(G889C_L1034C) Foldon construct
MFVFLVLLPLVSSQCVNLTTRTQLPPAYTNSFTRGVYYPDKVFRSSVLHSTQDLFLPFFSNVTWFHAIHVSGTNGTKRFDNPVLPFNDGVYFASTEKSNIIRGWIFGTTLDSKTQSLLIVNNATNVVIKVCEFQFCNDPFLGVYYYKNNKSWMESEFRVYSSANNCTFEYVSQPFLMDLEGKQGNFKNLREFVFKNIDGYFKIYSKHTPINLVRDLPQGFSALEPLVDLPIGINITRFQTLLALHRSYLTPGDSSSGWTAGAAAYYVGYLQPRTFLLKYNENGTITDAVDCALDPLSETKCTLKSFTVEKGIYQTSNFRVQPTESIVRFPNITNLCPFGEVFNATRFASVYAWNRKRISNCVADYSVLYNSASFSTFKCYGVSPTKLNDLCFTNVYADSFVIRGDEVRQIAPGQTGKIADYNYKLPDDFTGCVIAWNSNNLDSKVGGNYNYLYRLFRKSNLKPFERDISTEIYQAGSTPCNGVEGFNCYFPLQSYGFQPTNGVGYQPYRVVVLSFELLHAPATVCGPKKSTNLVKNKCVNFNFNGLTGTGVLTESNKKFLPFQQFGRDIADTTDAVRDPQTLEILDITPCSFGGVSVITPGTNTSNQVAVLYQGVNCTEVPVAIHADQLTPTWRVYSTGSNVFQTRAGCLIGAEHVNNSYECDIPIGAGICASYQTQTNSPRRARSVASQSIIAYTMSLGAENSVAYSNNSIAIPTNFTISVTTEILPVSMTKTSVDCTMYICGDSTECSNLLLQYGSFCTQLNRALTGIAVEQDKNTQEVFAQVKQIYKTPPIKDFGGFNFSQILPDPSKPSKRSFIEDLLFNKVTLADAGFIKQYGDCLGDIAARDLICAQKFNGLTVLPPLLTDEMIAQYTSALLAGTITSGWTFCAGAALQIPFAMQMAYRFNGIGVTQNVLYENQKLIANQFNSAIGKIQDSLSSTASALGKLQDVVNQNAQALNTLVKQLSSNFGAISSVLNDILSRLDKVEAEVQIDRLITGRLQSLQTYVTQQLIRAAEIRASANLAATKMSECVCGQSKRVDFCGKGYHLMSFPQSAPHGVVFLHVTYVPAQEKNFTTAPAICHDGKAHFPREGVFVSNGTHWFVTQRNFYEPQIITTDNTFVSGNCDVVIGIVNNTVYDPLQPELDSGGSGYIPEAPRDGQAYVRKDGEWVLLSTFL

SEQ ID NO: 10250 - protein, 1177 aa, Artificial Sequence
  SARS-CoV-2/USA/UT-00033/2020__EPI_ISL_417976 spike protein (1-1147)(G889C_L1034C) Foldon construct
MFVFLVLLPLVSSQCVNLTTRTQLPPAYTNSFTRGVYYPDKVFRSSVLHSTQDLFLPFFSNVTWFHAIHVSGTNGTKRFDNPVLPFNDGVYFASTEKSNIIRGWIFGTTLDSKTQSLLIVNNATNVVIKVCEFQFCNDPFLGVYYHKNNKSWMESEFRVYSSANNCTFEYVSQPFLMDLEGKQGNFKNLREFVFKNIDGYFKIYSKHTPINLVRDLPQGFSALEPLVDLPIGINITRFQTLLALHRSYLTPGDSSSGLTAGAAAYYVGYLQPRTFLLKYNENGTITDAVDCALDPLSETKCTLKSFTVEKGIYQTSNFRVQPTESIVRFPNITNLCPFGEVFNATRFASVYAWNRKRISNCVADYSVLYNSASFSTFKCYGVSPTKLNDLCFTNVYADSFVIRGDEVRQIAPGQTGKIADYNYKLPDDFTGCVIAWNSNNLDSKVGGNYNYLYRLFRKSNLKPFERDISTEIYQAGSTPCNGVEGFNCYFPLQSYGFQPTNGVGYQPYRVVVLSFELLHAPATVCGPKKSTNLVKNKCVNFNFNGLTGTGVLTESNKKFLPFQQFGRDIADTTDAVRDPQTLEILDITPCSFGGVSVITPGTNTSNQVAVLYQGVNCTEVPVAIHADQLTPTWRVYSTGSNVFQTRAGCLIGAEHVNNSYECDIPIGAGICASYQTQTNSPRRARSVASQSIIAYTMSLGAENSVAYSNNSIAIPTNFTISVTTEILPVSMTKTSVDCTMYICGDSTECSNLLLQYGSFCTQLNRALTGIAVEQDKNTQEVFAQVKQIYKTPPIKDFGGFNFSQILPDPSKPSKRSFIEDLLFNKVTLADAGFIKQYGDCLGDIAARDLICAQKFNGLTVLPPLLTDEMIAQYTSALLAGTITSGWTFCAGAALQIPFAMQMAYRFNGIGVTQNVLYENQKLIANQFNSAIGKIQDSLSSTASALGKLQDVVNQNAQALNTLVKQLSSNFGAISSVLNDILSRLDKVEAEVQIDRLITGRLQSLQTYVTQQLIRAAEIRASANLAATKMSECVCGQSKRVDFCGKGYHLMSFPQSAPHGVVFLHVTYVPAQEKNFTTAPAICHDGKAHFPREGVFVSNGTHWFVTQRNFYEPQIITTDNTFVSGNCDVVIGIVNNTVYDPLQPELDSGGSGYIPEAPRDGQAYVRKDGEWVLLSTFL

SEQ ID NO: 10251 - protein, 1177 aa, Artificial Sequence
  SARS-CoV-2/USA/WI-13/2020__EPI_ISL_417516 spike protein (1-1147)(G889C_L1034C) Foldon construct
MFVFLVLLPLVSSQCVNLTTRTQLPPAYTNSFTRGVYYPDKVFRSSVLHSTQDLFLPFFSNVTWFHAIHVSGTNGTKRFDNPVLPFNDGVYFASTEKSNIIRGWIFGTTLDSKTQSLLIVNNATNVVIKVCEFQFCNDPFLGVYYHKNNKSWMESEFRVYSSANNCTFEYVSQPFLMDLEGKQGNFKNLREFVFKNIDGYFKIYSKHTPINLVRDLPQGFSALEPLVDLPIGINITRFQTLLALHRSYLTPGDSSSGWTAGAAAYYVGYLQPRTFLLKYNENGTITDAVDCALDPLSETKCTLKSFTVEKGIYQTSNFRVLPTESIVRFPNITNLCPFGEVFNATRFASVYAWNRKRISNCVADYSVLYNSASFSTFKCYGVSPTKLNDLCFTNVYADSFVIRGDEVRQIAPGQTGKIADYNYKLPDDFTGCVIAWNSNNLDSKVGGNYNYLYRLFRKSNLKPFERDISTEIYQAGSTPCNGVEGFNCYFPLQSYGFQPTNGVGYQPYRVVVLSFELLHAPATVCGPKKSTNLVKNKCVNFNFNGLTGTGVLTESNKKFLPFQQFGRDIADTTDAVRDPQTLEILDITPCSFGGVSVITPGTNTSNQVAVLYQGVNCTEVPVAIHADQLTPTWRVYSTGSNVFQTRAGCLIGAEHVNNSYECDIPIGAGICASYQTQTNSPRRARSVASQSIIAYTMSLGAENSVAYSNNSIAIPTNFTISVTTEILPVSMTKTSVDCTMYICGDSTECSNLLLQYGSFCTQLNRALTGIAVEQDKNTQEVFAQVKQIYKTPPIKDFGGFNFSQILPDPSKPSKRSFIEDLLFNKVTLADAGFIKQYGDCLGDIAARDLICAQKFNGLTVLPPLLTDEMIAQYTSALLAGTITSGWTFCAGAALQIPFAMQMAYRFNGIGVTQNVLYENQKLIANQFNSAIGKIQDSLSSTASALGKLQDVVNQNAQALNTLVKQLSSNFGAISSVLNDILSRLDKVEAEVQIDRLITGRLQSLQTYVTQQLIRAAEIRASANLAATKMSECVCGQSKRVDFCGKGYHLMSFPQSAPHGVVFLHVTYVPAQEKNFTTAPAICHDGKAHFPREGVFVSNGTHWFVTQRNFYEPQIITTDNTFVSGNCDVVIGIVNNTVYDPLQPELDSGGSGYIPEAPRDGQAYVRKDGEWVLLSTFL

SEQ ID NO: 10252 - protein, 1176 aa, Artificial Sequence
  SARS-CoV-2/India/1-27/2020__EPI_ISL_413522 spike protein (1-1146)(G888C_L1033C) Foldon construct
MFVFLVLLPLVSSQCVNLTTRTQLPPAYTNSFTRGVYYPDKVFRSSVLHSTQDLFLPFFSNVTWFHAIHVSGTNGTKRFDNPVLPFNDGVYFASTEKSNIIRGWIFGTTLDSKTQSLLIVNNATNVVIKVCEFQFCNDPFLGVYHKNNKSWMESEFRVYSSANNCTFEYVSQPFLMDLEGKQGNFKNLREFVFKNIDGYFKIYSKHTPINLVRDLPQGFSALEPLVDLPIGINITRFQTLLALHRSYLTPGDSSSGWTAGAAAYYVGYLQPRTFLLKYNENGTITDAVDCALDPLSETKCTLKSFTVEKGIYQTSNFRVQPTESIVRFPNITNLCPFGEVFNATRFASVYAWNRKRISNCVADYSVLYNSASFSTFKCYGVSPTKLNDLCFTNVYADSFVIRGDEVIQIAPGQTGKIADYNYKLPDDFTGCVIAWNSNNLDSKVGGNYNYLYRLFRKSNLKPFERDISTEIYQAGSTPCNGVEGFNCYFPLQSYGFQPTNGVGYQPYRVVVLSFELLHAPATVCGPKKSTNLVKNKCVNFNFNGLTGTGVLTESNKKFLPFQQFGRDIADTTDAVRDPQTLEILDITPCSFGGVSVITPGTNTSNQVAVLYQDVNCTEVPVAIHADQLTPTWRVYSTGSNVFQTRAGCLIGAEHVNNSYECDIPIGAGICASYQTQTNSPRRARSVASQSIIAYTMSLGAENSVAYSNNSIAIPTNFTISVTTEILPVSMTKTSVDCTMYICGDSTECSNLLLQYGSFCTQLNRALTGIAVEQDKNTQEVFAQVKQIYKTPPIKDFGGFNFSQILPDPSKPSKRSFIEDLLFNKVTLADAGFIKQYGDCLGDIAARDLICAQKFNGLTVLPPLLTDEMIAQYTSALLAGTITSGWTFCAGAALQIPFAMQMAYRFNGIGVTQNVLYENQKLIANQFNSAIGKIQDSLSSTASALGKLQDVVNQNAQALNTLVKQLSSNFGAISSVLNDILSRLDKVEAEVQIDRLITGRLQSLQTYVTQQLIRAAEIRASANLAATKMSECVCGQSKRVDFCGKGYHLMSFPQSAPHGVVFLHVTYVPAQEKNFTTAPAICHDGKAHFPREGVFVSNGTHWFVTQRNFYEPQIITTDNTFVSGNCDVVIGIVNNTVYDPLQPELDSGGSGYIPEAPRDGQAYVRKDGEWVLLSTFL

SEQ ID NO: 10253 - protein, 1171 aa, Artificial Sequence
  SARS-CoV-2/pangolin/Guangxi/P4L/2017__EPI_ISL_410538 spike protein (1-1141)(G883C_L1028C) Foldon construct
MFVFLFVLPLVSSQCVNLTTRTGIPPGYTNSSTRGVYYPDKVFRSSILHLTQDLFLPFFSNVTWFNTINYQGGFKKFDNPVLPFNDGVYFASTEKSNIIRGWIFGTTLDARTQSLLIVNNATNVVIKVCEFQFCTDPFLGVYYHNNNKTWVENEFRVYSSANNCTFEYISQPFLMDLEGKQGNFKNLREFVFKNVDGYFKIYSKHTPIDLVRDLPRGFAALEPLVDLPIGINITRFQTLLALHRSYLTPGNLESGWTTGAAAYYVGYLQQRTFLLSYNQNGTITDAVDCSLDPLSETKCTLKSLTVEKGIYQTSNFRVQPTISIVRFPNITNLCPFGEVFNASKFASVYAWNRKRISNCVADYSVLYNSTSFSTFKCYGVSPTKLNDLCFTNVYADSFVVKGDEVRQIAPGQTGVIADYNYKLPDDFTGCVIAWNSVKQDALTGGNYGYLYRLFRKSKLKPFERDISTEIYQAGSTPCNGQVGLNCYYPLERYGFHPTTGVNYQPFRVVVLSFELLNGPATVCGPKLSTTLVKDKCVNFNFNGLTGTGVLTTSKKQFLPFQQFGRDISDTTDAVRDPQTLEILDITPCSFGGVSVITPGTNTSNQVAVLYQDVNCTEVPMAIHAEQLTPAWRVYSAGANVFQTRAGCLVGAEHVNNSYECDIPVGAGICASYHSMSSLRSVNQRSIIAYTMSLGAENSVAYSNNSIAIPTNFTISVTTEILPVSMTKTSVDCTMYICGDSIECSNLLLQYGSFCTQLNRALTGIAVEQDKNTQEVFAQVKQIYKTPPIKDFGGFNFSQILPDPSKPSKRSFIEDLLFNKVTLADAGFIKQYGDCLGDIAARDLICAQKFNGLTVLPPLLTDEMIAQYTSALLAGTITSGWTFCAGAALQIPFAMQMAYRFNGIGVTQNVLYENQKLIANQFNSAIGKIQDSLSSTASALGKLQDVVNQNAQALNTLVKQLSSNFGAISSVLNDILSRLDKVEAEVQIDRLITGRLQSLQTYVTQQLIRAAEIRASANLAATKMSECVCGQSKRVDFCGKGYHLMSFPQSAPHGVVFLHVTYVPAQEKNFTTAPAICHEGKAHFPREGVFVSNGTHWFITQRNFYEPQIITTDNTFVSGSCDVVIGIVNNTVYDPLQPELDSGGSGYIPEAPRDGQAYVRKDGEWVLLSTFL

SEQ ID NO: 10254 - protein, 1171 aa, Artificial Sequence
  SARS-CoV-2/pangolin/Guangxi/P5L/2017__EPI_ISL_410540 spike protein (1-1141)(G883C_L1028C) Foldon construct
MFVFLFVLPLVSSQCVNLTTRTGIPPGYTNSSTRGVYYPDKVFRSSILHLTQDLFLPFFSNVTWFNTINYQGGFKKFDNPVLPFNDGVYFASTEKSNIIRGWIFGTTLDARTQSLLIVNNATNVVIKVCEFQFCTDPFLGVYYHNNNKTWVENEFRVYSSANNCTFEYISQPFLMDLEGKQGNFKNLREFVFKNVDGYFKIYSKHTPIDLVRDLPRGFAALEPLVDLPIGINITRFQTLLALHRSYLTPGKLESGWTTGAAAYYVGYLQQRTFLLSYNQNGTITDAVDCSLDPLSETKCTLKSLTVEKGIYQTSNFRVQPTISIVRFPNITNLCPFGEVFNASKFASVYAWNRKRISNCVADYSVLYNSTSFSTFKCYGVSPTKLNDLCFTNVYADSFVVKGDEVRQIAPGQTGVIADYNYKLPDDFTGCVIAWNSVKQDALTGGNYGYLYRLFRKSKLKPFERDISTEIYQAGSTPCNGQVGLNCYYPLERYGFHPTTGVNYQPFRVVVLSFELLNGPATVCGPKLSTTLVKDKCVNFNFNGLTGTGVLTTSKKQFLPFQQFGRDISDTTDAVRDPQTLEILDITPCSFGGVSVITPGTNTSNQVAVLYQDVNCTEVPMAIHAEQLTPAWRVYSAGANVFQTRAGCLVGAEHVNNSYECDIPVGAGICASYHSMSSFRSVNQRSIIAYTMSLGAENSVAYSNNSIAIPTNFTISVTTEILPVSMTKTSVDCTMYICGDSIECSNLLLQYGSFCTQLNRALTGIAVEQDKNTQEVFAQVKQIYKTPPIKDFGGFNFSQILPDPSKPSKRSFIEDLLFNKVTLADAGFIKQYGDCLGDIAARDLICAQKFNGLTVLPPLLTDEMIAQYTSALLAGTITSGWTFCAGAALQIPFAMQMAYRFNGIGVTQNVLYENQKLIANQFNSAIGKIQDSLSSTASALGKLQDVVNQNAQALNTLVKQLSSNFGAISSVLNDILSRLDKVEAEVQIDRLITGRLQSLQTYVTQQLIRAAEIRASANLAATKMSECVCGQSKRVDFCGKGYHLMSFPQSAPHGVVFLHVTYVPAQEKNFTTAPAICHEGKAHFPREGVFVSNGTHWFITQRNFYEPQIITTDNTFVSGSCDVVIGIVNNTVYDPLQPELDSGGSGYIPEAPRDGQAYVRKDGEWVLLSTFL

SEQ ID NO: 10255 - protein, 1171 aa, Artificial Sequence
  SARS-CoV-2/pangolin/Guangxi/P5E/2017__EPI_ISL_410541 spike protein (1-1141)(G883C_L1028C) Foldon construct
MFVFLFVLPLVSSQCVNLTTRTGIPPGYTNSSTRGVYYPDKVFRSSILHLTQDLFLPFFSNVTWFNTITYQGGSKKFDNPVLPFNDGVYFASTEKSNIIRGWIFGTTLDARTQSLLIVNNATNVVIKVCEFQFCTDPFLGVYYHNNNKTWVENEFRVYSSANNCTFEYISQPFLMDLEGKQGNFKNLREFVFKNVDGYFKIYSKHTPIDLVRDLPRGFAALEPLVDLPIGINITRFQTLLALHRSYLTPGKLESGWTTGAAAYYVGYLQQRTFLLSYNQNGTITDAVDCSLDPLSETKCTLKSLTVEKGIYQTSNFRVQPTISIVRFPNITNLCPFGEVFNASKFASVYAWNRKRISNCVADYSVLYNSTSFSTFKCYGVSPTKLNDLCFTNVYADSFVVKGDEVRQIAPGQTGVIADYNYKLPDDFTGCVIAWNSVKQDALTGDNYGYLYRLFRKSKLKPFERDISTEIYQAGSTPCNGQVGLNCYYPLERYGFHPTTGVNYQPFRVVVLSFELLNGPATVCGPKLSTTLVKDKCVNFNFNGLTGTGVLTTSKKQFLPFQQFGRDISDTTDAVRDPQTLEILDITPCSFGGVSVITPGTNTSNQVAVLYQDVNCTEVPMAIHAEQLTPAWRVYSAGANVFQTRAGCLVGAEHVNNSYECDIPVGAGICASYHSMSSFRSVNQRSIIAYTMSLGAENSVAYSNNSIAIPTNFTISVTTEILPVSMTKTSVDCTMYICGDSIECSNLLLQYGSFCTQLNRALTGIAVEQDKNTQEVFAQVKQIYKTPPIKDFGGFNFSQILPDPSKPSKRSFIEDLLFNKVTLADAGFIKQYGDCLGDIAARDLICAQKFNGLTVLPPLLTDEMIAQYTSALLAGTITSGWTFCAGAALQIPFAMQMAYRFNGIGVTQNVLYENQKLIANQFNSAIGKIQDSLSSTASALGKLQDVVNQNAQALNTLVKQLSSNFGAISSVLNDILSRLDKVEAEVQIDRLITGRLQSLQTYVTQQLIRAAEIRASANLAATKMSECVCGQSKRVDFCGKGYHLMSFPQSAPHGVVFLHVTYVPAQEKNFTTAPAICHEGKAHFPREGVFVSNGTHWFITQRNFYEPQIITTDNTFVSGSCDVVIGIVNNTVYDPLQPELDSGGSGYIPEAPRDGQAYVRKDGEWVLLSTFL

SEQ ID NO: 10256 - protein, 1169 aa, Artificial Sequence
  SARS-CoV-2/pangolin/Guangxi/P1E/2017__EPI_ISL_410539 spike protein (1-1139)(G881C_L1026C) Foldon construct
MFVFLFVLPLVSSQCVNLTTRTGIQPGYTNSSTRGVYYPDKVFRSSILHLTQDLFLPFFSNVTWFNTINYQGGFKKFDNPVLPFNDGVYFASTEKSNIIRGWIFGTTLDARTQSLLIVNNATNVVIKVCEFQFCTDPFLGVYYHNNNKTWVENEFRVYSSANNCTFEYISQPFLMDLEGKQGNFKNLREFVFKNVDGYFKIYSKHTPIDLVRDLPRGFAALEPLVDLPIGINITRFQTLLALHRSYLTPGKLESGWTTGAAAYYVGYLQQRTFLLSYNQNGTITDAVDCSLDPLSETKCTLKSLTVEKGIYQTSNFRVQPTISIVRFPNITNLCPFGEVFNASKFASVYAWNRKRISNCVADYSVLYNSTSFSTFKCYGVSPTKLNDLCFTNVYADSFVVKGDEVRQIAPGQTGVIADYNYKLPDDFTGCVIAWNSVKQDALTGGNYLYRLFRKSKLKPFERDISTEIYQAGSTPCNGQVGLNCYYPLERYGFHPTTGVNYQPFRVVVLSFELLNGPATVCGPKLSTTLVKDKCVNFNFNGLTGTGVLTTSKKQFLPFQQFGRDISDTTDAVRDPQTLEILDITPCSFGGVSVITPGTNTSNQVAVLYQDVNCTEVPMAIHAEQLTPAWRVYSAGANVFQTRAGCLVGAEHVNNSYECDIPVGAGICASYHSMSSLRSVNQRSIIAYTMSLGAENSVAYSNNSIAIPTNFTISVTTEILPVSMTKTSVDCTMYICGDSIECSNLLLQYGSFCTQLNRALTGIAVEQDKNTQEVFAQVKQIYKTPPIKDFGGFNFSQILPDPSKPSKRSFIEDLLFNKVTLADAGFIKQYGDCLGDIAARDLICAQKFNGLTVLPPLLTDEMIAQYTSALLAGTITSGWTFCAGAALQIPFAMQMAYRFNGIGVTQNVLYENQKLIANQFNSAIGKIQDSLSSTASALGKLQDVVNQNAQALNTLVKQLSSNFGAISSVLNDILSRLDKVEAEVQIDRLITGRLQSLQTYVTQQLIRAAEIRASANLAATKMSECVCGQSKRVDFCGKGYHLMSFPQSAPHGVVFLHVTYVPAQEKNFTTAPAICHEGKAHFPREGVFVSNGTHWFITQRNFYEPQIITTDNTFVSGSCDVVIGIVNNTVYDPLQPELDSGGSGYIPEAPRDGQAYVRKDGEWVLLSTFL

SEQ ID NO: 10257 - protein, 1177 aa, Artificial Sequence
  SARS-CoV-2/Wuhan/WIV05/2019__EPI_ISL_402128 spike protein (1-1147)(I909C_Y1047C) Foldon construct
MFVFLVLLPLVSSQCVNLTTRTQLPPAYTNSFTRGVYYPDKVFRSSVLHSTQDLFLPFFSNVTWFHAIHVSGTNGTKRFDNPVLPFNDGVYFASTEKSNIIRGWIFGTTLDSKTQSLLIVNNATNVVIKVCEFQFCNDPFLGVYYHKNNKSWMESEFRVYSSANNCTFEYVSQPFLMDLEGKQGNFKNLREFVFKNIDGYFKIYSKHTPINLVRDLPQGFSALEPLVDLPIGINITRFQTLLALHRSYLTPGDSSSGWTAGAAAYYVGYLQPRTFLLKYNENGTITDAVDCALDPLSETKCTLKSFTVEKGIYQTSNFRVQPTESIVRFPNITNLCPFGEVFNATRFASVYAWNRKRISNCVADYSVLYNSASFSTFKCYGVSPTKLNDLCFTNVYADSFVIRGDEVRQIAPGQTGKIADYNYKLPDDFTGCVIAWNSNNLDSKVGGNYNYLYRLFRKSNLKPFERDISTEIYQAGSTPCNGVEGFNCYFPLQSYGFQPTNGVGYQPYRVVVLSFELLHAPATVCGPKKSTNLVKNKCVNFNFNGLTGTGVLTESNKKFLPFQQFGRDIADTTDAVRDPQTLEILDITPCSFGGVSVITPGTNTSNQVAVLYQDVNCTEVPVAIHADQLTPTWRVYSTGSNVFQTRAGCLIGAEHVNNSYECDIPIGAGICASYQTQTNSPRRARSVASQSIIAYTMSLGAENSVAYSNNSIAIPTNFTISVTTEILPVSMTKTSVDCTMYICGDSTECSNLLLQYGSFCTQLNRALTGIAVEQDKNTQEVFAQVKQIYKTPPIKDFGGFNFSQILPDPSKPSKRSFIEDLLFNKVTLADAGFIKQYGDCLGDIAARDLICAQKFNGLTVLPPLLTDEMIAQYTSALLAGTITSGWTFGAGAALQIPFAMQMAYRFNGCGVTQNVLYENQKLIANQFNSAIGKIQDSLSSTASALGKLQDVVNQNAQALNTLVKQLSSNFGAISSVLNDILSRLDKVEAEVQIDRLITGRLQSLQTYVTQQLIRAAEIRASANLAATKMSECVLGQSKRVDFCGKGCHLMSFPQSAPHGVVFLHVTYVPAQEKNFTTAPAICHDGKAHFPREGVFVSNGTHWFVTQRNFYEPQIITTDNTFVSGNCDVVIGIVNNTVYDPLQPELDSGGSGYIPEAPRDGQAYVRKDGEWVLLSTFL

SEQ ID NO: 10258 - protein, 1173 aa, Artificial Sequence
  SARS-CoV-2/bat/Yunnan/RaTG13/2013__EPI_ISL_402131 spike protein (1-1143)(I905C_Y1043C) Foldon construct
MFVFLVLLPLVSSQCVNLTTRTQLPPAYTNSSTRGVYYPDKVFRSSVLHLTQDLFLPFFSNVTWFHAIHVSGTNGIKRFDNPVLPFNDGVYFASTEKSNIIRGWIFGTTLDSKTQSLLIVNNATNVVIKVCEFQFCNDPFLGVYYHKNNKSWMESEFRVYSSANNCTFEYVSQPFLMDLEGKQGNFKNLREFVFKNIDGYFKIYSKHTPINLVRDLPPGFSALEPLVDLPIGINITRFQTLLALHRSYLTPGDSSSGWTAGAAAYYVGYLQPRTFLLKYNENGTITDAVDCALDPLSETKCTLKSFTVEKGIYQTSNFRVQPTDSIVRFPNITNLCPFGEVFNATTFASVYAWNRKRISNCVADYSVLYNSTSFSTFKCYGVSPTKLNDLCFTNVYADSFVITGDEVRQIAPGQTGKIADYNYKLPDDFTGCVIAWNSKHIDAKEGGNFNYLYRLFRKANLKPFERDISTEIYQAGSKPCNGQTGLNCYYPLYRYGFYPTDGVGHQPYRVVVLSFELLNAPATVCGPKKSTNLVKNKCVNFNFNGLTGTGVLTESNKKFLPFQQFGRDIADTTDAVRDPQTLEILDITPCSFGGVSVITPGTNASNQVAVLYQDVNCTEVPVAIHADQLTPTWRVYSTGSNVFQTRAGCLIGAEHVNNSYECDIPIGAGICASYQTQTNSRSVASQSIIAYTMSLGAENSVAYSNNSIAIPTNFTISVTTEILPVSMTKTSVDCTMYICGDSTECSNLLLQYGSFCTQLNRALTGIAVEQDKNTQEVFAQVKQIYKTPPIKDFGGFNFSQILPDPSKPSKRSFIEDLLFNKVTLADAGFIKQYGDCLGDIAARDLICAQKFNGLTVLPPLLTDEMIAQYTSALLAGTITSGWTFGAGAALQIPFAMQMAYRFNGCGVTQNVLYENQKLIANQFNSAIGKIQDSLSSTASALGKLQDVVNQNAQALNTLVKQLSSNFGAISSVLNDILSRLDKVEAEVQIDRLITGRLQSLQTYVTQQLIRAAEIRASANLAATKMSECVLGQSKRVDFCGKGCHLMSFPQSAPHGVVFLHVTYVPAQEKNFTTAPAICHDGKAHFPREGVFVSNGTHWFVTQRNFYEPQIITTDNTFVSGSCDVVIGIVNNTVYDPLQPELDSGGSGYIPEAPRDGQAYVRKDGEWVLLSTFL

SEQ ID NO: 10259 - protein, 1177 aa, Artificial Sequence
  SARS-CoV-2/Wuhan/HBCDC-HB-01/2019__EPI_ISL_402132 spike protein (1-1147)(I909C_Y1047C) Foldon construct
MFVFLVLLPLVSSQCVNLTTRTQLPPAYTNSITRGVYYPDKVFRSSVLHSTQDLFLPFFSNVTWFHAIHVSGTNGTKRFDNPVLPFNDGVYFASTEKSNIIRGWIFGTTLDSKTQSLLIVNNATNVVIKVCEFQFCNDPFLGVYYHKNNKSWMESEFRVYSSANNCTFEYVSQPFLMDLEGKQGNFKNLREFVFKNIDGYFKIYSKHTPINLVRDLPQGFSALEPLVDLPIGINITRFQTLLALHRSYLTPGDSSSGWTAGAAAYYVGYLQPRTFLLKYNENGTITDAVDCALDPLSETKCTLKSFTVEKGIYQTSNFRVQPTESIVRFPNITNLCPFGEVFNATRFASVYAWNRKRISNCVADYSVLYNSASFSTFKCYGVSPTKLNDLCFTNVYADSFVIRGDEVRQIAPGQTGKIADYNYKLPDDFTGCVIAWNSNNLDSKVGGNYNYLYRLFRKSNLKPFERDISTEIYQAGSTPCNGVEGFNCYFPLQSYGFQPTNGVGYQPYRVVVLSFELLHAPATVCGPKKSTNLVKNKCVNFNFNGLTGTGVLTESNKKFLPFQQFGRDIADTTDAVRDPQTLEILDITPCSFGGVSVITPGTNTSNQVAVLYQDVNCTEVPVAIHADQLTPTWRVYSTGSNVFQTRAGCLIGAEHVNNSYECDIPIGAGICASYQTQTNSPRRARSVASQSIIAYTMSLGAENSVAYSNNSIAIPTNFTISVTTEILPVSMTKTSVDCTMYICGDSTECSNLLLQYGSFCTQLNRALTGIAVEQDKNTQEVFAQVKQIYKTPPIKDFGGFNFSQILPDPSKPSKRSFIEDLLFNKVTLADAGFIKQYGDCLGDIAARDLICAQKFNGLTVLPPLLTDEMIAQYTSALLAGTITSGWTFGAGAALQIPFAMQMAYRFNGCGVTQNVLYENQKLIANQFNSAIGKIQDSLSSTASALGKLQDVVNQNAQALNTLVKQLSSNFGAISSVLNDILSRLDKVEAEVQIDRLITGRLQSLQTYVTQQLIRAAEIRASANLAATKMSECVLGQSKRVDFCGKGCHLMSFPQSAPHGVVFLHVTYVPAQEKNFTTAPAICHDGKAHFPREGVFVSNGTHWFVTQRNFYEPQIITTDNTFVSGNCDVVIGIVNNTVYDPLQPELDSGGSGYIPEAPRDGQAYVRKDGEWVLLSTFL

SEQ ID NO: 10260 - protein, 1177 aa, Artificial Sequence
  SARS-CoV-2/Guangdong/20SF028/2020__EPI_ISL_403936 spike protein (1-1147)(I909C_Y1047C) Foldon construct
MFVFLVLLPLVSSQCVNLTTRTQLPPAYTNSFTRGVYYPDKVFRSSVLYSTQDLFLPFFSNVTWFHAIHVSGTNGTKRFDNPVLPFNDGVYFASTEKSNIIRGWIFGTTLDSKTQSLLIVNNATNVVIKVCEFQFCNDPFLGVYYHKNNKSWMESEFRVYSSANNCTFEYVSQPFLMDLEGKQGNFKNLREFVFKNIDGYFKIYSKHTPINLVRDLPQGFSALEPLVDLPIGINITRFQTLLALHRSYLTPGDSSSGWTAGAAAYYVGYLQPRTFLLKYNENGTITDAVDCALDPLSETKCTLKSFTVEKGIYQTSNFRVQPTESIVRFPNITNLCPFGEVFNATRFASVYAWNRKRISNCVADYSVLYNSASFSTFKCYGVSPTKLNDLCFTNVYADSFVIRGDEVRQIAPGQTGKIADYNYKLPDDFTGCVIAWNSNNLDSKVGGNYNYLYRLFRKSNLKPFERDISTEIYQAGSTPCNGVEGFNCYFPLQSYGFQPTNGVGYQPYRVVVLSFELLHAPATVCGPKKSTNLVKNKCVNFNFNGLTGTGVLTESNKKFLPFQQFGRDIADTTDAVRDPQTLEILDITPCSFGGVSVITPGTNTSNQVAVLYQDVNCTEVPVAIHADQLTPTWRVYSTGSNVFQTRAGCLIGAEHVNNSYECDIPIGAGICASYQTQTNSPRRARSVASQSIIAYTMSLGAENSVAYSNNSIAIPTNFTISVTTEILPVSMTKTSVDCTMYICGDSTECSNLLLQYGSFCTQLNRALTGIAVEQDKNTQEVFAQVKQIYKTPPIKDFGGFNFSQILPDPSKPSKRSFIEDLLFNKVTLADAGFIKQYGDCLGDIAARDLICAQKFNGLTVLPPLLTDEMIAQYTSALLAGTITSGWTFGAGAALQIPFAMQMAYRFNGCGVTQNVLYENQKLIANQFNSAIGKIQDSLSSTASALGKLQDVVNQNAQALNTLVKQLSSNFGAISSVLNDILSRLDKVEAEVQIDRLITGRLQSLQTYVTQQLIRAAEIRASANLAATKMSECVLGQSKRVDFCGKGCHLMSFPQSAPHGVVFLHVTYVPAQEKNFTTAPAICHDGKAHFPREGVFVSNGTHWFVTQRNFYEPQIITTDNTFVSGNCDVVIGIVNNTVYDPLQPELDSGGSGYIPEAPRDGQAYVRKDGEWVLLSTFL

SEQ ID NO: 10261 - protein, 1177 aa, Artificial Sequence
  SARS-CoV-2/Shenzhen/SZTH-001/2020__EPI_ISL_406592 spike protein (1-1147)(I909C_Y1047C) Foldon construct
MFVFLVLLPLVSSQCVNLTTRTQLPPAYTNSFTRGVYYPDKVFRSSVLHSTQDLFLPFFSNVTWFHAIHVSGTNGTKRFDNPVLPFNDGVYFASTEKSNIIRGWIFGTTLDSKTQSLLIVNNATNVVIKVCEFQFCNDPFLGVYYHKNNKSWMESEFRVYSSANNCTFEYVSQPFLMDLEGKQGNFKNLREFVFKNIDGYFKIYSKHTPINLVRDLPQGFSALEPLVDLPIGINITRFQTLLALHRSYLTPGDSSSGWTAGAAAYYVGYLQPRTFLLKYNENGTITDAVDCALDPLSETKCTLKSFTVEKGIYQTSNFRVQPTESIVRFPNITNLCPFGEVFNATRFASVYAWNRKRISNCVADYSVLYNSASFSTFKCYGVSPTKLNDLCFTNVYADSFVIRGDEVRQIAPGQTGKIADYNYKLPDDFTGCVIAWNSNNLDSKVGGNYNYLYRLFRKSNLKPFERDISTEIYQAGSTPCNGVEGFNCYFPLQSYGFQPTNGVGYQPYRVVVLSFELLHAPATVCGPKKSTNLVKNKCVNFNFNGLTGTGVLTESNKKFLPFQQFGRDIADTTDAVRDPQTLEILDITPCSFGGVSVITPGTNTSNQVAVLYQDVNCTEVPVAIHADQLTPTWRVYSTGSNVFQTRAGCLIGAEHVNNSYECDIPIGAGICASYQTQTNSPRRARSVASQSIIAYTMSLGAENSVAYSNNSIAIPTNFTISVTTEILPVSMTKTSVDCTMYICGDSTECSNLLLQYGSFCTQLNRALTGIAVEQDKNTQEVFAQVKQIYKTPPIKDFGGFNFSQILPDPSKPSKRSFIEDLLFNKVTLADAGFIKQYGDCLGDIAARDLICAQKFNGLTVLPPLLTDEMIAQYTSALLAGTITSGWTFGAGAALQIPFAMQMAYRFNGCGVTQNVLYENQKLIANQFNSAIGKIQDSLSSTASALGKLQDVVNQNAQALNTLVKQLSSNFGAISSVLNDILSRLDKVEAEVQIDRLITGRLQSLQTYVTQQLIRAAEIRASANLAATKMSECVLGQSKRVDFCGKGCHLMSFPQSAPHGVVFLHVTYVPAQEKNFTTAPAICHDGKAHFPREGVFVSNGTHWFVTQRNFYEPQIITTDNTFVSGNCDVLIGIVNNTVYDPLQPELDSGGSGYIPEAPRDGQAYVRKDGEWVLLSTFL

SEQ ID NO: 10262 - protein, 1177 aa, Artificial Sequence
  SARS-CoV-2/Shenzhen/SZTH-004/2020__EPI_ISL_406595 spike protein (1-1147)(I909C_Y1047C) Foldon construct
MFVFLVLLPLVSSQCVNLTTRTQLPPAYTNSFTRGVYYPDKVFRSSVLHSTQDLFLPFFSNVTWFHAIHVSGTNGTKRFDNPVLPFNDGVYFASTEKSNIIRGWIFGTTLDSKTQSLLIVNNATNVVIKVCEFQFCNDPFLGVYYHKNNKSWMESEFRVYSSANNCTFEYVSQPFLMDLEGKQGNFKNLREFVFKNIDGYFKIYSKHTPINLVRDLPQGFSALEPLVDLPIGINITRFQTLLALHRSYLTPGDSSSGWTAGAAAYYVGYLQPRTFLLKYNENGTITDAVDCALDPLSETKCTLKSFTVEKGIYQTSNFRVQPTESIVRFPNITNLCPFGEVFNATRFASVYAWDRKRISNCVAYYSVLYNSASFSTFKCYGVSPTKLNDLCFTNVYADSFVIRGDEVRQIAPGQTGKIADYNYKLPDDFTGCVIAWNSNNLDSKVGGNYNYLYRLFRKSNLKPFERDISTEIYQAGSTPCNGVEGFNCYFPLQSYGFQPTNGVGYQPYRVVVLSFELLHAPATVCGPKKSTNLVKNKCVNFNFNGLTGTGVLTESNKKFLPFQQFGRDIADTTDAVRDPQTLEILDITPCSFGGVSVITPGTNTSNQVAVLYQDVNCTEVPVAIHADQLTPTWRVYSTGSNVFQTRAGCLIGAEHVNNSYECDIPIGAGICASYQTQTNSPRRARSVASQSIIAYTMSLGAENSVAYSNNSIAIPTNFTISVTTEILPVSMTKTSVDCTMYICGDSTECSNLLLQYGSFCTQLNRALTGIAVEQDKNTQEVFAQVKQIYKTPPIKDFGGFNFSQILPDPSKPSKRSFIEDLLFNKVTLADAGFIKQYGDCLGDIAARDLICAQKFNGLTVLPPLLTDEMIAQYTSALLAGTITSGWTFGAGAALQIPFAMQMAYRFNGCGVTQNVLYENQKLIANQFNSAIGKIQDSLSSTASALGKLQDVVNQNAQALNTLVKQLSSNFGAISSVLNDILSRLDKVEAEVQIDRLITGRLQSLQTYVTQQLIRAAEIRASANLAATKMSECVLGQSKRVDFCGKGCHLMSFPQSAPHGVVFLHVTYVPAQEKNFTTAPAICHDGKAHFPREGVFVSNGTHWFVTQRNFYEPQIITTDNTFVSGNCDVVIGIVNNTVYDPLQPELDSGGSGYIPEAPRDGQAYVRKDGEWVLLSTFL

SEQ ID NO: 10263 - protein, 1177 aa, Artificial Sequence
  SARS-CoV-2/France/IDF0372/2020__EPI_ISL_406596 spike protein (1-1147)(I909C_Y1047C) Foldon construct
MFVFLVLLPLVSSQCVNLTTRTQLPPAYTNSFTRGVYYPDKVFRSSVLHSTQDLFLPFFSNVTWFHAIHVSGTNGTKRFDNPVLPFNDGVYFASTEKSNIIRGWIFGTTLDSKTQSLLIVNNATNVVIKVCEFQFCNDPFLGVYYHKNNKSWMESEFRVYSSANNCTFEYVSQPFLMDLEGKQGNFKNLREFVFKNIDGYFKIYSKHTPINLVRDLPQGFSALEPLVDLPIGINITRFQTLLALHRSYLTPGDSSSGWTAGAAAYYVGYLQPRTFLLKYNENGTITDAVDCALDPLSETKCTLKSFTVEKGIYQTSNFRVQPTESIVRFPNITNLCPFGEVFNATRFASVYAWNRKRISNCVADYSFLYNSASFSTFKCYGVSPTKLNDLCFTNVYADSFVIRGDEVRQIAPGQTGKIADYNYKLPDDFTGCVIAWNSNNLDSKVGGNYNYLYRLFRKSNLKPFERDISTEIYQAGSTPCNGVEGFNCYFPLQSYGFQPTNGVGYQPYRVVVLSFELLHAPATVCGPKKSTNLVKNKCVNFNFNGLTGTGVLTESNKKFLPFQQFGRDIADTTDAVRDPQTLEILDITPCSFGGVSVITPGTNTSNQVAVLYQDVNCTEVPVAIHADQLTPTWRVYSTGSNVFQTRAGCLIGAEHVNNSYECDIPIGAGICASYQTQTNSPRRARSVASQSIIAYTMSLGAENSVAYSNNSIAIPTNFTISVTTEILPVSMTKTSVDCTMYICGDSTECSNLLLQYGSFCTQLNRALTGIAVEQDKNTQEVFAQVKQIYKTPPIKDFGGFNFSQILPDPSKPSKRSFIEDLLFNKVTLADAGFIKQYGDCLGDIAARDLICAQKFNGLTVLPPLLTDEMIAQYTSALLAGTITSGWTFGAGAALQIPFAMQMAYRFNGCGVTQNVLYENQKLIANQFNSAIGKIQDSLSSTASALGKLQDVVNQNAQALNTLVKQLSSNFGAISSVLNDILSRLDKVEAEVQIDRLITGRLQSLQTYVTQQLIRAAEIRASANLAATKMSECVLGQSKRVDFCGKGCHLMSFPQSAPHGVVFLHVTYVPAQEKNFTTAPAICHDGKAHFPREGVFVSNGTHWFVTQRNFYEPQIITTDNTFVSGNCDVVIGIVNNTVYDPLQPELDSGGSGYIPEAPRDGQAYVRKDGEWVLLSTFL

SEQ ID NO: 10264 - protein, 1177 aa, Artificial Sequence
  SARS-CoV-2/Australia/VIC01/2020__EPI_ISL_406844 spike protein (1-1147)(I909C_Y1047C) Foldon construct
MFVFLVLLPLVSSQCVNLTTRTQLPPAYTNSFTRGVYYPDKVFRSSVLHSTQDLFLPFFSNVTWFHAIHVSGTNGTKRFDNPVLPFNDGVYFASTEKSNIIRGWIFGTTLDSKTQSLLIVNNATNVVIKVCEFQFCNDPFLGVYYHKNNKSWMESEFRVYSSANNCTFEYVSQPFLMDLEGKQGNFKNLREFVFKNIDGYFKIYSKHTPINLVRDLPQGFSALEPLVDLPIGINITRFQTLLALHRRYLTPGDSSSGWTAGAAAYYVGYLQPRTFLLKYNENGTITDAVDCALDPLSETKCTLKSFTVEKGIYQTSNFRVQPTESIVRFPNITNLCPFGEVFNATRFASVYAWNRKRISNCVADYSVLYNSASFSTFKCYGVSPTKLNDLCFTNVYADSFVIRGDEVRQIAPGQTGKIADYNYKLPDDFTGCVIAWNSNNLDSKVGGNYNYLYRLFRKSNLKPFERDISTEIYQAGSTPCNGVEGFNCYFPLQSYGFQPTNGVGYQPYRVVVLSFELLHAPATVCGPKKSTNLVKNKCVNFNFNGLTGTGVLTESNKKFLPFQQFGRDIADTTDAVRDPQTLEILDITPCSFGGVSVITPGTNTSNQVAVLYQDVNCTEVPVAIHADQLTPTWRVYSTGSNVFQTRAGCLIGAEHVNNSYECDIPIGAGICASYQTQTNSPRRARSVASQSIIAYTMSLGAENSVAYSNNSIAIPTNFTISVTTEILPVSMTKTSVDCTMYICGDSTECSNLLLQYGSFCTQLNRALTGIAVEQDKNTQEVFAQVKQIYKTPPIKDFGGFNFSQILPDPSKPSKRSFIEDLLFNKVTLADAGFIKQYGDCLGDIAARDLICAQKFNGLTVLPPLLTDEMIAQYTSALLAGTITSGWTFGAGAALQIPFAMQMAYRFNGCGVTQNVLYENQKLIANQFNSAIGKIQDSLSSTASALGKLQDVVNQNAQALNTLVKQLSSNFGAISSVLNDILSRLDKVEAEVQIDRLITGRLQSLQTYVTQQLIRAAEIRASANLAATKMSECVLGQSKRVDFCGKGCHLMSFPQSAPHGVVFLHVTYVPAQEKNFTTAPAICHDGKAHFPREGVFVSNGTHWFVTQRNFYEPQIITTDNTFVSGNCDVVIGIVNNTVYDPLQPELDSGGSGYIPEAPRDGQAYVRKDGEWVLLSTFL

SEQ ID NO: 10265 - protein, 1177 aa, Artificial Sequence
  SARS-CoV-2/Germany/BavPat1/2020__EPI_ISL_406862 spike protein (1-1147)(I909C_Y1047C) Foldon construct
MFVFLVLLPLVSSQCVNLTTRTQLPPAYTNSFTRGVYYPDKVFRSSVLHSTQDLFLPFFSNVTWFHAIHVSGTNGTKRFDNPVLPFNDGVYFASTEKSNIIRGWIFGTTLDSKTQSLLIVNNATNVVIKVCEFQFCNDPFLGVYYHKNNKSWMESEFRVYSSANNCTFEYVSQPFLMDLEGKQGNFKNLREFVFKNIDGYFKIYSKHTPINLVRDLPQGFSALEPLVDLPIGINITRFQTLLALHRSYLTPGDSSSGWTAGAAAYYVGYLQPRTFLLKYNENGTITDAVDCALDPLSETKCTLKSFTVEKGIYQTSNFRVQPTESIVRFPNITNLCPFGEVFNATRFASVYAWNRKRISNCVADYSVLYNSASFSTFKCYGVSPTKLNDLCFTNVYADSFVIRGDEVRQIAPGQTGKIADYNYKLPDDFTGCVIAWNSNNLDSKVGGNYNYLYRLFRKSNLKPFERDISTEIYQAGSTPCNGVEGFNCYFPLQSYGFQPTNGVGYQPYRVVVLSFELLHAPATVCGPKKSTNLVKNKCVNFNFNGLTGTGVLTESNKKFLPFQQFGRDIADTTDAVRDPQTLEILDITPCSFGGVSVITPGTNTSNQVAVLYQGVNCTEVPVAIHADQLTPTWRVYSTGSNVFQTRAGCLIGAEHVNNSYECDIPIGAGICASYQTQTNSPRRARSVASQSIIAYTMSLGAENSVAYSNNSIAIPTNFTISVTTEILPVSMTKTSVDCTMYICGDSTECSNLLLQYGSFCTQLNRALTGIAVEQDKNTQEVFAQVKQIYKTPPIKDFGGFNFSQILPDPSKPSKRSFIEDLLFNKVTLADAGFIKQYGDCLGDIAARDLICAQKFNGLTVLPPLLTDEMIAQYTSALLAGTITSGWTFGAGAALQIPFAMQMAYRFNGCGVTQNVLYENQKLIANQFNSAIGKIQDSLSSTASALGKLQDVVNQNAQALNTLVKQLSSNFGAISSVLNDILSRLDKVEAEVQIDRLITGRLQSLQTYVTQQLIRAAEIRASANLAATKMSECVLGQSKRVDFCGKGCHLMSFPQSAPHGVVFLHVTYVPAQEKNFTTAPAICHDGKAHFPREGVFVSNGTHWFVTQRNFYEPQIITTDNTFVSGNCDVVIGIVNNTVYDPLQPELDSGGSGYIPEAPRDGQAYVRKDGEWVLLSTFL

SEQ ID NO: 10266 - protein, 1177 aa, Artificial Sequence
  SARS-CoV-2/Wuhan/HBCDC-HB-02/2020__EPI_ISL_412978 spike protein (1-1147)(I909C_Y1047C) Foldon construct
MFVFLVLLPLVSSQCVNLTTRTQLPPAYTNSFTRGVYYPDKVFRSSVLHSTQDLFLPFFSNVTWFHAIHVSGTNGTKRFDNPVLPFNDGVYFASTEKSNIIRGWIFGTTLDSKTQSLLIVNNATNVVIKVCEFQFCNDPFLGVYYHKNNKSWMESEFRVYSSANNCTFEYVSQPFLMDLEGKQGNFKNLREFVFKNIDGYFKIYSKHTPINLVRDLPQGFSALEPLVDLPIGINITRFQTLLALHRSYLTPGDSSSGWTAGAAAYYVGYLQPRTFLLKYNENGTITDAVDCALDPLSETKCTLKSFTVEKGIYQTSNFRVQPTESIVRFPNITNLCPFGEVFNATRFASVYAWNRKRISNCVADYSVLYNSASFSTFKCYGVSPTKLNDLCFTNVYADSFVIRGDEVRQIAPGQTGKIADYNYKLPDDFTGCVIAWNSNNLDSKVGGNYNYLYRLFRKSNLKPFERDISTEIYQAGSTPCNGVEGFNCYFPLQSYGFQPTNGVGYQPYRVVVLSFELLHAPATVCGPKKSTNLVKNKCVNFNFNGLTGTGVLTESNKKFLPFQQFGRDIADTTDAVRDPQTLEILDITPCSFGGVSVITPGTNTSNQVAVLYQDVNCTEVPVAIHADQLTPTWRVYSTGSNVFQTRAGCLIGAEHVNNSYECDIPIGAGICASYQTQTNSPRRARSVASQSIIAYTMSLGAENSVAYSNNSIAIPTNFTISVTTEILPVSMTKTSVDCTMYICGDSTECSNFLLQYGSFCTQLNRALTGIAVEQDKNTQEVFAQVKQIYKTPPIKDFGGFNFSQILPDPSKPSKRSFIEDLLFNKVTLADAGFIKQYGDCLGDIAARDLICAQKFNGLTVLPPLLTDEMIAQYTSALLAGTITSGWTFGAGAALQIPFAMQMAYRFNGCGVTQNVLYENQKLIANQFNSAIGKIQDSLSSTASALGKLQDVVNQNAQALNTLVKQLSSNFGAISSVLNDILSRLDKVEAEVQIDRLITGRLQSLQTYVTQQLIRAAEIRASANLAATKMSECVLGQSKRVDFCGKGCHLMSFPQSAPHGVVFLHVTYVPAQEKNFTTAPAICHDGKAHFPREGVFVSNGTHWFVTQRNFYEPQIITTDNTFVSGNCDVVIGIVNNTVYDPLQPELDSGGSGYIPEAPRDGQAYVRKDGEWVLLSTFL

SEQ ID NO: 10267 - protein, 1177 aa, Artificial Sequence
  SARS-CoV-2/Australia/QLD02/2020__EPI_ISL_407896 spike protein (1-1147)(I909C_Y1047C) Foldon construct
MFVFLVLLPLVSSQCVNLTTRTQLPPAYTNSFTRGVYYPDKVFRSSVLHSTQDLFLPFFSNVTWFHAIHVSGTNGTKRFDNPVLPFNDGVYFASTEKSNIIRGWIFGTTLDSKTQSLLIVNNATNVVIKVCEFQFCNDPFLGVYYHKNNKSWMESEFRVYSSANNCTFEYVSQPFLMDLEGKQGNFKNLREFVFKNIDGYFKIYSKHTPINLVRDLPQGFSALEPLVDLPIGINITRFQTLLALHRSYLTPGDSSSGWTAGAAAYYVGYLQPRTFLLKYNENGTITDAVDCALDPLSETKCTLKSFTVEKGIYQTSNFRVQPTESIVRFPNITNLCPFGEVFNATRFASVYAWNRKRISNCVADYSVLYNSASFSTFKCYGVSPTKLNDLCFTNVYADSFVIRGDEVRQIAPGQTGKIADYNYKLPDDFTGCVIAWNSNNLDSKVGGNYNYLYRLFRKSNLKPFERDISTEIYQAGSTPCNGVEGFNCYFPLQSYGFQPTNGVGYQPYRVVVLSFELLHAPATVCGPKKSTNLVKNKCVNFNFNGLTGTGVLTESNKKFLPFQQFGRDIADTTDAVRDPQTLEILDITPCSFGGVSVITPGTNTSNQVAVLYQDVNCTEVPVAIHADQLTPTWRVYSTGSNVFQTRAGCLIGAEHVNNSYECDIPIGAGICASYQTQTNSPRRARSVASQSIIAYTMSLGAENSVAYSNNSIAIPTNFTISVTTEILPVSMTKTSVDCTMYICGDSTECSNLLLQYGSFCTQLNRALTGIAVEQDKNTQEVFAQVKQIYKTPPIKDFGGFNFSQILPDPSKPSKRSFIEDLLFNKVTLADAGFIKQYGDCLGDIAARDLICAQKFNGLTVLPPLLTDEMIAQYTSALLAGTITSGWTFGAGAALQIPFAMQMAYRFNGCGVTQNVLYENQKLIANQFNSAIGKIQDSLSSTASALGKLQDVVNQNAQALNTLVKQLSSNFGAISSVLNDILSRLDKVEAEVQIDRLITGRLQSLQTYVTQQLIRAAEIRASANLAATKMSECVLGQSKRVDFCGKGCHLMSFPQSAPHGVVFLHVTYVPAQEKNFTTAPAICHDGKAHFPREGVFVSNGTHWFVTQRNFYEPQIITTDNTFVSGNCDVVIGIVNNTVYDPLQLELDSGGSGYIPEAPRDGQAYVRKDGEWVLLSTFL

SEQ ID NO: 10268 - protein, 1177 aa, Artificial Sequence
  SARS-CoV-2/India/1-31/2020__EPI_ISL_413523 spike protein (1-1147)(I909C_Y1047C) Foldon construct
MFVFLVLLPLVSSQCVNLTTRTQLPPAYTNSFTRGVYYPDKVFRSSVLHSTQDLFLPFFSNVTWFHAIHVSGTNGTKRFDNPVLPFNDGVYFASTEKSNIIRGWIFGTTLDSKTQSLLIVNNATNVVIKVCEFQFCNDPFLGVYYHKNNKSWMESEFRVYSSANNCTFEYVSQPFLMDLEGKQGNFKNLREFVFKNIDGYFKIYSKHTPINLVRDLPQGFSALEPLVDLPIGINITRFQTLLALHRSYLTPGDSSSGWTAGAAAYYVGYLQPRTFLLKYNENGTITDAVDCALDPLSETKCTLKSFTVEKGIYQTSNFRVQPTESIVRFPNITNLCPFGEVFNATRFASVYAWNRKRISNCVADYSVLYNSASFSTFKCYGVSPTKLNDLCFTNVYADSFVIRGDEVRQIAPGQTGKIADYNYKLPDDFTGCVIAWNSNNLDSKVGGNYNYLYRLFRKSNLKPFERDISTEIYQAGSTPCNGVEGFNCYFPLQSYGFQPTNGVGYQPYRVVVLSFELLHAPATVCGPKKSTNLVKNKCVNFNFNGLTGTGVLTESNKKFLPFQQFGRDIADTTDAVRDPQTLEILDITPCSFGGVSVITPGTNTSNQVAVLYQDVNCTEVPVAIHADQLTPTWRVYSTGSNVFQTRAGCLIGAEHVNNSYECDIPIGAGICASYQTQTNSPRRARSVASQSIIAYTMSLGAENSVAYSNNSIAIPTNFTISVTTEILPVSMTKTSVDCTMYICGDSTECSNLLLQYGSFCTQLNRALTGIAVEQDKNTQEVFAQVKQIYKTPPIKDFGGFNFSQILPDPSKPSKRSFIEDLLFNKVTLADAGFIKQYGDCLGDIAARDLICAQKFNGLTVLPPLLTDEMIAQYTSALLAGTITSGWTFGAGAALQIPFAMQMAYRFNGCGVTQNVLYENQKLIANQFNSVIGKIQDSLSSTASALGKLQDVVNQNAQALNTLVKQLSSNFGAISSVLNDILSRLDKVEAEVQIDRLITGRLQSLQTYVTQQLIRAAEIRASANLAATKMSECVLGQSKRVDFCGKGCHLMSFPQSAPHGVVFLHVTYVPAQEKNFTTAPAICHDGKAHFPREGVFVSNGTHWFVTQRNFYEPQIITTDNTFVSGNCDVVIGIVNNTVYDPLQPELDSGGSGYIPEAPRDGQAYVRKDGEWVLLSTFL

SEQ ID NO: 10269 - protein, 1177 aa, Artificial Sequence
  SARS-CoV-2/Guangdong/GD2020087-P0008/2020__EPI_ISL_413863 spike protein (1-1147)(I909C_Y1047C) Foldon construct
MFVFLVLLPLVSSQCVNLTTRTQLPPAYTNSFTRGVYYPDKVFRSSVLHSTQDLFLPFFSNVTWFHAIHVSGTNGTKRFDNPVLPFNDGVYFASTEKSNIIRGWIFGTTLDSKTQSLLIVNNATNVVIKVCEFQFCNDPFLGVYYHKNNKSWMESEFRVYSSANNCTFEYVSQPFLMDLEGKQGNFKNLREFVFKNIDGYFKIYSKHTPINLVRDLPQGFSALEPLVDLPIGINITRFQTLLALHRSYLTPGDSSSGWTAGAAAYYVGYLQPRTFLLKYNENGTITDAVDCALDPLSETKCTLKSFTVEKGIYQTSNFRVQPTESIVRFPNITNLCPFGEVFNATRFASVYAWNRKRISNCVADYSVLYNSASFSTFKCYGVSPTKLNDLCFTNVYADSFVIRGDEVREIAPGQTGKIADYNYKLPDDFTGCVIAWNSNNLDSKVGGNYNYLYRLFRKSNLKPFERDISTEIYQAGSTPCNGVEGFNCYFPLQSYGFQPTNGVGYQPYRVVVLSFELLHAPATVCGPKKSTNLVKNKCVNFNFNGLTGTGVLTESNKKFLPFQQFGRDIADTTDAVRDPQTLEILDITPCSFGGVSVITPGTNTSNQVAVLYQDVNCTEVPVAIHADQLTPTWRVYSTGSNVFQTRAGCLIGAEHVNNSYECDIPIGAGICASYQTQTNSPRRARSVASQSIIAYTMSLGAENSVAYSNNSIAIPTNFTISVTTEILPVSMTKTSVDCTMYICGDSTECSNLLLQYGSFCTQLNRALTGIAVEQDKNTQEVFAQVKQIYKTPPIKDFGGFNFSQILPDPSKPSKRSFIEDLLFNKVTLADAGFIKQYGDCLGDIAARDLICAQKFNGLTVLPPLLTDEMIAQYTSALLAGTITSGWTFGAGAALQIPFAMQMAYRFNGCGVTQNVLYENQKLIANQFNSAIGKIQDSLSSTASALGKLQDVVNQNAQALNTLVKQLSSNFGAISSVLNDILSRLDKVEAEVQIDRLITGRLQSLQTYVTQQLIRAAEIRASANLAATKMSECVLGQSKRVDFCGKGCHLMSFPQSAPHGVVFLHVTYVPAQEKNFTTAPAICHDGKAHFPREGVFVSNGTHWFVTQRNFYEPQIITTDNTFVSGNCDVVIGIVNNTVYDPLQPELDSGGSGYIPEAPRDGQAYVRKDGEWVLLSTFL

SEQ ID NO: 10270 - protein, 1177 aa, Artificial Sequence
  SARS-CoV-2/Sweden/01/2020__EPI_ISL_411951 spike protein (1-1147)(I909C_Y1047C) Foldon construct
MFVFLVLLPLVSSQCVNLTTRTQLPPAYTNSFTRGVYYPDKVFRSSVLHSTQDLFLPFFSNVTWFHAIHVSGTNGTKRFDNPVLPFNDGVYFASTEKSNIIRGWIFGTTLDSKTQSLLIVNNATNVVIKVCEFQFCNDPFLGVYYHKNNKSWMESEFRVYSSANNCTFEYVSQPFLMDLEGKQGNFKNLREFVFKNIDGYFKIYSKHTPINLVRDLPQGFSALEPLVDLPIGINITRFQTLLALHRSYLTPGDSSSGWTAGAAAYYVGYLQPRTFLLKYNENGTITDAVDCALDPLSETKCTLKSFTVEKGIYQTSNFRVQPTESIVRFPNITNLCPFGEVFNATRFASVYAWNRKRISNCVADYSVLYNSASFSTFKCYGVSPTKLNDLCFTNVYADSFVIRGDEVRQIAPGQTGKIADYNYKLPDDFTGCVIAWNSNNLDSKVGGNYNYLYRLFRKSNLKPFERDISTEIYQAGSTPCNGVEGFNCYFPLQSYGFQPTNGVGYQPYRVVVLSFELLHAPATVCGPKKSTNLVKNKCVNFNFNGLTGTGVLTESNKKFLPFQQFGRDIADTTDAVRDPQTLEILDITPCSFGGVSVITPGTNTSNQVAVLYQDVNCTEVPVAIHADQLTPTWRVYSTGSNVFQTRAGCLIGAEHVNNSYECDIPIGAGICASYQTQTNSPRRARSVASQSIIAYTMSLGAENSVAYSNNSIAIPTNFTISVTTEILPVSMTKTSVDCTMYICGDSTECSNLLLQYGSFCTQLNRALTGIAVEQDKNTQEVFAQVKQIYKTPPIKDCGGFNFSQILPDPSKPSKRSFIEDLLFNKVTLADAGFIKQYGDCLGDIAARDLICAQKFNGLTVLPPLLTDEMIAQYTSALLAGTITSGWTFGAGAALQIPFAMQMAYRFNGCGVTQNVLYENQKLIANQFNSAIGKIQDSLSSTASALGKLQDVVNQNAQALNTLVKQLSSNFGAISSVLNDILSRLDKVEAEVQIDRLITGRLQSLQTYVTQQLIRAAEIRASANLAATKMSECVLGQSKRVDFCGKGCHLMSFPQSAPHGVVFLHVTYVPAQEKNFTTAPAICHDGKAHFPREGVFVSNGTHWFVTQRNFYEPQIITTDNTFVSGNCDVVIGIVNNTVYDPLQPELDSGGSGYIPEAPRDGQAYVRKDGEWVLLSTFL

SEQ ID NO: 10271 - protein, 1177 aa, Artificial Sequence
  SARS-CoV-2/Tianmen/HBCDC-HB-07/2020__EPI_ISL_412983 spike protein (1-1147)(I909C_Y1047C) Foldon construct
MFVFLVLLPLVSSQCVNLTTRTQLPPAYTNSFTRGVYYPDKVFRSSVLHSTQDLFLPFFSNVTWFHAIHVSGTNGTKRFDNPVLPFNDGVYFASTEKSNIIRGWIFGTTLDSKTQSLLIVNNATNVVIKVCEFQFCNDPFLGVYYHKNNKSWMESEFRVYSSANNCTFEYVSQPFLMDLEGKQGNFKNLREFVFKNIDGYFKIYSKHTPINLVRDLPQGFSALEPLVDLPIGINITRFQTLLALHRSYLTPGDSSSGWTAGAAAYYVGYLQPRTFLLKYNENGTITDAVDCALDPLSETKCTLKSFTVEKGIYQTSNFRVQPTESIVRFPNITNLCPFGEVFNATRFASVYAWNRKRISNCVADYSVLYNSASFSTFKCYGVSPTKLNDLCFTNVYADSFVIRGDEVRQIAPGQTGKIADYNYKLPDDFTGCVIAWNSNNLDSKVGGNYNYLYRLFRKSNLKPFERDISTEIYQAGSTPCNGVEGFNCYFPLQSYGFQPTNGVGYQPYRVVVLSFELLHAPATVCGPKKSTNLVKNKCVNFNFNGLTGTGVLTESNKKFLPFQQFGRDIADTTDAVRDPQTLEILDITPCSFGGVSVITPGTNTSNQVAVLYQDLNCTEVPVAIHADQLTPTWRVYSTGSNVFQTRAGCLIGAEHVNNSYECDIPIGAGICASYQTQTNSPRRARSVASQSIIAYTMSLGAENSVAYSNNSIAIPTNFTISVTTEILPVSMTKTSVDCTMYICGDSTECSNLLLQYGSFCTQLNRALTGIAVEQDKNTQEVFAQVKQIYKTPPIKDFGGFNFSQILPDPSKPSKRSFIEDLLFNKVTLADAGFIKQYGDCLGDIAARDLICAQKFNGLTVLPPLLTDEMIAQYTSALLAGTITSGWTFGAGAALQIPFAMQMAYRFNGCGVTQNVLYENQKLIANQFNSAIGKIQDSLSSTASALGKLQDVVNQNAQALNTLVKQLSSNFGAISSVLNDILSRLDKVEAEVQIDRLITGRLQSLQTYVTQQLIRAAEIRASANLAATKMSECVLGQSKRVDFCGKGCHLMSFPQSAPHGVVFLHVTYVPAQEKNFTTAPAICHDGKAHFPREGVFVSNGTHWFVTQRNFYEPQIITTDNTFVSGNCDVVIGIVNNTVYDPLQPELDSGGSGYIPEAPRDGQAYVRKDGEWVLLSTFL

SEQ ID NO: 10272 - protein, 1177 aa, Artificial Sequence
  SARS-CoV-2/Hong Kong/case42_VM20002493/2020__EPI_ISL_414527 spike protein (1-1147)(I909C_Y1047C) Foldon construct
MFVFLVLLPLVSSQCVNLTTRTQLPPAYTNSFTRGVYYPDKVFRSSVLHSTQDLFLPFFSNVTWFHAIHVSGTNGTKRFDNPVLPFNDGVYFASTEKSNIIRGWIFGTTLDSKTQSLLIVNNATNVVIKVCEFQFCNDPFLGVYYHKNNKSWMESEFRVYSSANNCTFEYVSQPFLMDLEGKQGNFKNLREFVFKNIDGYFKIYSKHTPINLVRDLPQGFSALEPLVDLPIGINITRFQTLLALHRSYLTPGDSSSGWTAGAAAYYVGYLQPRTFLLKYNENGTITDAVDCALDPLSETKCTLKSFTVEKGIYQTSNFRVQPTESIVRFPNITNLCPFGEVFNATRFASVYAWNRKRISNCVADYSVLYNSASFSTFKCYGVSPTKLNDLCFTNVYADSFVIRGDEVRQIAPGQTGKIADYNYKLPDDFTGCVIAWNSNNLDSKVGGNYNYLYRLFRKSNLKPFERDISTEIYQAGSTPCNGVEGFNCYFPLQSYGFQPTNGVGYQPYRVVVLSFELLHAPATVCGPKKSTNLVKNKCVNFNFNGLTGTGVLTESNKKFLPFQQFGRDIADTTDAVRDPQTLEILDITPCSFGGVSVITPGTNTSNQVAVLYQDVNCTEVPVAIHADQLTPTWRVYSTGSNVFQTRAGCLIGAEHVNNSYECDIPIGAGICASYQTQTNSPRRARSVASQSIIAYTMSLGAENSVAYSNNSIAIPTNFAISVTTEILPVSMTKTSVDCTMYICGDSTECSNLLLQYGSFCTQLNRALTGIAVEQDKNTQEVFAQVKQIYKTPPIKDFGGFNFSQILPDPSKPSKRSFIEDLLFNKVTLADAGFIKQYGDCLGDIAARDLICAQKFNGLTVLPPLLTDEMIAQYTSALLAGTITSGWTFGAGAALQIPFAMQMAYRFNGCGVTQNVLYENQKLIANQFNSAIGKIQDSLSSTASALGKLQDVVNQNAQALNTLVKQLSSNFGAISSVLNDILSRLDKVEAEVQIDRLITGRLQSLQTYVTQQLIRAAEIRASANLAATKMSECVLGQSKRVDFCGKGCHLMSFPQSAPHGVVFLHVTYVPAQEKNFTTAPAICHDGKAHFPREGVFVSNGTHWFVTQRNFYEPQIITTDNTFVSGNCDVVIGIVNNTVYDPLQPELDSGGSGYIPEAPRDGQAYVRKDGEWVLLSTFL

SEQ ID NO: 10273 - protein, 1177 aa, Artificial Sequence
  SARS-CoV-2/USA/CruiseA-23/2020__EPI_ISL_414482 spike protein (1-1147)(I909C_Y1047C) Foldon construct
MFVFLVLLPLVSSQCVNLTTRTQLPPAYTNSFTRGVYYPDKVFRSSVLHSTQDLFLPFFSNVTWFHAIHVSGTNGTKRFDNPVLPFNDGVYFASTEKSNIIRGWIFGTTLDSKTQSLLIVNNATNVVIKVCEFQFCNDPFLGVYYHKNNKSWMESEFRVYSSANNCTFEYVSQPFLMDLEVKQGNFKNLREFVFKNIDGYFKIYSKHTPINLVRDLPQGFSALEPLVDLPIGINITRFQTLLALHRSYLTPGDSSSGWTAGAAAYYVGYLQPRTFLLKYNENGTITDAVDCALDPLSETKCTLKSFTVEKGIYQTSNFRVQPTESIVRFPNITNLCPFGEVFNATRFASVYAWNRKRISNCVADYSVLYNSASFSTFKCYGVSPTKLNDLCFTNVYADSFVIRGDEVRQIAPGQTGKIADYNYKLPDDFTGCVIAWNSNNLDSKVGGNYNYLYRLFRKSNLKPFERDISTEIYQAGSTPCNGVEGFNCYFPLQSYGFQPTNGVGYQPYRVVVLSFELLHAPATVCGPKKSTNLVKNKCVNFNFNGLTGTGVLTESNKKFLPFQQFGRDIADTTDAVRDPQTLEILDITPCSFGGVSVITPGTNTSNQVAVLYQDVNCTEVPVAIHADQLTPTWRVYSTGSNVFQTRAGCLIGAEHVNNSYECDIPIGAGICASYQTQTNSPRRARSVASQSIIAYTMSLGAENSVAYSNNSIAIPTNFTISVTTEILPVSMTKTSVDCTMYICGDSTECSNLLLQYGSFCTQLNRALTGIAVEQDKNTQEVFAQVKQIYKTPPIKDFGGFNFSQILPDPSKPSKRSFIEDLLFNKVTLADAGFIKQYGDCLGDIAARDLICAQKFNGLTVLPPLLTDEMIAQYTSALLAGTITSGWTFGAGAALQIPFAMQMAYRFNGCGVTQNVLYENQKLIANQFNSAIGKIQDSLSSTASALGKLQDVVNQNAQALNTLVKQLSSNFGAISSVLNDILSRLDKVEAEVQIDRLITGRLQSLQTYVTQQLIRAAEIRASANLAATKMSECVLGQSKRVDFCGKGCHLMSFPQSAPHGVVFLHVTYVPAQEKNFTTAPAICHDGKAHFPREGVFVSNGTHWFVTQRNFYEPQIITTDNTFVSGNCDVVIGIVNNTVYDPLQPELDSGGSGYIPEAPRDGQAYVRKDGEWVLLSTFL

SEQ ID NO: 10274 - protein, 1177 aa, Artificial Sequence
  SARS-CoV-2/Hong Kong/case85_VM20002868/2020__EPI_ISL_414519 spike protein (1-1147)(I909C_Y1047C) Foldon construct
MFVFLVLVPLVSSQCVNLTTRTQLPPAYTNSFTRGVYYPDKVFRSSVLHSTQDLFLPFFSNVTWFHAIHVSGTNGTKRFDNPVLPFNDGVYFASTEKSNIIRGWIFGTTLDSKTQSLLIVNNATNVVIKVCEFQFCNDPFLGVYYHKNNKSWMESEFRVYSSANNCTFEYVSQPFLMDLEGKQGNFKNLREFVFKNIDGYFKIYSKHTPINLVRDLPQGFSALEPLVDLPIGINITRFQTLLALHRSYLTPGDSSSGWTAGAAAYYVGYLQPRTFLLKYNENGTITDAVDCALDPLSETKCTLKSFTVEKGIYQTSNFRVQPTESIVRFPNITNLCPFGEVFNATRFASVYAWNRKRISNCVADYSVLYNSASFSTFKCYGVSPTKLNDLCFTNVYADSFVIRGDEVRQIAPGQTGKIADYNYKLPDDFTGCVIAWNSNNLDSKVGGNYNYLYRLFRKSNLKPFERDISTEIYQAGSTPCNGVEGFNCYFPLQSYGFQPTNGVGYQPYRVVVLSFELLHAPATVCGPKKSTNLVKNKCVNFNFNGLTGTGVLTESNKKFLPFQQFGRDIADTTDAVRDPQTLEILDITPCSFGGVSVITPGTNTSNQVAVLYQDVNCTEVPVAIHADQLTPTWRVYSTGSNVFQTRAGCLIGAEHVNNSYECDIPIGAGICASYQTQTNSPRRARSVASQSIIAYTMSLGAENSVAYSNNSIAIPTNFTISVTTEILPVSMTKTSVDCTMYICGDSTECSNLLLQYGSFCTQLNRALTGIAVEQDKNTQEVFAQVKQIYKTPPIKDFGGFNFSQILPDPSKPSKRSFIEDLLFNKVTLADAGFIKQYGDCLGDIAARDLICAQKFNGLTVLPPLLTDEMIAQYTSALLAGTITSGWTFGAGAALQIPFAMQMAYRFNGCGVTQNVLYENQKLIANQFNSAIGKIQDSLSSTASALGKLQDVVNQNAQALNTLVKQLSSNFGAISSVLNDILSRLDKVEAEVQIDRLITGRLQSLQTYVTQQLIRAAEIRASANLAATKMSECVLGQSKRVDFCGKGCHLMSFPQSAPHGVVFLHVTYVPAQEKNFTTAPAICHDGKAHFPREGVFVSNGTHWFVTQRNFYEPQIITTDNTFVSGNCDVVIGIVNNTVYDPLQPELDSGGSGYIPEAPRDGQAYVRKDGEWVLLSTFL

SEQ ID NO: 10275 - protein, 1177 aa, Artificial Sequence; identical to SEQ ID NO: 10265
  SARS-CoV-2/England/200990660/2020__EPI_ISL_414523 spike protein (1-1147)(I909C_Y1047C) Foldon construct

SEQ ID NO: 10276 - protein, 1177 aa, Artificial Sequence
  SARS-CoV-2/Australia/NSW09/2020__EPI_ISL_413595 spike protein (1-1147)(I909C_Y1047C) Foldon construct
MFVFLVLLPLVSSQCVNLTTRTQLPPAYTNSFTRGVYYPDKVFRSSVLHSTQDLFLPFFSNVTWFHAIHVSGTNGTKRFDNPVLPFNDGVYFASTEKSNIIRGWIFGTTLDSKTQSLLIVNNATNVVIKVCEFQFCNDPFLGVYYHKNNKSWMESEFRVYSSANNCTFEYVSQPFLMDLEGKQGNFKNLREFVFKNIDGYFKIYSKHTPINLVRDLPQGFSALEPLVDLPIGINITRFQTLLALHRSYLTPGDSSSGWTAGAAAYYVGYLQPRTFLLKYNENGTITDAVDCALDPLSETKCTLKSFTVEKGIYQTSNFRVQPTESIVRFPNITNLCPFGEVFNATRFASVYAWNRKRISNCVADYSVLYNSASFSTFKCYGVSPTKLNDLCFTNVYADSFVIRGDEVRQIAPGQTGKIADYNYKLPDDFTGCVIAWNSNNLDSKVGGNYNYLYRLFRKSNLKPFERDISTEIYQAGSTPCNGVEGFNCYFPLQSYGFQPTNGVGYQPYRVVVLSFELLHAPATVCGPKKSTNLVKNKCVNFNFNGLTGTGVLTESNKKFLPFQQFGRDIADTTDAVRDPQTLEILDITPCSFGGVSVITPGTNTSNQVAVLYQDVNCTEVPVAIHADQLTPTWRVYSTGSNVFQTRAGCLIGAEHVNNSYECDIPIGAGICASYQTQTNSPRRARSVASQSIIAYTMSLGAENSVAYSNNSIAIPTNFTISVTTEILPVSMTKTSVDCTMYICGDSTECSNLLLQYGSFCTQLNRALTGIAVEQDKNTQEVFAQVKQIYKTPPIKDFGGFNFSQILPDPSKPSKRSFIEDLLFNKVTLADAGFIKQYGDCLGDIAARDLICAQKFNGLTVLPPLLTDEMIAQYTSALLAGTITSGWTFGAGAALQIPFAMQMAYRFNGCGVTQNVLYENQKLIANQFNSAIGKIQDSLSFTASALGKLQDVVNQNAQALNTLVKQLSSNFGAISSVLNDILSRLDKVEAEVQIDRLITGRLQSLQTYVTQQLIRAAEIRASANLAATKMSECVLGQSKRVDFCGKGCHLMSFPQSAPHGVVFLHVTYVPAQEKNFTTAPAICHDGKAHFPREGVFVSNGTHWFVTQRNFYEPQIITTDNTFVSGNCDVVIGIVNNTVYDPLQPELDSGGSGYIPEAPRDGQAYVRKDGEWVLLSTFL

SEQ ID NO: 10277 - protein, 1177 aa, Artificial Sequence; identical to SEQ ID NO: 10257
  SARS-CoV-2/Australia/NSW10/2020__EPI_ISL_413596 spike protein (1-1147)(I909C_Y1047C) Foldon construct

SEQ ID NO: 10278 - protein, 1177 aa, Artificial Sequence
  SARS-CoV-2/Switzerland/1000477797/2020__EPI_ISL_413023 spike protein (1-1147)(I909C_Y1047C) Foldon construct
MFVFLVLLPLVSSQCVNLTTRTQLPPAYTNSFTRGVYYPDKVFRSSVLHSTQDLFLPFFSNVTWFHAIHVSGTNGTKRFDNPVLPFNDGVYFASTEKSNIIRGWIFGTTLDSKTQSLLIVNNATNVVIKVCEFQFCNDPFLGVYYHKNNKSWMESEFRVYSSANNCTFEYVSQPFLMDLEGKQGNFKNLREFVFKNIDGYFNIYSKHTPINLVRDLPQGFSALEPLVDLPIGINITRFQTLLALHRSYLTPGDSSSGWTAGAAAYYVGYLQPRTFLLKYNENGTITDAVDCALDPLSETKCTLKSFTVEKGIYQTSNFRVQPTESIVRFPNITNLCPFGEVFNATRFASVYAWNRKRISNCVADYSVLYNSASFSTFKCYGVSPTKLNDLCFTNVYADSFVIRGDEVRQIAPGQTGKIADYNYKLPDDFTGCVIAWNSNNLDSKVGGNYNYLYRLFRKSNLKPFERDISTEIYQAGSTPCNGVEGFNCYFPLQSYGFQPTNGVGYQPYRVVVLSFELLHAPATVCGPKKSTNLVKNKCVNFNFNGLTGTGVLTESNKKFLPFQQFGRDIADTTDAVRDPQTLEILDITPCSFGGVSVITPGTNTSNQVAVLYQGVNCTEVPVAIHADQLTPTWRVYSTGSNVFQTRAGCLIGAEHVNNSYECDIPIGAGICASYQTQTNSPRRARSVASQSIIAYTMSLGAENSVAYSNNSIAIPTNFTISVTTEILPVSMTKTSVDCTMYICGDSTECSNLLLQYGSFCTQLNRALTGIAVEQDKNTQEVFAQVKQIYKTPPIKDFGGFNFSQILPDPSKPSKRSFIEDLLFNKVTLADAGFIKQYGDCLGDIAARDLICAQKFNGLTVLPPLLTDEMIAQYTSALLAGTITSGWTFGAGAALQIPFAMQMAYRFNGCGVTQNVLYENQKLIANQFNSAIGKIQDSLSSTASALGKLQDVVNQNAQALNTLVKQLSSNFGAISSVLNDILSRLDKVEAEVQIDRLITGRLQSLQTYVTQQLIRAAEIRASANLAATKMSECVLGQSKRVDFCGKGCHLMSFPQSAPHGVVFLHVTYVPAQEKNFTTAPAICHDGKAHFPREGVFVSNGTHWFVTQRNFYEPQIITTDNTFVSGNCDVVIGIVNNTVYDPLQPELDSGGSGYIPEAPRDGQAYVRKDGEWVLLSTFL

SEQ ID NO: 10279 - protein, 1177 aa, Artificial Sequence
  SARS-CoV-2/Belgium/BA-02291/2020__EPI_ISL_415159 spike protein (1-1147)(I909C_Y1047C) Foldon construct
MFVFLVLLPLVSSQCVNLTTRTQLPPAYTNSFTRGVYYPDKVFRSSVLHSTQDLFLPFFSNVTWFHAIHVSGTNGTKRFDNPVLPFNDGVYFASTEKSNIIRGWIFGTTLDSKTQSLLIVNNATNVVIKVCEFQFCNDPFLGVYYHKNNKSWMESEFRVYSSANNCTFEYVSQPFLMDLEGKQGNFKNLREFVFKNIDGYFKIYSKHTPINLVRDLPQGFSALEPLVDLPIGINITRFQTLLALHRSYLTPGDSSSGWTAGAAAYYVGYLQPRTFLLKYNENGTITDAVDCALDPLSETKCTLKSFTVEKGIYQTSNFRVQPTESIVRFPNITNLCPFGEVFNATRFASVYAWNRKRISNCVADYSVLYNSASFSTFKCYGVSPTKLNDLCFTNVYADSFVIRGDEVRQIAPGQTGKIADYNYKLPDDFTGCVIAWNSNNLDSKVGGNYNYLYRLFRRSNLKPFERDISTEIYQAGSTPCNGVEGFNCYFPLQSYGFQPTNGVGYQPYRVVVLSFELLPAPATVCGPKKSTNLVKNKCVNFNFNGLTGTGVLTESNKKFLPFQQFGRDIADTTDAVRDPQTLEILDITPCSFGGVSVITPGTNTSNQVAVLYQGVNCTEVPVAIHADQLTPTWRVYSTGSNVFQTRAGCLIGAEHVNNSYECDIPIGAGICASYQTQTNSPRRARSVASQSIIAYTMSLGAENSVAYSNNSIAIPTNFTISVTTEILPVSMTKTSVDCTMYICGDSTECSNLLLQYGSFCTQLNRALTGIAVEQDKNTQEVFAQVKQIYKTPPIKDFGGFNFSQILPDPSKPSKRSFIEDLLFNKVTLADAGFIKQYGDCLGDIAARDLICAQKFNGLTVLPPLLTDEMIAQYTSALLAGTITSGWTFGAGAALQIPFAMQMAYRFNGCGVTQNVLYENQKLIANQFNSAIGKIQDSLSSAAPALGKLQDVVNQNAQALNTLVKQLSSNFGAISSVLNDILSRLDKVEAEVQIDRLITGRLQSLQTYVTQQLIRAAEIRASANLAATKMSECVLGQSKRVDFCGKGCHLMSFPQSAPHGVVFLHVTYVPAQEKNFTTAPAICHDGKAHFPREGVFVSNGTHWFVTQRNFYEPQIITTDNTFVSGNCDVVIGIVNNTVYDPLQPELDSGGSGYIPEAPRDGQAYVRKDGEWVLLSTFL

SEQ ID NO: 10280 - protein, 1177 aa, Artificial Sequence
  SARS-CoV-2/USA/WA8-UW5/2020__EPI_ISL_413486 spike protein (1-1147)(I909C_Y1047C) Foldon construct
MFVFLVLLPLVSSQCVNLTTRTQLPPAYTNSFTRGVYYPDKVFRSSVLHSTQDLFLPFFSNVTWFHAIHVSGTNGTKRFDNPVLPFNDGVYFASTEKSNIIRGWIFGTTLDSKTQSLLIVNNATNVVIKVCEFQFCNDPFLGVYYHKNNKSWMESEFRVYSSANNCTFEYVSQPFLMDLEGKQGNFKNLREFVFKNIDGYFKIYSKHTPINLVRDLPQGFSALEPLVDLPIGINITRFQTLLALHRSYLTPGDSSSGWTAGAAAYYVGYLQPRTFLLKYNENGTITDAVDCALDPLSETKCTLKSFTVEKGIYQTSNFRVQPTESIVRFPNITNLCPFGEVFNATRFASVYAWNRKRISNCVADYSVLYNSASFSTFKCYGVSPTKLNDLCFTNVYADSFVIRGDEVRQIAPGQTGKIADYNYKLPDDFTGCVIAWNSNNLDSKVGGNYNYLYRLFRKSNLKPFERDISTEIYQAGSTPCNGVEGFNCYFPLQSYGFQPTNGVGYQPYRVVVLSFELLHAPATVCGPKKSTNLVKNKCVNFNFNGLTGTGVLTESNKKFLPFQQFGRDIADTTDAVRDPQTLEILDITPCSFGGVSVITPGTNTSNQVAVLYQDVNCTEVPVAIHADQLTPTWRVYSTGSNVFQTRAGCLIGAEYVNNSYECDIPIGAGICASYQTQTNSPRRARSVASQSIIAYTMSLGAENSVAYSNNSIAIPTNFTISVTTEILPVSMTKTSVDCTMYICGDSTECSNLLLQYGSFCTQLNRALTGIAVEQDKNTQEVFAQVKQIYKTPPIKDFGGFNFSQILPDPSKPSKRSFIEDLLFNKVTLADAGFIKQYGDCLGDIAARDLICAQKFNGLTVLPPLLTDEMIAQYTSALLAGTITSGWTFGAGAALQIPFAMQMAYRFNGCGVTQNVLYENQKLIANQFNSAIGKIQDSLSSTASALGKLQDVVNQNAQALNTLVKQLSSNFGAISSVLNDILSRLDKVEAEVQIDRLITGRLQSLQTYVTQQLIRAAEIRASANLAATKMSECVLGQSKRVDFCGKGCHLMSFPQSAPHGVVFLHVTYVPAQEKNFTTAPAICHDGKAHFPREGVFVSNGTHWFVTQRNFYEPQIITTDNTFVSGNCDVVIGIVNNTVYDPLQPELDSGGSGYIPEAPRDGQAYVRKDGEWVLLSTFL

SEQ ID NO: 10281 - protein, 1177 aa, Artificial Sequence
  SARS-CoV-2/England/20102000506/2020__EPI_ISL_415147 spike protein (1-1147)(I909C_Y1047C) Foldon construct
MFVFLVLLPLVSSQCVNLTTRTQLPPAYTNSFTRGVYYPDKVFRSSVLHSTQDLFLPFFSNVTWFHAIHVSGTNGTKRFDNPVLPFNDGVYFASTEKSNIIRGWIFGTTLDSKTQSLLIVNNATNVVIKVCEFQFCNDPFLGVYYHKNNKSWMESEFRVYSSANNCTFEYVSQPFLMDLEGKQGNFKNLREFVFKNIDGYFKIYSKHTPINLVRDLPQGFSALEPLVDLPIGINITRFQTLLALHRSYLTPGDSSSGWTAGAAAYYVGYLQPRTFLLKYNENGTITDAVDCALDPLSETKCTLKSFTVEKGIYQTSNFRVQPTESIVRFPNITNLCPFGEVFNATRFASVYAWNRKRISNCVADYSVLYNSASFSTFKCYGVSPTKLNDLCFTNVYADSFVIRGDEVRQIAPGQTGKIADYNYKLPDDFTGCVIAWNSNNLDSKVGGNYNYLYRLFRKSNLKPFERDISTEIYQAGSTPCNGVEGFNCYFPLQSYGFQPTNGVGYQPYRVVVLSFELLHAPATVCGPKKSTNLVKNKCVNFNFNGLTGTGVLTESNKKFLPFQQFGRDIADTTDAVRDPQTLEILDITPCSFGGVSVITPGTNTSNQVAVLYQGVNCTEVPVAIHADQLTPTWRVYSTGSNVFQTRAGCLIGAEHVNNSYECDIPIGAGICASYQTQTNSPRRARSVASQSIIAYTMSLGAENSVAYSNNSIAIPTNFTISVTTEILPVSMTKTSVDCTMYICGDSTECSNLLLQYGSFCTQLNRALTGIAVEQDKNTQEVFAQVKQIYKTPPIKDFGGFNFSQILPDPSKPSKRSFIEDLLFNKVTLADAGFIKQYGYCLGDIAARDLICAQKFNGLTVLPPLLTDEMIAQYTSALLAGTITSGWTFGAGAALQIPFAMQMAYRFNGCGVTQNVLYENQKLIANQFNSAIGKIQDSLSSTASALGKLQDVVNQNAQALNTLVKQLSSNFGAISSVLNDILSRLDKVEAEVQIDRLITGRLQSLQTYVTQQLIRAAEIRASANLAATKMSECVLGQSKRVDFCGKGCHLMSFPQSAPHGVVFLHVTYVPAQEKNFTTAPAICHDGKAHFPREGVFVSNGTHWFVTQRNFYEPQIITTDNTFVSGNCDVVIGIVNNTVYDPLQPELDSGGSGYIPEAPRDGQAYVRKDGEWVLLSTFL

SEQ ID NO: 10282 - protein, 1177 aa, Artificial Sequence
  SARS-CoV-2/Belgium/VAG-03013/2020__EPI_ISL_415155 spike protein (1-1147)(I909C_Y1047C) Foldon construct
MFVFLVLLPLVSSQCVNLTTRTQLPPAYTNSFTRGVYYPDKVFRSSVLHSTQDLFLPFFSNVTWFHAIHVSGTNGTKRFDNPVLPFNDGVYFASTEKSNIIRGWIFGTTLDSKTQSLLIVNNATNVVIKVCEFQFCNDPFLGVYYHKNNKSWMESEFRVYSSANNCTFEYVSQPFLMDLEGKQGNFKNLREFVFKNIDGYFKIYSKHTPINLVRDLPQGFSALEPLVDLPIGINITRFQTLLALHRSYLTPGDSSSGWTAGAAAYYVGYLQPRTFLLKYNENGTITDAVDCALDPLSETKCTLKSFTVEKGIYQTSNFRVQPTESIVRFPNITNLCPFGEVFNATRFASVYAWNRKRISNCVADYSVLYNSASFSTFKCYGVSPTKLNDLCFTNVYADSFVIRGDEVRQIAPGQTGKIADYNYKLPDDFTGCVIAWNSNNLDSKVGGNYNYLYRLFRKSNLKPFERDISTEIYQAGSTPCNGVEGFNCYFPLQSYGFQPTNGVGYQPYRVVVLSFELLHAPATVCGPKKSTNLVKNKCVNFNFNGLTGTGVLTESNKKFLPFQQFGRDIADTTDAVRDPQTLEILDITPCSFGGVSVITPGTNTSNQVAVLYQGVNCTEVPVAIHADQLTPTWRVYSTGSNVFQTRAGCLIGAEHVNNSYECDIPIGAGICASYQTQTNSPRRARSVASQSIIAYTMSLGAENSVAYSNNSIAIPTNFTISVTTEILPVSMTKTSVDCTMYICGDSTECSNLLLQYGSFCTQLNRALTGIAVEQDKNTQEVFAQVKQIYKTPPIKDFGGFNFSQILPDPSKPSKRSFIEDLLFNKVTLADAGFIKQYGDCLGDIAARDLICAQKFNGLTVLPPLLTDEMIAQYTSALLAGTITSGWTFGAGAALQIPFAMQMAYRFNGCGVTQNVLYENQKLIANQFNSAIGKIQDSLSSTATALGKLQDVVNQNAQALNTLVKQLSSNFGAISSVLNDILSRLDKVEAEVQIDRLITGRLQSLQTYVTQQLIRAAEIRASANLAATKMSECVLGQSKRVDFCGKGCHLMSFPQSAPHGVVFLHVTYVPAQEKNFTTAPAICHDGKAHFPREGVFVSNGTHWFVTQRNFYEPQIITTDNTFVSGNCDVVIGIVNNTVYDPLQPELDSGGSGYIPEAPRDGQAYVRKDGEWVLLSTFL

SEQ ID NO: 10283 - protein, 1177 aa, Artificial Sequence
  SARS-CoV-2/Belgium/BC-03016/2020__EPI_ISL_415157 spike protein (1-1147)(I909C_Y1047C) Foldon construct
MFVFLVLLPLVSSQCVNLTTRTQLPPAYTNSFTRGVYYPDKVFRSSVLHSTQDLFLPFFSNVTWFHAIHVSGTNGTKRFDNPVLPFNDGVYFASTEKSNIIRGWIFGTTLDSKTQSLLIVNNATNVVIKVCEFQFCNDPFLGVYYHKNNKSWMESEFRVYSSANNCTFEYVSQPFLMDLEGKQGNFKNLREFVFKNIDGYFKIYSKHTPINLVRDLPQGFSALEPLVDLPIGINITRFQTLLALHRSYLTPGDSSSGWTAGAAAYYVGYLQPRTFLLKYNENGTITDAVDCALDPLSETKCTLKSFTVEKGIYQTSNFRVQPTESIVRFPNITNLCPFGEVFNATRFASVYAWNRKRISNCVADYSVLYNSASFSTFKCYGVSPTKLNDLCFTNVYADSFVIRGDEVRQIAPGQTGKIADYNYKLPDDFTGCVIAWNSNNLDSKVGGNYNYLYRLFRKSNLKPFERDISTEIYQAGSTPCNGVEGFNCYFPLQSYGFQPTNGVGYQPYRVVVLSFELLHAPATVCGPKKSTNLVKNKCVNFNFNGLTGTGVLTESNKKFLPFQQFGRDIADTTDAVRDPQTLEILDITPCSFGGVSVITPGTNTSNQVAVLYQGVNCTEVPVAIHADQLTPTWRVYSTGSNVFQTRAGCLIGAEHVNNSYECDIPIGAGICASYQTQTNSPRRARSVASQSIIAYTMSLGAENSVAYSNNSIAIPTNFTISVTTEILPVSMTKTSVDCTMYICGDSTECSNLLLQYGSFCTQLNRALTGIAVEQDKNTQEVFAQVKQIYKTPPIKDFGGFNFSQILPDPSKPSKRSFIEDLLFNKVTLADAGFIKQYGDCLGDIAARDLICAQKFNGLTVLPPLLTDEMIAQYTSALLAGTITSGWTFGAGAALQIPFAMQMAYRFNGCGVTQNVLYENQKLIANQFNSAIGKIQDSLSSTAPALGKLQDVVNQNAQALNTLVKQLSSNFGAISSVLNDILSRLDKVEAEVQIDRLITGRLQSLQTYVTQQLIRAAEIRASANLAATKMSECVLGQSKRVDFCGKGCHLMSFPQSAPHGVVFLHVTYVPAQEKNFTTAPAICHDGKAHFPREGVFVSNGTHWFVTQRNFYEPQIITTDNTFVSGNCDVVIGIVNNTVYDPLQPELDSGGSGYIPEAPRDGQAYVRKDGEWVLLSTFL

SEQ ID NO: 10284 - protein, 1177 aa, Artificial Sequence
  SARS-CoV-2/Germany/BavPat3/2020__EPI_ISL_414521 spike protein (1-1147)(I909C_Y1047C) Foldon construct
MFVFLVLLPLVSSQCVNLTTRTQLPPAYTNSFTRGVYYPDKVFRSSVLHSTQDLFLPFFSNVTWFHAIHVSGTNGTKRFDNPVLPFNDGVYFASTEKSNIIRGWIFGTTLDSKTQSLLIVNNATNVVIKVCEFQFCNDPFLGVYYHKNNKSWMESEFRVYSSANNCTFEYVSQPFLMDLEGKQGNFKNLREFVFKNIDGYFKIYSKHTPINLVRDLPQGFSALEPLVDLPIGINITRFQTLLALHRSYLTPGDSSSGWTAGAAAYYVGYLQPRTFLLKYNENGTITDAVDCALDPLSETKCTLKSFTVEKGIYQTSNFRVQPTESIVRFPNITNLCPFGEVFNATRFASVYAWNRKRISNCVADYSVLYNSASFSTFKCYGVSPTKLNDLCFTNVYADSFVIRGDEVRQIAPGQTGKIADYNYKLPDDFTGCVIAWNSNNLDSKVGGNYNYLYRLFRKSNLKPFERDISTEIYQAGSTPCNGVEGFNCYFPLQSYGFQPTNGVGYQPYRVVVLSFELLHAPATVCGPKKSTNLVKNKCVNFNFNGLTGTGVLTESNKKFLPFQQFGRDIADTTDAVRDPQTLEILDITPCSFGGVSVITPGTNTSNQVAVLYQDVNCTEVPVAIHADQLTPTWRVYSTGSNVFQTRAGCLIGAEHVNNSYECDIPIGAGICASYQTQTNSPRRARSVASQSIIAYTMSLGAENSVAYSNNSIAIPTNFTISVTTEILPVSMTKTSVDCTMYICGDSTECSNLLLQYGSFCTQLNRALTGIAVEQDKNTQQVFAQVKQIYKTPPIKDFGGFNFSQILPDPSKPSKRSFIEDLLFNKVTLADAGFIKQYGDCLGDIAARDLICAQKFNGLTVLPPLLTDEMIAQYTSALLAGTITSGWTFGAGAALQIPFAMQMAYRFNGCGVTQNVLYENQKLIANQFNSAIGKIQDSLSSTASALGKLQDVVNQNAQALNTLVKQLSSNFGAISSVLNDILSRLDKVEAEVQIDRLITGRLQSLQTYVTQQLIRAAEIRASANLAATKMSECVLGQSKRVDFCGKGCHLMSFPQSAPHGVVFLHVTYVPAQEKNFTTAPAICHDGKAHFPREGVFVSNGTHWFVTQRNFYEPQIITTDNTFVSGNCDVVIGIVNNTVYDPLQPELDSGGSGYIPEAPRDGQAYVRKDGEWVLLSTFL

SEQ ID NO: 10285 - protein, 1177 aa, Artificial Sequence
  SARS-CoV-2/France/HF1805/2020__EPI_ISL_414628 spike protein (1-1147)(I909C_Y1047C) Foldon construct
MFVFLVLLPLVSSQCVNLTTRTQLPPAYTNSFTRGVYYPDKVFRSSVLHSTQDLFLPFFSNVTWFHAIHVSGTNGTKRFDNPVLPFNDGVYFASTEKSNIIRGWIFGTTLDSKTQSLLIVNNATNVVIKVCEFQFCNDPFLGVYYHKNNKSWMESEFRVYSSANNCTFEYVSQPFLMDLEGKQGNFKNLREFVFKNIDGYFKIYSKHTPINLVRDLPQGFSALEPLVDLPIGINITRFQTLLALHRSYLTPGDSSSGWTAGAAAYYVGYLQPRTFLLKYNENGTITDAVDCALDPLSETKCTLKSFTVEKGIYQTSNFRVQPTESIVRFPNITNLCPFGEVFNATRFASVYAWNRKRISNCVADYSVLYNSASFSTFKCYGVSPTKLNDLCFTNVYADSFVIRGDEVRQIAPGQTGKIADYNYKLPDDFTGCVIAWNSNNLDSKVGGNYNYLYRLFRKSNLKPFERDISTEIYQAGSTPCNGVEGFNCYFPLQSYGFQPTNGVGYQPYRVVVLSFELLHAPATVCGPKKSTNLVKNKCVNFNFNGLTGTGVLTESNKKFLPFQQFGRDIADTTDAVRDPQTLEILDITPCSFGGVSVITPGTNTSNQVAVLYQGVNCTEVPVAIHADQLTPTWRVYSTGSNVFQTRAGCLIGAEHVNNSYECDIPIGAGICASYQTQTNSPRRARSVASQSIIAYTMSLGAENSVAYSNNSIAIPTNFTISVTTEILPVSMTKTSVDCTMYICGDSTECSNLLLQYGSFCTQLNRALTGIAVEQDKNTQEVFAQVKQIYKTPPIKDFGGFNFSQILPDPSKPSKRSFIEDLLFNKVTLADAGFIKQYGDCLGDIAARDLICAQKFNGLTVLPPLLTDEMIAQYTSALLAGTITSGWTFGAGAALQIPFAMQMAYRFNGCGVTQNVLYENQKLIANQFNSAIGKIQDSLSSTASALGKLQDVVNQNAQALNTLVKQLSSNFGAISSVLNDILSRLDKVEAEVQIDRLITGRLQSLQTYVTQQLIRAAEIRASANLAATKMSECVLGQSKRVDFCGKGCHLMSFPQSAPHGVVFLHVTYVPAQEKNFTTAPAICHDGKAHFPREGVFVSNGTHWFVTQRNFYEPQIITTDNTFVSGNCDVVIGVVNNTVYDPLQPELDSGGSGYIPEAPRDGQAYVRKDGEWVLLSTFL

SEQ ID NO: 10286 - protein, 1177 aa, Artificial Sequence
  SARS-CoV-2/Netherlands/ZuidHolland_9/2020__EPI_ISL_414445 spike protein (1-1147)(I909C_Y1047C) Foldon construct
MFVFLVLLPLVSSQCVNLTTRTQLPPAYTNSFTRGVYYPDKVFRSSVLHSTQDLFLPFFSNVTWFHAIHVSGTNGTKRFDNPVLPFNDGVYFASTEKSNIIRGWIFGTTLDSKTQSLLIVNNATNVVIKVCEFQFCNDPFLGVYYHKNNKSWMESEFRVYSSANNCTFEYVSQPFLMDLEGKQGNFKNLREFVFKNIDGYFKIYSKHTPINLVRDLPQGFSALEPLVDLPIGINITRFQTLLALHRSYLTPGDSSSGWTAGAAAYYVGYLQPRTFLLKYNENGTITDAVDCALDPLSETKCTLKSFTVEKGIYQTSNFRVQPTESIVRFPNITNLCPFGEVFNATRFASVYAWNRKRISNCVADYSVLYNSASFSTFKCYGVSPTKLNDLCFTNVYADSFVIRGDEVRQIAPGQTGKIADYNYKLPDDFTGCVIAWNSNNLDSKVGGNYNYLYRLFRKSNLKPFERDISTEIYQAGSTPCNGVEGFNCYFPLQSYGFQPTNGVGYQPYRVVVLSFELLHAPATVCGPKKSTNLVKNKCVNFNFNGLTGTGVLTESNKKFLPFQQFGRDIADTTDAVRDPQTLEILDITPCSFGGVSVITPGTNTSNQVAVLYQGVNCTEVPVAIHADQLTPTWRVYSTGSNVFQTRAGCLIGAEHVNNSYECDIPIGAGICASYQTQTNSPRRARSVASQSIIAYTMSLGAENSVAYSNNSIAIPTNFTISVTTEILPVSMTKTSVDCTMYICGDSTECSNLLLQYGSFCTQLNRALTGIAVEQDKNTQEVFAQVKQIYKTPPIKDFGGFNFSQILPDPSKPSKRSFIEDLLFNKVTLADAGFIKQYGDCLGDIAARDLICVQKFNGLTVLPPLLTDEMIAQYTSALLAGTITSGWTFGAGAALQIPFAMQMAYRFNGCGVTQNVLYENQKLIANQFNSAIGKIQDSLSSTASALGKLQDVVNQNAQALNTLVKQLSSNFGAISSVLNDILSRLDKVEAEVQIDRLITGRLQSLQTYVTQQLIRAAEIRASANLAATKMSECVLGQSKRVDFCGKGCHLMSFPQSAPHGVVFLHVTYVPAQEKNFTTAPAICHDGKAHFPREGVFVSNGTHWFVTQRNFYEPQIITTDNTFVSGNCDVVIGIVNNTVYDPLQPELDSGGSGYIPEAPRDGQAYVRKDGEWVLLSTFL

SEQ ID NO: 10287 - protein, 1177 aa, Artificial Sequence
  SARS-CoV-2/Finland/FIN03032020A/2020__EPI_ISL_413602 spike protein (1-1147)(I909C_Y1047C) Foldon construct
MFVFLVLLPLVSSQCVNLTTRTQLPPAYTNSFTRGVYYPDKVFRSSVLHSTQDLFLPFFSNVTWFHAIHVSGTNGTKRFDNPVLPFNDGVYFASTEKSNIIRGWIFGTTLDSKTQSLLIVNNATNVVIKVCEFQFCNDPFLGVYYHKNNKSWMESEFRVYSSANNCTFEYVSQPFLMDLEGKQGNFKNLREFVFKNIDGYFKIYSKHTPINLVRDLPQGFSALEPLVDLPIGINITRFQTLLALHRSYLTPGDSSSGWTAGAAAYYVGYLQPRTFLLKYNENGTITDAVDCALDPLSETKCTLKSFTVEKGIYQTSNFRVQPTESIVRFPNITNLCPFGEVFNATRFASVYAWNRKRISNCVADYSVLYNSASFSTFKCYGVSPTKLNDLCFTNVYADSFVIRGDEVRQIAPGQTGKIADYNYKLPDDFTGCVISWNSNNLDSKVGGNYNYLYRLFRKSNLKPFERDISTEIYQAGSTPCNGVEGFNCYFPLQSYGFQPTNGVGYQPYRVVVLSFELLHAPATVCGPKKSTNLVKNKCVNFNFNGLTGTGVLTESNKKFLPFQQFGRDIADTTDAVRDPQTLEILDITPCSFGGVSVITPGTNTSNQVAVLYQGVNCTEVPVAIHADQLTPTWRVYSTGSNVFQTRAGCLIGAEHVNNSYECDIPIGAGICASYQTQTNSPRRARSVASQSIIAYTMSLGAENSVAYSNNSIAIPTNFTISVTTEILPVSMTKTSVDCTMYICGDSTECSNLLLQYGSFCTQLNRALTGIAVEQDKNTQEVFAQVKQIYKTPPIKDFGGFNFSQILPDPSKPSKRSFIEDLLFNKVTLADAGFIKQYGDCLGDIAARDLICAQKFNGLTVLPPLLTDEMIAQYTSALLAGTITSGWTFGAGAALQIPFAMQMAYRFNGCGVTQNVLYENQKLIANQFNSAIGKIQDSLSSTASALGKLQDVVNQNAQALNTLVKQLSSNFGAISSVLNDILSRLDKVEAEVQIDRLITGRLQSLQTYVTQQLIRAAEIRASANLAATKMSECVLGQSKRVDFCGKGCHLMSFPQSAPHGVVFLHVTYVPAQEKNFTTAPAICHDGKAHFPREGVFVSNGTHWFVTQRNFYEPQIITTDNTFVSGNCDVVIGIVNNTVYDPLQPELDSGGSGYIPEAPRDGQAYVRKDGEWVLLSTFL

SEQ ID NO: 10288 - protein, 1177 aa, Artificial Sequence
  SARS-CoV-2/France/GE1977/2020__EPI_ISL_414632 spike protein (1-1147)(I909C_Y1047C) Foldon construct
MFVFLVLLPLVSSQCVNLTTRTQLPPAYTNSFTRGVYYPDKVFRSSVLHSTQDLFLPFFSNVTWFHAIHVSGTNGTKRFDNPVLPFNDGVYFASTEKSNIIRGWIFGTTLDSKTQSLLIVNNATNVVIKVCEFQFCNDPFLGVYYHKNNKSWMESEFRVYSSANNCTFEYVSQPFLMDLEGKQGNFKNLREFVFKNIDGYFKIYSKHTPINLVRDLPQGFSALEPLVDLPIGINITRFQTLLALHRSYLTPGDSSSGWTAGAAAYYVGYLQPRTFLLKYNENGTITDAVDCALDPLSETKCTLKSFTVEKGIYQTSNFRVQPTESIVRFPNITNLCPFGEVFNATRFASVYAWNRKRISNCVADYSVLYNSASFSTFKCYGVSPTKLNDLCFTNVYADSFVIRGDEVRQIAPGQTGKIADYNYKLPDDFTGCVIAWNSNNLDSKVGGNYNYLYRLFRKSNLKPFERDISTEIYQAGSTPCNGVEGFNCYFPLQSYGFQPTNGVGYQPYRVVVLSFELLHAPATVCGPKKSTNLVKNKCVNFNFNGLTGTGVLTESNKKFLPFQQFGRDIADTTDAVRDPQTLEILDITPCSFGGVSVITPGTNTSNQVAVLYQGVNCTEVPVAIHADQLTPTWRVYSTGSNVFQTRAGCLIGAEHVNNSYECDIPIGAGICASYQTQTNSPRRARSVASQSIIAYTMSLGAENSVAYSNNSIAIPTNFTISVTTEILPVSMTKTSVDCTMYICGDSTECSNLLLQYGSFCTQLNRALTGIAVEQDKNTQEVFAQVKQIYKTPPIKDFGGFNFSQILPDPSKPSKRSFIEDLLFNKVTLADAGFIKQYGDCLGDIAARDLICAQKFNGLTVLPPLLTDEMIAQYTSALLAGTITSGWTFGAGAALQIPFAMQMAYRFNGCGVTQNVLYENQKLIANQFNSAIGKIQDSLFSTASALGKLQDVVNQNAQALNTLVKQLSSNFGAISSVLNDILSRLDKVEAEVQIDRLITGRLQSLQTYVTQQLIRAAEIRASANLAATKMSECVLGQSKRVDFCGKGCHLMSFPQSAPHGVVFLHVTYVPAQEKNFTTAPAICHDGKAHFPREGVFVSNGTHWFVTQRNFYEPQIITTDNTFVSGNCDVVIGIVNNTVYDPLQPELDSGGSGYIPEAPRDGQAYVRKDGEWVLLSTFL

SEQ ID NO: 10289 - protein, 1177 aa, Artificial Sequence
  SARS-CoV-2/Finland/FIN-313/2020__EPI_ISL_414641 spike protein (1-1147)(I909C_Y1047C) Foldon construct
MFVFLVLLPLVSSQCVNLTTRTQLPPAYTNSFTRGVYYPDKVFRSSVLHSTQDLFLPFFSNVTWFHAIHVSGTNGTKRFDNPVLPFNDGVYFASTEKSNIIRGWIFGTTLDSKTQSLLIVNNATNVVIKVCEFQFCNDPFLGVYYHKNNKSWMESEFRVYSSANNCTFEYVSQPFLMDLEGKQGNFKNLREFVFKNIDGYFKIYSKHTPINLVRDLPQGFSALEPLVDLPIGINITRFKTLLALHRSYLTPGDSSSGWTAGAAAYYVGYLQPRTFLLKYNENGTITDAVDCALDPLSETKCTLKSFTVEKGIYQTSNFRVQPTESIVRFPNITNLCPFGEVFNATRFASVYAWNRKRISNCVADYSVLYNSASFSTFKCYGVSPTKLNDLCFTNVYADSFVIRGDEVRQIAPGQTGKIADYNYKLPDDFTGCVIAWNSNNLDSKVGGNYNYLYRLFRKSNLKPFERDISTEIYQAGSTPCNGVEGFNCYFPLQSYGFQPTNGVGYQPYRVVVLSFELLHAPATVCGPKKSTNLVKNKCVNFNFNGLTGTGVLTESNKKFLPFQQFGRDIADTTDAVRDPQTLEILDITPCSFGGVSVITPGTNTSNQVAVLYQGVNCTEVPVAIHADQLTPTWRVYSTGSNVFQTRAGCLIGAEHVNNSYECDIPIGAGICASYQTQTNSPRRARSVASQSIIAYTMSLGAENSVAYSNNSIAIPTNFTISVTTEILPVSMTKTSVDCTMYICGDSTECSNLLLQYGSFCTQLNRALTGIAVEQDKNTQEVFAQVKQIYKTPPIKDFGGFNFSQILPDPSKPSKRSFIEDLLFNKVTLADAGFIKQYGDCLGDIAARDLICAQKFNGLTVLPPLLTDEMIAQYTSALLAGTITSGWTFGAGAALQIPFAMQMAYRFNGCGVTQNVLYENQKLIANQFNSAIGKIQDSLSSTASALGKLQDVVNQNAQALNTLVKQLSSNFGAISSVLNDILSRLDKVEAEVQIDRLITGRLQSLQTYVTQQLIRAAEIRASANLAATKMSECVLGQSKRVDFCGKGCHLMSFPQSAPHGVVFLHVTYVPAQEKNFTTAPAICHDGKAHFPREGVFVSNGTHWFVTQRNFYEPQIITTDNTFVSGNCDVVIGIVNNTVYDPLQPELDSGGSGYIPEAPRDGQAYVRKDGEWVLLSTFL

SEQ ID NO: 10290 - protein, 1177 aa, Artificial Sequence
  SARS-CoV-2/Netherlands/ZuidHolland_2/2020__EPI_ISL_414556 spike protein (1-1147)(I909C_Y1047C) Foldon construct
MFVFLVLLPLVSSQCVNLTTRTQLPPAYTNSFTRGVYYPDKVFRSSVLHSTQDLFLPFFSNVTWFHAIHVSGTNGTKRFDNPVLPFNDGVYFASTEKSNIIRGWIFGTTLDSKTQSLLIVNNATNVVIKVCEFQFCNDPFLGVYYHKNNKSWMESEFRVYSSANNCTFEYVSQPFLMDLEGKQGNFKNLREFVFKNIDGYFKIYSKHTPINLVRDLPQGFSALEPLVDLPIGINITRFQTLLALHRSYLTPGDSSSGWTAGAAAYYVGYLQPRTFLLKYNENGTITDAVDCALDPLSETKCTLKSFTVEKGIYQTSNFRVQPTESIVRFPNITNLCPFGEVFNATRFASVYAWNRKRISNCVADYSVLYNSASFSTFKCYGVSPTKLNDLCFTNVYADSFVIRGDEVRQIAPGQTGKIADYNYKLPDDFTGCVIAWNSNNLDSKVGGNYNYLYRLFRKSNLKPFERDISTEIYQAGSTPCNGVEGFNCYFPLQSYGFQPTNGVGYQPYRVVVLSFELLHAPATVCGPKKSTNLVKNKCVNFNFNGLTGTGVLTESNKKFLPFQQFGRDIADTTDAVRDPQTLEILDITPCSFGGVSVITPGTNTSNQVAVLYQGVNCTEVPVAIHADQLTPTWRVYSTGSNVFQTRAGCLIGAEHVNNSYECDIPIGAGICASYQTQTNSPRRARSVASQSIIAYTMSLGAENSVAYSNNSIAIPTNFTISVTTEILPVSMTKTSVDCTMYICGDSTECSNLLLQYGSFCTQLNRALTGIALEQDKNTQEVFAQVKQIYKTPPIKDFGGFNFSQILPDPSKPSKRSFIEDLLFNKVTLADAGFIKQYGDCLGDIAARDLICAQKFNGLTVLPPLLTDEMIAQYTSALLAGTITSGWTFGAGAALQIPFAMQMAYRFNGCGVTQNVLYENQKLIANQFNSAIGKIQDSLSSTASALGKLQDVVNQNAQALNTLVKQLSSNFGAISSVLNDILSRLDKVEAEVQIDRLITGRLQSLQTYVTQQLIRAAEIRASANLAATKMSECVLGQSKRVDFCGKGCHLMSFPQSAPHGVVFLHVTYVPAQEKNFTTAPAICHDGKAHFPREGVFVSNGTHWFVTQRNFYEPQIITTDNTFVSGNCDVVIGIVNNTVYDPLQPELDSGGSGYIPEAPRDGQAYVRKDGEWVLLSTFL

SEQ ID NO: 10291 - protein, 1177 aa, Artificial Sequence
  SARS-CoV-2/USA/WA-UW31/2020__EPI_ISL_414618 spike protein (1-1147)(I909C_Y1047C) Foldon construct
MFVFLVLLPLVSSQCVNLTTRTQLPPAYTNSFTRGVYYPDKVFRSSVLHSTQDLFLPFFSNVTWFHAIHVSGTNGTKRFDNPVLPFNDGVYFASTEKSNIIRGWIFGTTLDSKTQSLLIVNNATNVVIKVCEFQFCNDPFLGVYYHKNNKSWMESEFRVYSSANNCTFEYVSQPFLMDLEGKQGNFKNLREFVFKNIDGYFKIYSKHTPINLVRDLPQGFSALEPLVDLPIGINITRFQTLLALHRSYLTPGDSSSGWTAGAAAYYVGYLQPRTFLLKYNENGTITDAVDCALDPLSETKCTLKSFTVEKGIYQTSNFRVQPTESIVRFPNITNLCPFGEVFNATRFASVYAWNRKRISNCVADYSVLYNSASFSTFKCYGVSPTKLNDLCFTNVYADSFVIRGDEVRQIAPGQTGKIADYNYKLPDDFTGCVIAWNSNNLDSKVGGNYNYLYRLFRKSNLKPFERDISTEIYQAGSTPCNGAEGFNCYFPLQSYGFQPTNGVGYQPYRVVVLSFELLHAPATVCGPKKSTNLVKNKCVNFNFNGLTGTGVLTESNKKFLPFQQFGRDIADTTDAVRDPQTLEILDITPCSFGGVSVITPGTNTSNQVAVLYQDVNCTEVPVAIHADQLTPTWRVYSTGSNVFQTRAGCLIGAEHVNNSYECDIPIGAGICASYQTQTNSPRRARSVASQSIIAYTMSLGAENSVAYSNNSIAIPTNFTISVTTEILPVSMTKTSVDCTMYICGDSTECSNLLLQYGSFCTQLNRALTGIAVEQDKNTQEVFAQVKQIYKTPPIKDFGGFNFSQILPDPSKPSKRSFIEDLLFNKVTLADAGFIKQYGDCLGDIAARDLICAQKFNGLTVLPPLLTDEMIAQYTSALLAGTITSGWTFGAGAALQIPFAMQMAYRFNGCGVTQNVLYENQKLIANQFNSAIGKIQDSLSSTASALGKLQDVVNQNAQALNTLVKQLSSNFGAISSVLNDILSRLDKVEAEVQIDRLITGRLQSLQTYVTQQLIRAAEIRASANLAATKMSECVLGQSKRVDFCGKGCHLMSFPQSAPHGVVFLHVTYVPAQEKNFTTAPAICHDGKAHFPREGVFVSNGTHWFVTQRNFYEPQIITTDNTFVSGNCDVVIGIVNNTVYDPLQPELDSGGSGYIPEAPRDGQAYVRKDGEWVLLSTFL

SEQ ID NO: 10292 - protein, 1177 aa, Artificial Sequence
  SARS-CoV-2/South Korea/SNU01/2020__EPI_ISL_411929 spike protein (1-1147)(I909C_Y1047C) Foldon construct
MFVFLVLLPLVSSQCVNLTTRTQLPPAYTNSFTRGVYYPDKVFRSSVLHSTQDLFLPFFSNVTWFHAIHVSGTNGTKRFDNPVLPFNDGVYFASTEKSNIIRGWIFGTTLDSKTQSLLIVNNATNVVIKVCEFQFCNDPFLGVYYHKNNKSWMESEFRVYSSANNCTFEYVSQPFLMDLEGKQGNFKNLREFVFKNIDGYFKIYSKHTPINLVRDLPQGFWALEPLVDLPIGINITRFQTLLALHRSYLTPGDSSSGWTAGAAAYYVGYLQPRTFLLKYNENGTITDAVDCALDPLSETKCTLKSFTVEKGIYQTSNFRVQPTESIVRFPNITNLCPFGEVFNATRFASVYAWNRKRISNCVADYSVLYNSASFSTFKCYGVSPTKLNDLCFTNVYADSFVIRGDEVRQIAPGQTGKIADYNYKLPDDFTGCVIAWNSNNLDSKVGGNYNYLYRLFRKSNLKPFERDISTEIYQAGSTPCNGVEGFNCYFPLQSYGFQPTNGVGYQPYRVVVLSFELLHAPATVCGPKKSTNLVKNKCVNFNFNGLTGTGVLTESNKKFLPFQQFGRDIADTTDAVRDPQTLEILDITPCSFGGVSVITPGTNTSNQVAVLYQDVNCTEVPVAIHADQLTPTWRVYSTGSNVFQTRAGCLIGAEHVNNSYECDIPIGAGICASYQTQTNSPRRARSVASQSIIAYTMSLGAENSVAYSNNSIAIPTNFTISVTTEILPVSMTKTSVDCTMYICGDSTECSNLLLQYGSFCTQLNRALTGIAVEQDKNTQEVFAQVKQIYKTPPIKDFGGFNFSQILPDPSKPSKRSFIEDLLFNKVTLADAGFIKQYGDCLGDIAARDLICAQKFNGLTVLPPLLTDEMIAQYTSALLAGTITSGWTFGAGAALQIPFAMQMAYRFNGCGVTQNVLYENQKLIANQFNSAIGKIQDSLSSTASALGKLQDVVNQNAQALNTLVKQLSSNFGAISSVLNDILSRLDKVEAEVQIDRLITGRLQSLQTYVTQQLIRAAEIRASANLAATKMSECVLGQSKRVDFCGKGCHLMSFPQSAPHGVVFLHVTYVPAQEKNFTTAPAICHDGKAHFPREGVFVSNGTHWFVTQRNFYEPQIITTDNTFVSGNCDVVIGIVNNTVYDPLQPELDSGGSGYIPEAPRDGQAYVRKDGEWVLLSTFL

SEQ ID NO: 10293 - protein, 1177 aa, Artificial Sequence
  SARS-CoV-2/China/WF0004/2020__EPI_ISL_413694 spike protein (1-1147)(I909C_Y1047C) Foldon construct
MFVFLVLLPLVSSQCVNLTTRTQLPPAYTNSFTRGVYYPDKVFRSSVLHSTQDLFLPFFSNVTWFHAIHVSGTNGTKRFDNPVLPFNDGVYFASTEKSNIIRGWIFGTTLDSKTQSLLIVNNATNVVIKVCEFQFCNDPFLGVYYHKNNKSWTESEFRVYSSANNCTFEYVSQPFLMDLEGKQGNFKNLREFVFKNIDGYFKIYSKHTPINLVRDLPQGFSALEPLVDLPIGINITRFQTLLALHRSYLTPGDSSSGWTAGAAAYYVGYLQPRTFLLKYNENGTITDAVDCALDPLSETKCTLKSFTVEKGIYQTSNFRVQPTESIVRFPNITNLCPFGEVFNATRFASVYAWNRKRISNCVADYSVLYNSASFSTFKCYGVSPTKLNDLCFTNVYADSFVIRGDEVRQIAPGQTGKIADYNYKLPDDFTGCVIAWNSNNLDSKVGGNYNYLYRLFRKSNLKPFERDISTEIYQAGSTPCNGVEGFNCYFPLQSYGFQPTNGVGYQPYRVVVLSFELLHAPATVCGPKKSTNLVKNKCVNFNFNGLTGTGVLTESNKKFLPFQQFGRDIADTTDAVRDPQTLEILDITPCSFGGVSVITPGTNTSNQVAVLYQDVNCTEVPVAIHADQLTPTWRVYSTGSNVFQTRAGCLIGAEHVNNSYECDIPIGAGICASYQTQTNSPRRARSVASQSIIAYTMSLGAENSVAYSNNSIAIPTNFTISVTTEILPVSMTKTSVDCTMYICGDSTECSNLLLQYGSFCTQLNRALTGIAVEQDKNTQEVFAQVKQIYKTPPIKDFGGFNFSQILPDPSKPSKRSFIEDLLFNKVTLADAGFIKQYGDCLGDIAARDLICAQKFNGLTVLPPLLTDEMIAQYTSALLAGTITSGWTFGAGAALQIPFAMQMAYRFNGCGVTQNVLYENQKLIANQFNSAIGKIQDSLSSTASALGKLQDVVNQNAQALNTLVKQLSSNFGAISSVLNDILSRLDKVEAEVQIDRLITGRLQSLQTYVTQQLIRAAEIRASANLAATKMSECVLGQSKRFDFCGKGCHLMSFPQSAPHGVVFLHVTYVPAQEKNFTTAPAICHDGKAHFPREGVFVSNGTHWFVTQRNFYEPQIITTDNTFVSGNCDVVIGIVNNTVYDPLQPELDSGGSGYIPEAPRDGQAYVRKDGEWVLLSTFL

SEQ ID NO: 10294 - protein, 1177 aa, Artificial Sequence
  SARS-CoV-2/China/WF0028/2020__EPI_ISL_413791 spike protein (1-1147)(I909C_Y1047C) Foldon construct
MFVFLVLLPLVSSQCVNLTTRTQLPPAYTNSFTRGVYYPDKVFRSSVLHSTQDLFLPFFSNVTWFHAIHVSGTNGTKRFDNPVLPFNDGVYFASTEKSNIIRGWIFGTTLDSKTQSLLIVNNATNVVIKVCEFQFCNDPFLGVYYHKNNKSWMESEFRVYSSANNCTFEYVSQPFLMDLEGKQGNFKNLREFVFKNIDGYFKIYSKHTPINLVRDLPQGFSALEPLVDLPIGINITRFQTLLALHRSYLTPGDSSSGWTAGAAAYYVGYLQPRTFLLKYNENGTITDAVDCALDPLSETKCTLKSFTVEKGIYQTSNFRVQPTESIVRFPNITNLCPFGEVFNATRFASVYAWNRKRISNCVADYSVLYNSASFSTFKCYGVSPTKLNDLCFTNVYADSFVIRGDEVRQIAPGQTGKIADYNYKLPDDFTGCVIAWNSNNLDSKVGGNYNYLYRLFRKSNLKPFERDISTEIYQAGSTPCNGVEGFNCYFPLQSYGFQPTNGVGYQPYRVVVLSFELLHAPATVCGPKKSTNLVKNKCVNFNFNGLTGTGVLTESNKKFLPFQQFGRDIADTTDAVRDPQTLEILDITPCSFGGVSVITPGTNTSNQVAVLYQDVNCTEVPVAIHADQLTPTWRVYSTGSNVFQTRAGCLIGAEHVNNSYECDIPIGAGICASYQTQTNSPRRARSVASQSIIAYTMSLGAENSVAYSNNSIAIPTNFTISVTTEILPVSMTKTSVDCTMYICGDSTECSNLLLQYGSFCTQLNRALTGIAVEQDKNTQEVFAQVKQIYKTPPIKDFGGFNFSQILPDPSKPSKRSFIEDLLFNKVTLADAGFIKQYGDCLGDIAARDLICAQKFNGLTVLPPLLTDEMIAQYTSALLAGTITSGWTFGAGAALQIPFAMQMAYRFNGCGVTQNVLYENQKLIANQFNSAIGKIQDSLSSTASALGKLQDVVNQNAQALNTLVKQLSSNFGAISSVLNDILSRLDKVEAEVQIDRLITGRLQSLQTYVTQQLIRAAEIRASANLAATKMSECVLGQSKRVDFCGKGCHLMSFPQSAPHGVVFLHVTYVPAQEKNFTTAPAICHDGKAHFPREGVFVSNGTHWFVTQRNFYEPQIITTDNTFVSGNCDVVIGIVNNTVYDPLQPELESGGSGYIPEAPRDGQAYVRKDGEWVLLSTFL

SEQ ID NO: 10295 - protein, 1177 aa, Artificial Sequence
  SARS-CoV-2/2019-nCoV/USA-CruiseA-18/2020__MT159716.1 spike protein (1-1147)(I909C_Y1047C) Foldon construct
MFVFLVLLPLVSSQCVNLTTRTQLPPAYTNSFTRGVYYPDKVFRSSVLHSTQDLFLPFFSNVTWFHAIHVSGTNGTKRFDNPVLPFNDGVYFASTEKSNIIRGWIFGTTLDSKTQSLLIVNNATNVVIKVCEFQFCNDPFLGVYYHKNNKSWMESELRVYSSANNCTFEYVSQPFLMDLEGKQGNFKNLREFVFKNIDGYFKIYSKHTPINLVRDLPQGFSALEPLVDLPIGINITRFQTLLALHRSYLTPGDSSSGWTAGAAAYYVGYLQPRTFLLKYNENGTITDAVDCALDPLSETKCTLKSFTVEKGIYQTSNFRVQPTESIVRFPNITNLCPFGEVFNATRFASVYAWNRKRISNCVADYSVLYNSASFSTFKCYGVSPTKLNDLCFTNVYADSFVIRGDEVRQIAPGQTGKIADYNYKLPDDFTGCVIAWNSNNLDSKVGGNYNYLYRLFRKSNLKPFERDISTEIYQAGSTPCNGVEGFNCYFPLQSYGFQPTNGVGYQPYRVVVLSFELLHAPATVCGPKKSTNLVKNKCVNFNFNGLTGTGVLTESNKKFLPFQQFGRDIADTTDAVRDPQTLEILDITPCSFGGVSVITPGTNTSNQVAVLYQDVNCTEVPVAIHADQLTPTWRVYSTGSNVFQTRAGCLIGAEHVNNSYECDIPIGAGICASYQTQTNSPRRARSVASQSIIAYTMSLGAENSVAYSNNSIAIPTNFTISVTTEILPVSMTKTSVDCTMYICGDSTECSNLLLQYGSFCTQLNRALTGIAVEQDKNTQEVFAQVKQIYKTPPIKDFGGFNFSQILPDPSKPSKRSFIEDLLFNKVTLADAGFIKQYGDCLGDIAARDLICAQKFNGLTVLPPLLTDEMIAQYTSALLAGTITSGWTFGAGAALQIPFAMQMAYRFNGCGVTQNVLYENQKLIANQFNSAIGKIQDSLSSTASALGKLQDVVNQNAQALNTLVKQLSSNFGAISSVLNDILSRLDKVEAEVQIDRLITGRLQSLQTYVTQQLIRAAEIRASANLAATKMSECVLGQSKRVDFCGKGCHLMSFPQSAPHGVVFLHVTYVPAQEKNFTTAPAICHDGKAHFPREGVFVSNGTHWFVTQRNFYEPQIITTDNTFVSGNCDVVIGIVNNTVYDPLQPELDSGGSGYIPEAPRDGQAYVRKDGEWVLLSTFL

SEQ ID NO: 10296 - protein, 1177 aa, Artificial Sequence
  SARS-CoV-2/SARS-CoV-2/Yunnan-01/human/2020/CHN__MT049951.1 spike protein (1-1147)(I909C_Y1047C) Foldon construct
MFVFLVLLPLVSSQCVNLTTRTQLPPANTNSFTRGVYYPDKVFRSSVLHSTQDLFLPFFSNVTWFHAIHVSGTNGTKRFDNPVLPFNDGVYFASTEKSNIIRGWIFGTTLDSKTQSLLIVNNATNVVIKVCEFQFCNDPFLGVYYHKNNKSWMESEFRVYSSANNCTFEYVSQPFLMDLEGKQGNFKNLREFVFKNIDGYFKIYSKHTPINLVRDLPQGFSALEPLVDLPIGINITRFQTLLALHRSYLTPGDSSSGWTAGAAAYYVGYLQPRTFLLKYNENGTITDAVDCALDPLSETKCTLKSFTVEKGIYQTSNFRVQPTESIVRFPNITNLCPFGEVFNATRFASVYAWNRKRISNCVADYSVLYNSASFSTFKCYGVSPTKLNDLCFTNVYADSFVIRGDEVRQIAPGQTGKIADYNYKLPDDFTGCVIAWNSNNLDSKVGGNYNYLYRLFRKSNLKPFERDISTEIYQAGSTPCNGVEGFNCYFPLQSYGFQPTNGVGYQPYRVVVLSFELLHAPATVCGPKKSTNLVKNKCVNFNFNGLTGTGVLTESNKKFLPFQQFGRDIADTTDAVRDPQTLEILDITPCSFGGVSVITPGTNTSNQVAVLYQDVNCTEVPVAIHADQLTPTWRVYSTGSNVFQTRAGCLIGAEHVNNSYECDIPIGAGICASYQTQTNSPRRARSVASQSIIAYTMSLGAENSVAYSNNSIAIPTNFTISVTTEILPVSMTKTSVDCTMYICGDSTECSNLLLQYGSFCTQLNRALTGIAVEQDKNTQEVFAQVKQIYKTPPIKDFGGFNFSQILPDPSKPSKRSFIEDLLFNKVTLADAGFIKQYGDCLGDIAARDLICAQKFNGLTVLPPLLTDEMIAQYTSALLAGTITSGWTFGAGAALQIPFAMQMAYRFNGCGVTQNVLYENQKLIANQFNSAIGKIQDSLSSTASALGKLQDVVNQNAQALNTLVKQLSSNFGAISSVLNDILSRLDKVEAEVQIDRLITGRLQSLQTYVTQQLIRAAEIRASANLAATKMSECVLGQSKRVDFCGKGCHLMSFPQSAPHGVVFLHVTYVPAQEKNFTTAPAICHDGKAHFPREGVFVSNGTHWFVTQRNFYEPQIITTDNTFVSGNCDVVIGIVNNTVYDPLQPELDSGGSGYIPEAPRDGQAYVRKDGEWVLLSTFL

SEQ ID NO: 10297 - protein, 1177 aa, Artificial Sequence
  SARS-CoV-2/USA/WA-UW292/2020__EPI_ISL_418077 spike protein (1-1147)(I909C_Y1047C) Foldon construct
MFVFLVLLPLVSSQCVNLTTRTQLPPAYTNSFTRGVYYPDKVFRSSVLHSTQDLFLPFFSNVTWFHAIHVSGTNGTKRFDNPVLPFNDGVYFASTEKSNIIRGWIFGTTLDSKTQSLLIVNNATNVVIKVCEFQFCNDPFLGVYYHKNNKSWMESEFRVYSSANNCTFEYVSQPFLMDLEGKQGNFKNLREFVFKNIDGYFKIYSKHTPINLVRDLPQGFSALEPLVDLPIGINITRFQTLLALHRSYLTPGDSSSGWTAGAAAYYVGYLQPRTFLLKYNENGTITDAVDCALDPLSETKCTLKSFTVEKGIYQTSNFRVQPTESIVRFPNITNLCPFGEVFNATRFASVYAWNRKRISNCVADYSVLYNSASFSTFKCYGVSPTKLNDLCFTNVYADSFVIRGDEVRQIAPGQTGKIADYNYKLPDDFTGCVIAWNSNNLDSKVGGNYNYLYRLFRKSNLKPFERDISTEIYQASSTPCNGVEGFNCYFPLQSYGFQPTNGVGYQPYRVVVLSFELLHAPATVCGPKKSTNLVKNKCVNFNFNGLTGTGVLTESNKKFLPFQQFGRDIADTTDAVRDPQTLEILDITPCSFGGVSVITPGTNTSNQVAVLYQDVNCTEVPVAIHADQLTPTWRVYSTGSNVFQTRAGCLIGAEHVNNSYECDIPIGAGICASYQTQTNSPRRARSVASQSIIAYTMSLGAENSVAYSNNSIAIPTNFTISVTTEILPVSMTKTSVDCTMYICGDSTECSNLLLQYGSFCTQLNRALTGIAVEQDKNTQEVFAQVKQIYKTPPIKDFGGFNFSQILPDPSKPSKRSFIEDLLFNKVTLADAGFIKQYGDCLGDIAARDLICAQKFNGLTVLPPLLTDEMIAQYTSALLAGTITSGWTFGAGAALQIPFAMQMAYRFNGCGVTQNVLYENQKLIANQFNSAIGKIQDSLSSTASALGKLQDVVNQNAQALNTLVKQLSSNFGAISSVLNDILSRLDKVEAEVQIDRLITGRLQSLQTYVTQQLIRAAEIRASANLAATKMSECVLGQSKRVDFCGKGCHLMSFPQSAPHGVVFLHVTYVPAQEKNFTTAPAICHDGKAHFPREGVFVSNGTHWFVTQRNFYEPQIITTDNTFVSGNCDVVIGIVNNTVYDPLQPELDSGGSGYIPEAPRDGQAYVRKDGEWVLLSTFL

SEQ ID NO: 10298 - protein, 1177 aa, Artificial Sequence
  SARS-CoV-2/Iceland/192/2020__EPI_ISL_417819 spike protein (1-1147)(I909C_Y1047C) Foldon construct
MFVFFVLLPLVSSQCVNLTTRTQLPPAYTNSFTRGVYYPDKVFRSSVLHSTQDLFLPFFSNVTWFHAIHVSGTNGTKRFDNPVLPFNDGVYFASTEKSNIIRGWIFGTTLDSKTQSLLIVNNATNVVIKVCEFQFCNDPFLGVYYHKNNKSWMESEFRVYSSANNCTFEYVSQPFLMDLEGKQGNFKNLREFVFKNIDGYFKIYSKHTPINLVRDLPQGFSALEPLVDLPIGINITRFQTLLALHRSYLTPGDSSSGWTAGAAAYYVGYLQPRTFLLKYNENGTITDAVDCALDPLSETKCTLKSFTVEKGIYQTSNFRVQPTESIVRFPNITNLCPFGEVFNATRFASVYAWNRKRISNCVADYSVLYNSASFSTFKCYGVSPTKLNDLCFTNVYADSFVIRGDEVRQIAPGQTGKIADYNYKLPDDFTGCVIAWNSNNLDSKVGGNYNYLYRLFRKSNLKPFERDISTEIYQAGSTPCNGVEGFNCYFPLQSYGFQPTNGVGYQPYRVVVLSFELLHAPATVCGPKKSTNLVKNKCVNFNFNGLTGTGVLTESNKKFLPFQQFGRDIADTTDAVRDPQTLEILDITPCSFGGVSVITPGTNTSNQVAVLYQGVNCTEVPVAIHADQLTPTWRVYSTGSNVFQTRAGCLIGAEHVNNSYECDIPIGAGICASYQTQTNSPRRARSVASQSIIAYTMSLGAENSVAYSNNSIAIPTNFTISVTTEILPVSMTKTSVDCTMYICGDSTECSNLLLQYGSFCTQLNRALTGIAVEQDKNTQEVFAQVKQIYKTPPIKDFGGFNFSQILPDPSKPSKRSFIEDLLFNKVTLADAGFIKQYGDCLGDIAARDLICAQKFNGLTVLPPLLTDEMIAQYTSALLAGTITSGWTFGAGAALQIPFAMQMAYRFNGCGVTQNVLYENQKLIANQFNSAIGKIQDSLSSTASALGKLQDVVNQNAQALNTLVKQLSSNFGAISSVLNDILSRLDKVEAEVQIDRLITGRLQSLQTYVTQQLIRAAEIRASANLAATKMSECVLGQSKRVDFCGKGCHLMSFPQSAPHGVVFLHVTYVPAQEKNFTTAPAICHDGKAHFPREGVFVSNGTHWFVTQRNFYEPQIITTDNTFVSGNCDVVIGIVNNTVYDPLQPELDSGGSGYIPEAPRDGQAYVRKDGEWVLLSTFL

SEQ ID NO: 10299 - protein, 1177 aa, Artificial Sequence
  SARS-CoV-2/Belgium/ULG-6939/2020__EPI_ISL_417020 spike protein (1-1147)(I909C_Y1047C) Foldon construct
MFVFLVLLPLVSSQCVNLTTRTQLPPAYTNSFTRGVYYPDKVFRSSVLHSTQDLFLPFFSNVTWFHAIHVSGTNGTKRFDNPVLPFNDGVYFASTEKSNIIRGWIFGTTLDSKTQSLLIVNNATNVVIKVCEFQFCNDPFLGVYYHKNNKSWMESEFRVYSSANNCTFEYVSQPFLMDLEGKQGNFKNLREFVFKNIDGYFKIYSKHTPINLVRDLPQGFSALEPLVDLPIGINITRFQTLLALHRSYLTPGDSSSGWTAGAAAYYVGYLQPRTFLLKYNENGTITDAVDCALDPLSETKCTLKSFTVEKGIYQTSNFRVQPTESIVRFPNITNLCPFGEVFNATRFASVYAWNRKRISNCVADYSVLYNSASFSTFKCYGVSPTKLNDLCFTNVYADSFVIRGDEVRQIAPGQTGKIADYNYKLPDDFTGCVIAWNSNNLDSKVGGNYNYLYRLFRKSNLKPFERDISTEIYQAGSTPCNGVEGFNCYFPLQSYGFQPTNGVGYQPYRVVVLSFELLHAPATVCGPKKSTNLVKNKCVNFNFNGLTGTGVLTESNKKFLPFQQFGRDIADTTDAVRDPQTLEILDITPCSFGGVSVITPGTNTSNQVAVLYQGVNCTEVPVAIHADQLTPTWRVYSTGSNVFQTRAGCLIGAEHVNNSYECDIPIGAGICASYQTQTNSPRRARSVASQSIIAYTMSLGAENSVVYSNNSIAIPTNFTISVTTEILPVSMTKTSVDCTMYICGDSTECSNLLLQYGSFCTQLNRALTGIAVEQDKNTQEVFAQVKQIYKTPPIKDFGGFNFSQILPDPSKPSKRSFIEDLLFNKVTLADAGFIKQYGDCLGDIAARDLICAQKFNGLTVLPPLLTDEMIAQYTSALLAGTITSGWTFGAGAALQIPFAMQMAYRFNGCGVTQNVLYENQKLIANQFNSAIGKIQDSLSSTASALGKLQDVVNQNAQALNTLVKQLSSNFGAISSVLNDILSRLDKVEAEVQIDRLITGRLQSLQTYVTQQLIRAAEIRASANLAATKMSECVLGQSKRVDFCGKGCHLMSFPQSAPHGVVFLHVTYVPAQEKNFTTAPAICHDGKAHFPREGVFVSNGTHWFVTQRNFYEPQIITTDNTFVSGNCDVVIGIVNNTVYDPLQPELDSGGSGYIPEAPRDGQAYVRKDGEWVLLSTFL

SEQ ID NO: 10300 - protein, 1177 aa, Artificial Sequence
  SARS-CoV-2/France/HF2496/2020__EPI_ISL_418231 spike protein (1-1147)(I909C_Y1047C) Foldon construct
MFVFLVLLPLVSSQCVNLTTRTQLPPAYTNSFTRGVYYPDKVFRSSVLHSTQDLFLPFFSNVTWFHAIHVSGTNGTKRFDNPVLPFNDGVYFASTEKSNIIRGWIFGTTLDSKTQSLLIVNNATNVVIKVCEFQFCNDPFLGVYYHKNNKSWMESEFRVYSSANNCTFEYVSQPFLMDLEGKQGNFKNLREFVFKNIDGYFKIYSKHTPINLVRDLPQGFSALEPLVDLPIGINITRFQTLLALHRSYLTPGDSSSGWTAGAAAYYVGYLQPRTFLLKYNENGTITDAVDCALDPLSETKCTLKSFTVEKGIYQTSNFRVQPTESIVRFPNITNLCPFGEVFNATRFASVYAWNRKRISNCVADYSVLYNSASFSTFKCYGVSPTKLNDLCFTNVYADSFVIRGDEVRQIAPGQTGKIADYNYKLPDDFTGCVIAWNSNNLDSKVGGNYNYLYRLFRKSNLKPFERDISTEIYQAGSTPCNGVEGFNCYFPLQSYGFQPTNGVGYQPYRVVVLSFELLHAPATVCGPKKSTNLVKNKCVNFNFNGLTGTGVLTESNKKFLPFQQFGRDIADTTDAVRDPQTLEILDITPCSFGGVSVITPGTNTSNQVAVLYQGVNCTEVPVAIHADQLTPTWRVYSTGSNVFQTRAGCLIGAEHVNNSYECDIPIGAGICASYQTQTNSPRRARSVASQSIIAYTMSLGAENSVAYSNNSIAIPTNFTISVTTEILPVSMTKTSVDCTMYICGDSTECSNLLLQYGSFCTQLNRALTGIAVEQDKNTQEVFAQVKQIYKTPPIKDFGGFNFSQILPDPSKPSKRSFIEDLLFNKVTLADAGFIKQYGDCLGDIVARDLICAQKFNGLTVLPPLLTDEMIAQYTSALLAGTITSGWTFGAGAALQIPFAMQMAYRFNGCGVTQNVLYENQKLIANQFNSAIGKIQDSLSSTASALGKLQDVVNQNAQALNTLVKQLSSNFGAISSVLNDILSRLDKVEAEVQIDRLITGRLQSLQTYVTQQLIRAAEIRASANLAATKMSECVLGQSKRVDFCGKGCHLMSFPQSAPHGVVFLHVTYVPAQEKNFTTAPAICHDGKAHFPREGVFVSNGTHWFVTQRNFYEPQIITTDNTFVSGNCDVVIGIVNNTVYDPLQPELDSGGSGYIPEAPRDGQAYVRKDGEWVLLSTFL

SEQ ID NO: 10301 - protein, 1177 aa, Artificial Sequence
  SARS-CoV-2/USA/WA-UW291/2020__EPI_ISL_418076 spike protein (1-1147)(I909C_Y1047C) Foldon construct
MFVFLVLLPLVSSQCVNLTTRTQLPPAYTNSFTRGVYYPDKVFRSSVLHSTQDLFLPFFSNVTWFHAIHVSGTNGTKRFDNPVLPFNDGVYFASTEKSNIIRGWIFGTTLDSKTQSLLIVNNATNVVIKVCEFQFCNDPFLGVYYHKNNKSWMESEFRVYSSANNCTFEYVSQPFLMDLEGKQGNFKNLREFVFKNIDGYFKIYSKHTPINLVRDLPQGFSALEPLVDLPIGINITRFQTLLALHRSYLTPGDSSSGWTAGAAAYYVGYLQPRTFLLKYNENGTITDAVDCALDPLSETKCTLKSFTVEKGIYQTSNFRVQPTESIVRFPNITNLCPFGEVFNATRFASVYAWNRKRISNCVADYSVLYNSASFSTFKCYGVSPTKLNDLCFTNVYADSFVIRGDEVRQIAPGQTGKIADYNYKLPDDFTGCVIAWNSNNLDSKVGGNYNYLYRLFRKSNLKPFERDISTEIYQAGSTPCNGVEGFNCYFPLQSYGFQPTNGVGYQPYRVVVLSFELLHAPATVCGPKKSTNLVKNKCVNFNFNGLTGTGVLTESNKKFLPFQQFGRDIADTTDAVRDPQTLEILDITPCSFGGVSVITPGTNTSNQVAVLYQGVNCTEVPVAIHADQLTPTWRVYSTGSNVFQTRAGCLIGAEHVNNSYECDIPIGAGICASYQTQTNSPRRARSVASQSIIAYTMSLGAENSVAYSNNSIAIPTNFTISVTTEILPVSMTKTSVDCTMYICGDSTECSNLLLQYGSFCTQLNRALTGIAVEQDKNTQEVFAQVKQIYKTPPIKDFGGFNFSQILPDPSKPSKRSFIEDLLFNKVTLADAGFIKQYGDCLGDIAARDLICAQKFNGLTVLPPLLTDEMIAQYTSALLAGTITSGWTFGAGAALQIPFAMQMAYRFNGCGVTQNVLYENQKLIANQFNSAIGKIQYSLSSTASALGKLQDVVNQNAQALNTLVKQLSSNFGAISSVLNDILSRLDKVEAEVQIDRLITGRLQSLQTYVTQQLIRAAEIRASANLAATKMSECVLGQSKRVDFCGKGCHLMSFPQSAPHGVVFLHVTYVPAQEKNFTTAPAICHDGKAHFPREGVFVSNGTHWFVTQRNFYEPQIITTDNTFVSGNCDVVIGIVNNTVYDPLQPELDSGGSGYIPEAPRDGQAYVRKDGEWVLLSTFL

SEQ ID NO: 10302 - protein, 1177 aa, Artificial Sequence; identical to SEQ ID NO: 10265
  SARS-CoV-2/Portugal/PT0034/2020__EPI_ISL_418019 spike protein (1-1147)(I909C_Y1047C) Foldon construct

SEQ ID NO: 10303 - protein, 1177 aa, Artificial Sequence; identical to SEQ ID NO: 10257
  SARS-CoV-2/Iceland/202/2020__EPI_ISL_417750 spike protein (1-1147)(I909C_Y1047C) Foldon construct

SEQ ID NO: 10304 - protein, 1177 aa, Artificial Sequence
  SARS-CoV-2/USA/WA-UW261/2020__EPI_ISL_418046 spike protein (1-1147)(I909C_Y1047C) Foldon construct
MFVFLVLLPLVSSQCVNLTTRTQLPPAYTNSFTRGVYYPDKVFRSSVLHSTQDLFLPFFSNVTWFHAIHVSGTNGTKRFDNPVLPFNDGVYFASTEKSNIIRGWIFGTTLDSKTQSLLIVNNATNVVIKVCEFQFCNDPFLGVYYHKNNKSWMESEFRVYSSANNCTFEYVSQPFLMDLEGKQGNFKNLREFVFKNIDGYFKIYSKHTPINLVRDLPQGFSALEPLVDLPIGINITRFQTLLALHRSYLTPGDSSSGWTAGAAAYYVGYLQPRTFLLKYNENGTITDAVDCALDPLSETKCTLKSFTVEKGIYQTSNFRVQPTESIVRFPNITNLCPFGEVFNATRFTSVYAWNRKRISNCVADYSVLYNSASFSTFKCYGVSPTKLNDLCFTNVYADSFVIRGDEVRQIAPGQTGKIADYNYKLPDDFTGCVIAWNSNNLDSKVGGNYNYLYRLFRKSNLKPFERDISTEIYQAGSTPCNGVEGFNCYFPLQSYGFQPTNGVGYQPYRVVVLSFELLHAPATVCGPKKSTNLVKNKCVNFNFNGLTGTGVLTESNKKFLPFQQFGRDIADTTDAVRDPQTLEILDITPCSFGGVSVITPGTNTSNQVAVLYQDVNCTEVPVAIHADQLTPTWRVYSTGSNVFQTRAGCLIGAEHVNNSYECDIPIGAGICASYQTQTNSPRRARSVASQSIIAYTMSLGAENSVAYSNNSIAIPTNFTISVTTEILPVSMTKTSVDCTMYICGDSTECSNLLLQYGSFCTQLNRALTGIAVEQDKNTQEVFAQVKQIYKTPPIKDFGGFNFSQILPDPSKPSKRSFIEDLLFNKVTLADAGFIKQYGDCLGDIAARDLICAQKFNGLTVLPPLLTDEMIAQYTSALLAGTITSGWTFGAGAALQIPFAMQMAYRFNGCGVTQNVLYENQKLIANQFNSAIGKIQDSLSSTASALGKLQDVVNQNAQALNTLVKQLSSNFGAISSVLNDILSRLDKVEAEVQIDRLITGRLQSLQTYVTQQLIRAAEIRASANLAATKMSECVLGQSKRVDFCGKGCHLMSFPQSAPHGVVFLHVTYVPAQEKNFTTAPAICHDGKAHFPREGVFVSNGTHWFVTQRNFYEPQIITTDNTFVSGNCDVVIGIVNNTVYDPLQPELDSGGSGYIPEAPRDGQAYVRKDGEWVLLSTFL

SEQ ID NO: 10305 - protein, 1177 aa, Artificial Sequence
  SARS-CoV-2/Portugal/PT0035/2020__EPI_ISL_418020 spike protein (1-1147)(I909C_Y1047C) Foldon construct
MFVFLVLLPLVSSQCVNLTTRTQLPPAYTNSFTRGVYYPDKVFRSSVLHSTQDLFLPFFSNVTWFHAIHVSGTNGTKRFDNPVLPFNDGVYFASTEKSNIIRGWIFGTTLDSKTQSLLIVNNATNVVIKVCEFQFCNDPFLGVYYHKNNKSWMESEFRVYSSANNCTFEYVSQPFLMDLEGKQGNFKNLREFVFKNIDGYFKIYSKHTPINLVRDLPQGFSALEPLVDLPIGINITRFQTLLALHRSYLTPGDSSSGWTAGAAAYYVGYLQPRTFLLKYNENGTITDAVDCALDPLSETKCTLKSFTVEKGIYQTSNFRVQPTESIVRFPNITNLCPFGEVFNATRFASVYAWNRKRISNCVADYSVLYNSASFSTFKCYGVSPTKLNDLCFTNVYADSFVIRGDEVRQIAPGQTGKIADYNYKLPDDFTGCVIAWNSNNLDSKVGGNYNYLYRLFRKSNLKPFERDISTEIYQAGSTPCNGVEGFNCYFPLQSYGFQPTNGVGYQPYRVVVLSFELLHAPATVCGPKKSTNLVKNKCVNFNFNGLTGTGVLTESNKKFLPFQQFGRDIADTTDAVRDPQTLEILDITPCSFGGVSVITPGTNTSNQVAVLYQDVNCTEVPVAIHADQLTPTWRVYSTGSNVFQTRAGCLIGAEHVNNSYECDIPIGAGICASYQTQTNSPRRARSVASQSIIAYTMSLGAENSVAYSNNSIAIPTNFTISVTTEILPVSMTKTSVDCTMYICGDSTECSNLLLQYGSFCTQLNRALTGIAVEQDKNTQEVFAQVKQIYKTPPIKDFGGFNFSQILPDPSKPSKRSFIEDLLFNKVTLADAGFIKQYGDCLGDISARDLICAQKFNGLTVLPPLLTDEMIAQYTSALLAGTITSGWTFGAGAALQIPFAMQMAYRFNGCGVTQNVLYENQKLIANQFNSAIGKIQDSLSSTASALGKLQDVVNQNAQALNTLVKQLSSNFGAISSVLNDILSRLDKVEAEVQIDRLITGRLQSLQTYVTQQLIRAAEIRASANLAATKMSECVLGQSKRVDFCGKGCHLMSFPQSAPHGVVFLHVTYVPAQEKNFTTAPAICHDGKAHFPREGVFVSNGTHWFVTQRNFYEPQIITTDNTFVSGNCDVVIGIVNNTVYDPLQPELDSGGSGYIPEAPRDGQAYVRKDGEWVLLSTFL

SEQ ID NO: 10306 - protein, 1177 aa, Artificial Sequence
  SARS-CoV-2/USA/NY-NYUMC7/2020__EPI_ISL_418192 spike protein (1-1147)(I909C_Y1047C) Foldon construct
MFVFLVLLPLVSSQCVNLTTRTQLPPAYTNSFTRGVYYPDKVFRSSVLHSTQDLFLPFFSNVTWFHAIHVSGTNGTKRFDNPVLPFNDGVYFASTEKSNIIRGWIFGTTLDSKTQSLLIVNNATNVVIKVCEFQFCNDPFLGVYHHKNNKSWMESEFRVYSSANNCTFEYVSQPFLMDLEGKQGNFKNLREFVFKNIDGYFKIYSKHTPINLVRDLPQGFSALEPLVDLPIGINITRFQTLLALHRSYLTPGDSSSGWTAGAAAYYVGYLQPRTFLLKYNENGTITDAVDCALDPLSETKCTLKSFTVEKGIYQTSNFRVQPTESIVRFPNITNLCPFGEVFNATRFASVYAWNRKRISNCVADYSVLYNSASFSTFKCYGVSPTKLNDLCFTNVYADSFVIRGDEVRQIAPGQTGKIADYNYKLPDDFTGCVIAWNSNNLDSKVGGNYNYLYRLFRKSNLKPFERDISTEIYQAGSTPCNGVEGFNCYFPLQSYGFQPTNGVGYQPYRVVVLSFELLHAPATVCGPKKSTNLVKNKCVNFNFNGLTGTGVLTESNKKFLPFQQFGRDIADTTDAVRDPQTLEILDITPCSFGGVSVITPGTNTSNQVAVLYQGVNCTEVPVAIHADQLTPTWRVYSTGSNVFQTRAGCLIGAEHVNNSYECDIPIGAGICASYQTQTNSPRRARSVASQSIIAYTMSLGAENSVAYSNNSIAIPTNFTISVTTEILPVSMTKTSVDCTMYICGDSTECSNLLLQYGSFCTQLNRALTGIAVEQDKNTQEVFAQVKQIYKTPPIKDFGGFNFSQILPDPSKPSKRSFIEDLLFNKVTLADAGFIKQYGDCLGDIAARDLICAQKFNGLTVLPPLLTDEMIAQYTSALLAGTITSGWTFGAGAALQIPFAMQMAYRFNGCGVTQNVLYENQKLIANQFNSAIGKIQDSLSSTASALGKLQDVVNQNAQALNTLVKQLSSNFGAISSVLNDILSRLDKVEAEVQIDRLITGRLQSLQTYVTQQLIRAAEIRASANLAATKMSECVLGQSKRVDFCGKGCHLMSFPQSAPHGVVFLHVTYVPAQEKNFTTAPAICHDGKAHFPREGVFVSNGTHWFVTQRNFYEPQIITTDNTFVSGNCDVVIGIVNNTVYDPLQPELDSGGSGYIPEAPRDGQAYVRKDGEWVLLSTFL

SEQ ID NO: 10307 - protein, 1177 aa, Artificial Sequence
  SARS-CoV-2/Iceland/189/2020__EPI_ISL_417709 spike protein (1-1147)(I909C_Y1047C) Foldon construct
MFVFLVLLPLVSSQCVNLTTRTQLPPAYTNSFTRGVYYPDKVFRSSVLHSTQDLFLPFFSNVTWFHAIHVSGTNGTKRFDNPVLPFNDGVYFASTEKSNIIRGWIFGTTLDSKTQSLLIVNNATNVVIKVCEFQFCNDPFLGVYYHKNNKSWMESEFRVYSSANNCTFEYVSQPFLMDLEGKQGNFKNLREFVFKNIDGYFKIYSKHTPINLVRDLPQGFSALEPLVDLPIGINITRFQTLLALHRSYLTPGDSSSGWTAGAAAYYVGYLQPRTFLLKYNENGTITDAVDCALDPLSETKCTLKSFTVEKGIYQTSNFRVQPTESIVRFPNITNLCPFGEVFNATRFASVYAWNRKRISNCVADYSVLYNSASFSTFKCYGVSPTKLNDLCFTNVYADSFVIRGDEVRQIAPGQTGKIADYNYKLPDDFTGCVIAWNSNNLDSKVGGNYNYLYRLFRKSNLKPFERDISTEIYQAGSTPCNGVEGFNCYFPLQSYGFQPTNGVGYQPYRVVVLSFELLHAPATVCGPKKSTNLVKNKCVNFNFNGLTGTGVLTESNKKFLPFQQFGRDIADTTDAVRDPQTLEILDITPCSFGGVSVITPGTNTSNQVAVLYQGVNCTEVPVAIHADQLTPTWRVYSTGSNVFQTRAGCLIGAEHVNNSYECDIPIGAGICASYQTQTNSPRRARSVASQSIIAYTMSLGAENSVAYSNNSIAIPTNFTISVTTEILPVSMTKTSVDCTMYICGDSTECSNLLLQYGSFCTQLNRALTGIAVEQDKNTQEVFAQVKQIYKTPPIKDFGGFNFSQILPDPSKPSKRSFIEDLLFNKVTLADAGFTKQYGDCLGDIAARDLICAQKFNGLTVLPPLLTDEMIAQYTSALLAGTITSGWTFGAGAALQIPFAMQMAYRFNGCGVTQNVLYENQKLIANQFNSAIGKIQDSLSSTASALGKLQDVVNQNAQALNTLVKQLSSNFGAISSVLNDILSRLDKVEAEVQIDRLITGRLQSLQTYVTQQLIRAAEIRASANLAATKMSECVLGQSKRVDFCGKGCHLMSFPQSAPHGVVFLHVTYVPAQEKNFTTAPAICHDGKAHFPREGVFVSNGTHWFVTQRNFYEPQIITTDNTFVSGNCDVVIGIVNNTVYDPLQPELDSGGSGYIPEAPRDGQAYVRKDGEWVLLSTFL

SEQ ID NO: 10308 - protein, 1177 aa, Artificial Sequence
  SARS-CoV-2/Australia/NSW56/2020__EPI_ISL_417408 spike protein (1-1147)(I909C_Y1047C) Foldon construct
MFVFLVLLPLVSSQCVNLTTRTQLPPAYTNSFTRGVYYPDKVFRSSVLHSTQDLFLPFFSNVTWFHAIHVSGTNGTKRFDNPVLPFNDGVYFASTEKSNIIRGWIFGTTLDSKTQSLLIVNNATNVVIKVCEFQFCNDPFLGVYYHKNNKSWMESEFRVYSSANNCTFEYVSQPFLMDLEGKQGNFKNLREFVFKNIDGYFKIYSKHTPINLVRDLPQGFSALEPLVDLPIGINITRFQTLLALHRSYLTPGDSSSGWTAGAAAYYVGYLQPRTFLLKYNENGTITDAVDCALDPLSETKCTLKSFTVEKGIYQTSNFRVQPTESIVRFPNITNLCPFGEVFNATRFASVYAWNRKRISNCVADYSVLYNSASFSTFKCYGVSPTKLNDLCFTNVYADSFVIRGDEVRQIAPGQTGKIADYNYKLPDDFTGCVIAWNSNNLDSKVGGNYNYLYRLFRKSNLKPFERDISTEIYQAGSTPCNGVEGFNCYFPLQSYGFQPTNGVGYQPYRVVVLSFELLHAPATVCGPKKSTNLVKNKCVNFNFNGLTGTGVLTESNKKFLPFQQFGRDIADTTDAVRDPQTLEILDITPCSFGGVSVITPGTNTSNQVAVLYQDVNCTEVPVAIHADQLTPTWRVYSTGSNVFQTRAGCLIGAEHVNNSYECDIPIGAGICASYQTQTNSPRRARSVASQSIIAYTMSLGAENSVAYSNNSIAIPTNFTISVTTEILPVSMTKTSVDCTMYICGDSTECSNLLLQYGSFCTQLNRALTGIAVEQDKNTQEVFAQVKQIYKTPPIKDFGGFNFSQILPDSSKPSKRSFIEDLLFNKVTLADAGFIKQYGDCLGDIAARDLICAQKFNGLTVLPPLLTDEMIAQYTSALLAGTITSGWTFGAGAALQIPFAMQMAYRFNGCGVTQNVLYENQKLIANQFNSAIGKIQDSLSSTASALGKLQDVVNQNAQALNTLVKQLSSNFGAISSVLNDILSRLDKVEAEVQIDRLITGRLQSLQTYVTQQLIRAAEIRASANLAATKMSECVLGQSKRVDFCGKGCHLMSFPQSAPHGVVFLHVTYVPAQEKNFTTAPAICHDGKAHFPREGVFVSNGTHWFVTQRNFYEPQIITTDNTFVSGNCDVVIGIVNNTVYDPLQPELDSGGSGYIPEAPRDGQAYVRKDGEWVLLSTFL

SEQ ID NO: 10309 - protein, 1177 aa, Artificial Sequence
  SARS-CoV-2/Iceland/280/2020__EPI_ISL_417608 spike protein (1-1147)(I909C_Y1047C) Foldon construct
MFVFLVLLPLVSSQCVNLTTRTQLPPAYTNSFTRGVYYPDKVFRSSVLHSTQDLFLPFFSNVTWFHAIHVSGTNGTKRFDNPVLPFNDGVYFASTEKSNIIRGWIFGTTLDSKTQSLLIVNNATNVVIKVCEFQFCNDPFLGVYYHKNNKSWMESEFRVYSSANNCTFEYVSQPFLMDLEGKQGNFKNLREFVFKNIDGYFKIYSKHTPINLVRDLPQGFSALEPLVDLPIGINITRFQTLLALHRSYLTPGDSSSGWTAGAAAYYVGYLQPRTFLLKYNENGTITDAVDCALDPLSETKCTLKSFTVEKGIYQTSNFRVQPTESIVRFPNITNLCPFGEVFNATRFASVYAWNRKRISNCVADYSVLYNSASFSTFKCYGVSPTKLNDLCFTNVYADSFVIRGDEVRQIAPGQTGKIADYNYKLPDDFTGCVIAWNSNNLDSKVGGNYNYLYRLFRKSNLKPFERDISTEIYQAGSTPCNGVEGFNCYFPLQSYGFQPTNGVGYQPYRVVVLSFELLHAPATVCGPKKSTNLVKNKCVNFNFNGLTGTGVLTESNKKFLPFQQFGRDIADTTDAVRDPQTLEILDITPCSFGGVSVITPGTNTSNQVAVLYQGVNCTEVPVAIHADQLTPTWRVYSTGSNVFQTRAGCLIGAEHVNNSYECDIPIGAGICASYHTQTNSPRRARSVASQSIIAYTMSLGAENSVAYSNNSIAIPTNFTISVTTEILPVSMTKTSVDCTMYICGDSTECSNLLLQYGSFCTQLNRALTGIAVEQDKNTQEVFAQVKQIYKTPPIKDFGGFNFSQILPDPSKPSKRSFIEDLLFNKVTLADAGFIKQYGDCLGDIAARDLICAQKFNGLTVLPPLLTDEMIAQYTSALLAGTITSGWTFGAGAALQIPFAMQMAYRFNGCGVTQNVLYENQKLIANQFNSAIGKIQDSLSSTASALGKLQDVVNQNAQALNTLVKQLSSNFGAISSVLNDILSRLDKVEAEVQIDRLITGRLQSLQTYVTQQLIRAAEIRASANLAATKMSECVLGQSKRVDFCGKGCHLMSFPQSAPHGVVFLHVTYVPAQEKNFTTAPAICHDGKAHFPREGVFVSNGTHWFVTQRNFYEPQIITTDNTFVSGNCDVVIGIVNNTVYDPLQPELDSGGSGYIPEAPRDGQAYVRKDGEWVLLSTFL

SEQ ID NO: 10310 - protein, 1177 aa, Artificial Sequence; identical to SEQ ID NO: 10265
  SARS-CoV-2/Iceland/247/2020__EPI_ISL_417575 spike protein (1-1147)(I909C_Y1047C) Foldon construct

SEQ ID NO: 10311 - protein, 1177 aa, Artificial Sequence
  SARS-CoV-2/Iceland/238/2020__EPI_ISL_417566 spike protein (1-1147)(I909C_Y1047C) Foldon construct
MFVFLVLLPLVSSQCVNLTTRTQLPPAYTNSFTRGVYYPDKVFRSSVLHSTQDLFLPFFSNVTWFHAIHVSGTNGTKRFDNPVLPFNDGVYFASTEKSNIIRGWIFGTTLDSKTQSLLIVNNATNVVIKVCEFQFCNDPFLGVYYHKNNKSWMESEFRVYSSANNCTFEYVSQPFLMDLEGKQGNFKNLREFVFKNIDGYFKIYSKHTPINLVRDLPQGFSALEPLVDLPIGINITRFQTLLALHRSYLTPGDSSSGWTAGAAAYYVGYLQPRTFLLKYNENGTITDAVDCALDPLSETKCTLKSFTVEKGIYQTSNFRVQPTESIVRFPNITNLCPFGEVFNATRFASVYAWNRKRISNCVADYSVLYNSASFSTFKCYGVSPTKLNDLCFTNVYADSFVIRGDEVRQIAPGQTGKIADYNYKLPDDFTGCVIAWNSNNLDSKVGGNYNYLYRLFRKSNLKPFERDISTEIYQAGSTPCNGVEGFNCYFPLQSYGFQPTNGVGYQPYRVVVLSFELLHAPATVCGPKKSTNLVKNKCVNFNFNGLTGTGVLTESNKKFLPFQQFGRDIADTTDAVRDPQTLEILDITPCSFGGVSVITPGTNTSNQVAVLYQGVNCTEVPVAIHADQLTPTWRVYSTGSNVFQTRAGCLIGAEHVNNSYECDIPIGAGICASYQTQTNSPRRARSVASQSIIAYTMSLGAENSVAYSNNSIAIPTNFTISVTTEILPVSMTKTSVDCTMYICGDSTECSNLLLQYGSFCTQLNRALTGIAVEQDKNTQEVFAQVKQIYKTPPIKDFGGFNFSQILPDPSKPSKRSFIEDLLFNKVTLADVGFIKQYGDCLGDIAARDLICAQKFNGLTVLPPLLTDEMIAQYTSALLAGTITSGWTFGAGAALQIPFAMQMAYRFNGCGVTQNVLYENQKLIANQFNSAIGKIQDSLSSTASALGKLQDVVNQNAQALNTLVKQLSSNFGAISSVLNDILSRLDKVEAEVQIDRLITGRLQSLQTYVTQQLIRAAEIRASANLAATKMSECVLGQSKRVDFCGKGCHLMSFPQSAPHGVVFLHVTYVPAQEKNFTTAPAICHDGKAHFPREGVFVSNGTHWFVTQRNFYEPQIITTDNTFVSGNCDVVIGIVNNTVYDPLQPELDSGGSGYIPEAPRDGQAYVRKDGEWVLLSTFL

SEQ ID NO: 10312 - protein, 1177 aa, Artificial Sequence
  SARS-CoV-2/Greece/16/2020__EPI_ISL_418265 spike protein (1-1147)(I909C_Y1047C) Foldon construct
MFVFLVLLPLVSSQCVNLTTRTQLPPAYTNSFTRGVYYPDKVFRSSVLHSTQDLFLPFFSNVTWFHAIHVSGTNGTKRFDNPVLPFNDGVYFASTEKSNIIRGWIFGTTLDSKTQSLLIVNNATNVVIKVCEFQFCNDPFLGVYYHKNNKSWMESEFRVYSSANNCTFEYVSQPFLMDLEGKQGNFKNLREFVFKNVDGYFKIYSKHTPINLVRDLPQGFSALEPLVDLPIGINITRFQTLLALHRSYLTPGDSSSGWTAGAAAYYVGYLQPRTFLLKYNENGTITDAVDCALDPLSETKCTLKSFTVEKGIYQTSNFRVQPTESIVRFPNITNLCPFGEVFNATRFASVYAWNRKRISNCVADYSVLYNSASFSTFKCYGVSPTKLNDLCFTNVYADSFVIRGDEVRQIAPGQTGKIADYNYKLPDDFTGCVIAWNSNNLDSKVGGNYNYLYRLFRKSNLKPFERDISTEIYQAGSTPCNGVEGFNCYFPLQSYGFQPTNGVGYQPYRVVVLSFELLHAPATVCGPKKSTNLVKNKCVNFNFNGLTGTGVLTESNKKFLPFQQFGRDIADTTDAVRDPQTLEILDITPCSFGGVSVITPGTNTSNQVAVLYQDVNCTEVPVAIHADQLTPTWRVYSTGSNVFQTRAGCLIGAEHVNNSYECDIPIGAGICASYQTQTNSPRRARSVASQSIIAYTMSLGAENSVAYSNNSIAIPTNFTISVTTEILPVSMTKTSVDCTMYICGDSTECSNLLLQYGSFCTQLNRALTGIAVEQDKNTQEVFAQVKQIYKTPPIKDFGGFNFSQILPDPSKPSKRSFIEDLLFNKVTLADAGFIKQYGDCLGDIAARDLICAQKFNGLTVLPPLLTDEMIAQYTSALLAGTITSGWTFGAGAALQIPFAMQMAYRFNGCGVTQNVLYENQKLIANQFNSAIGKIQDSLSSTASALGKLQDVVNQNAQALNTLVKQLSSNFGAISSVLNDILSRLDKVEAEVQIDRLITGRLQSLQTYVTQQLIRAAEIRASANLAATKMSECVLGQSKRVDFCGKGCHLMSFPQSAPHGVVFLHVTYVPAQEKNFTTAPAICHDGKAHFPREGVFVSNGTHWFVTQRNFYEPQIITTDNTFVSGNCDVVIGIVNNTVYDPLQPELDSGGSGYIPEAPRDGQAYVRKDGEWVLLSTFL

SEQ ID NO: 10313 - protein, 1177 aa, Artificial Sequence
  SARS-CoV-2/Iceland/319/2020__EPI_ISL_417648 spike protein (1-1147)(I909C_Y1047C) Foldon construct
MFVFLVLLPLVSSQCVNLTTRTQLPPAYTNSFTRGVYYPDKVFRSSVLHSTQDLFLPFFSNVTWFHAIHVSGTNGTKRFDNPVLPFNDGVYFASTEKSNIIRGWIFGTTLDSKTQSLLIVNNATNVVIKVCEFQFCNDPFLGVYYHKNNKSWMESEFRVYSSANNCTFEYVSQPFLIDLEGKQGNFKNLREFVFKNIDGYFKIYSKHTPINLVRDLPQGFSALEPLVDLPIGINITRFQTLLALHRSYLTPGDSSSGWTAGAAAYYVGYLQPRTFLLKYNENGTITDAVDCALDPLSETKCTLKSFTVEKGIYQTSNFRVQPTESIVRFPNITNLCPFGEVFNATRFASVYAWNRKRISNCVADYSVLYNSASFSTFKCYGVSPTKLNDLCFTNVYADSFVIRGDEVRQIAPGQTGKIADYNYKLPDDFTGCVIAWNSNNLDSKVGGNYNYLYRLFRKSNLKPFERDISTEIYQAGSTPCNGVEGFNCYFPLQSYGFQPTNGVGYQPYRVVVLSFELLHAPATVCGPKKSTNLVKNKCVNFNFNGLTGTGVLTESNKKFLPFQQFGRDIADTTDAVRDPQTLEILDITPCSFGGVSVITPGTNTSNQVAVLYQGVNCTEVPVAIHADQLTPTWRVYSTGSNVFQTRAGCLIGAEHVNNSYECDIPIGAGICASYQTQTNSPRRARSVASQSIIAYTMSLGAENSVAYSNNSIAIPTNFTISVTTEILPVSMTKTSVDCTMYICGDSTECSNLLLQYGSFCTQLNRALTGIAVEQDKNTQEVFAQVKQIYKTPPIKDFGGFNFSQILPDPSKPSKRSFIEDLLFNKVTLADAGFIKQYGDCLGDIAARDLICAQKFNGLTVLPPLLTDEMIAQYTSALLAGTITSGWTFGAGAALQIPFAMQMAYRFNGCGVTQNVLYENQKLIANQFNSAIGKIQDSLSSTASALGKLQDVVNQNAQALNTLVKQLSSNFGAISSVLNDILSRLDKVEAEVQIDRLITGRLQSLQTYVTQQLIRAAEIRASANLAATKMSECVLGQSKRVDFCGKGCHLMSFPQSAPHGVVFLHVTYVPAQEKNFTTAPAICHDGKAHFPREGVFVSNGTHWFVTQRNFYEPQIITTDNTFVSGNCDVVIGIVNNTVYDPLQPELDSGGSGYIPEAPRDGQAYVRKDGEWVLLSTFL

SEQ ID NO: 10314 - protein, 1177 aa, Artificial Sequence
  SARS-CoV-2/Congo/94/2020__EPI_ISL_417947 spike protein (1-1147)(I909C_Y1047C) Foldon construct
MFVFLVLLPLVSSQCVNLTTRTQLPPAYTNSFTRGVYYPDKVFRSSVLHSTQDLFLPFFSNVTWFHAIHVSGTNGTKRFDNPVLPFNDGVYFASTEKSNIIRGWIFGTTLDSKTQSLLIVNNATNVVIKVCEFQFCNDPFLGVYYHKNNKSWMESEFRVYSSANNCTFEYVSQPFLMDLEGKQGNFKNLREFVFKNIDGYFKIYSKHTPINLVRDLPQGFSALEPLVDLPIGINITRFQTLLALHRSYLTPGDSSSGWTAGAAAYYVGYLQPRTFLLKYNENGTITDAVDCALDPLSETKCTLKSFTVEKGIYQTSNFRVQPTESIVRFPNITNLCPFGEVFNATRFASVYAWNRKRISNCVADYSVLYNSASFSTFKCYGVSPTKLNDLCFTNVYADSFVIRGDEVRQIAPGQTGKIADYNYKLPDDFTGCVIAWNSNNLDSKVGGNYNYLYRLFRKSNLKPFERDISTEIYQAGSTPCNGVEGFNCYFPLQSYGFQPTNGVGYQPYRVVVLSFELLHAPATVCGPKKSTNLVKNKCVNFNFNGLTGTGVLTESNKKFLPFQQFGRDIADTTDAVRDPQTLEILDITPCSFGGVSVITPGTNTSNQVAVLYQGVNCTEVPVAIHADQLTPTWRVYSTGSNVFQTRAGCLIGAEHVNNSYECDIPIGAGICASYQTQTNSPRRARSVASQSIIAYTMSLGAENSVAYSNNSIAIPTNFTISVTTEILPVSMTKTSVDCTMYICGDSTECSNLLLQYGSFCTQLNRALTGIAVEQDKNTQEVFAQVKQIYKTPPIKDFGGFNFSQILPDPSKPSKRSFIEDILFNKVTLADAGFIKQYGDCLGDIAARDLICAQKFNGLTVLPPLLTDEMIAQYTSALLAGTITSGWTFGAGAALQIPFAMQMAYRFNGCGVTQNVLYENQKLIANQFNSAIGKIQDSLSSTASALGKLQDVVNQNAQALNTLVKQLSSNFGAISSVLNDILSRLDKVEAEVQIDRLITGRLQSLQTYVTQQLIRAAEIRASANLAATKMSECVLGQSKRVDFCGKGCHLMSFPQSAPHGVVFLHVTYVPAQEKNFTTAPAICHDGKAHFPREGVFVSNGTHWFVTQRNFYEPQIITTDNTFVSGNCDVVIGIVNNTVYDPLQPELDSGGSGYIPEAPRDGQAYVRKDGEWVLLSTFL

SEQ ID NO: 10315 - protein, 1177 aa, Artificial Sequence
  SARS-CoV-2/Congo/158/2020__EPI_ISL_417950 spike protein (1-1147)(I909C_Y1047C) Foldon construct
MFVFLVLLPLVSSQCVNLTTRTQLPPAYTNSFTRGVYYPDKVFRSSVLHSTQDLFLPFFSNVTWFHAIHVSGTNGTKRFDNPVLPFNDGVYFASTEKSNIIRGWIFGTTLDSKTQSLLIVNNATNVVIKVCEFQFCNDPFLGVYYHKNNKSWMESEFRVYSSANNCTFEYVSQPFLMDLEGKQGNFKNLREFVFKNIDGYFKIYSKHTPINLVRDLPQGFSALEPLVDLPIGINITRFQTLLALHRSYLTPGDSSSGWTAGAAAYYVGYLQPRTFLLKYNENGTITDAVDCALDPLSETKCTLKSFTVEKGIYQTSNFRVQPTESIVRFPNITNLCPFGEVFNATRFASVYAWNRKRISNCVADYSVLYNSASFSTFKCYGVSPTKLNDLCFTNVYADSFVIRGDEVRQIAPGQTGKIADYNYKLPDDFTGCVIAWNSNNLDSKVGGNYNYLYRLFRKSNLKPFERDISTEIYQAGSTPCNGVEGFNCYFPLQSYGFQPTNGVGYQPYRVVVLSFELLHAPATVCGPKKSTNLVKNKCVNFNFNGLTGTGVLTESNKKFLPFQQFGRDIADTTDAVRDPQTLEILDITPCSFGGVSVITPGTNTSNQVAVLYQDVNCTEVPVAIHADQLTPTWRVYSTGSNVFQTRAGCLIGAEHVNNSYECDIPIGAGICASYQTQTNSPRRARSVASQSIIAYTMSLGAENSVAYSNNSIAIPTNFTISVTTEILPVSMTKTSVDCTMYICGDSTECSNLLLQYGSFCTQLNRALTGIAVEQDKNTQEVFAQVKQIYKTPPIKDFGGFNFSQILPDPSKPSKRSFIEDLLFNKVTLADAGFIKQYGDCLGDIAARDLICAQKFNGLTVLPPLLTDEMIAQYTSALLAGTITSGWTFGAGAALQIPFAMQMAYRFNGCGVTQNVLYENQKLIANQFNSAIGKIQDSLSSTASALGKLQDVVNQNAQALNTLVKQLSSNFGAISSVLNDILSRLDKVEAEVQIDRLITGRLQSLQTYVTQQLIRAAEIRASANLAATKMSECVLGQSKRVDFCGKGCHLMSFPQSAPHGVVFLHVTYVPAQEKNFTTAPAICHDGKAHFPREGVFVSNGTHWFVTQRNFYEPQIITTDNTFLSGNCDVVIGIVNNTVYDPLQPELDSGGSGYIPEAPRDGQAYVRKDGEWVLLSTFL

SEQ ID NO: 10316 - protein, 1177 aa, Artificial Sequence
  SARS-CoV-2/USA/UT-00034/2020__EPI_ISL_417977 spike protein (1-1147)(I909C_Y1047C) Foldon construct
MFVFLVLLPLVSSQCVNLTTRTQLPPAYTNSFTRGVYYPDKVFRSSVLHSTQDLFLPFFSNVTWFHAIHVSGTNGTKRFDNPVLPFNDGVYFASTEKSNIIRGWIFGTTLDSKTQSLLIVNNATNVVIKVCEFQFCNDPFLGVYYYKNNKSWMESEFRVYSSANNCTFEYVSQPFLMDLEGKQGNFKNLREFVFKNIDGYFKIYSKHTPINLVRDLPQGFSALEPLVDLPIGINITRFQTLLALHRSYLTPGDSSSGWTAGAAAYYVGYLQPRTFLLKYNENGTITDAVDCALDPLSETKCTLKSFTVEKGIYQTSNFRVQPTESIVRFPNITNLCPFGEVFNATRFASVYAWNRKRISNCVADYSVLYNSASFSTFKCYGVSPTKLNDLCFTNVYADSFVIRGDEVRQIAPGQTGKIADYNYKLPDDFTGCVIAWNSNNLDSKVGGNYNYLYRLFRKSNLKPFERDISTEIYQAGSTPCNGVEGFNCYFPLQSYGFQPTNGVGYQPYRVVVLSFELLHAPATVCGPKKSTNLVKNKCVNFNFNGLTGTGVLTESNKKFLPFQQFGRDIADTTDAVRDPQTLEILDITPCSFGGVSVITPGTNTSNQVAVLYQGVNCTEVPVAIHADQLTPTWRVYSTGSNVFQTRAGCLIGAEHVNNSYECDIPIGAGICASYQTQTNSPRRARSVASQSIIAYTMSLGAENSVAYSNNSIAIPTNFTISVTTEILPVSMTKTSVDCTMYICGDSTECSNLLLQYGSFCTQLNRALTGIAVEQDKNTQEVFAQVKQIYKTPPIKDFGGFNFSQILPDPSKPSKRSFIEDLLFNKVTLADAGFIKQYGDCLGDIAARDLICAQKFNGLTVLPPLLTDEMIAQYTSALLAGTITSGWTFGAGAALQIPFAMQMAYRFNGCGVTQNVLYENQKLIANQFNSAIGKIQDSLSSTASALGKLQDVVNQNAQALNTLVKQLSSNFGAISSVLNDILSRLDKVEAEVQIDRLITGRLQSLQTYVTQQLIRAAEIRASANLAATKMSECVLGQSKRVDFCGKGCHLMSFPQSAPHGVVFLHVTYVPAQEKNFTTAPAICHDGKAHFPREGVFVSNGTHWFVTQRNFYEPQIITTDNTFVSGNCDVVIGIVNNTVYDPLQPELDSGGSGYIPEAPRDGQAYVRKDGEWVLLSTFL

SEQ ID NO: 10317 - protein, 1177 aa, Artificial Sequence
  SARS-CoV-2/USA/UT-00033/2020__EPI_ISL_417976 spike protein (1-1147)(I909C_Y1047C) Foldon construct
MFVFLVLLPLVSSQCVNLTTRTQLPPAYTNSFTRGVYYPDKVFRSSVLHSTQDLFLPFFSNVTWFHAIHVSGTNGTKRFDNPVLPFNDGVYFASTEKSNIIRGWIFGTTLDSKTQSLLIVNNATNVVIKVCEFQFCNDPFLGVYYHKNNKSWMESEFRVYSSANNCTFEYVSQPFLMDLEGKQGNFKNLREFVFKNIDGYFKIYSKHTPINLVRDLPQGFSALEPLVDLPIGINITRFQTLLALHRSYLTPGDSSSGLTAGAAAYYVGYLQPRTFLLKYNENGTITDAVDCALDPLSETKCTLKSFTVEKGIYQTSNFRVQPTESIVRFPNITNLCPFGEVFNATRFASVYAWNRKRISNCVADYSVLYNSASFSTFKCYGVSPTKLNDLCFTNVYADSFVIRGDEVRQIAPGQTGKIADYNYKLPDDFTGCVIAWNSNNLDSKVGGNYNYLYRLFRKSNLKPFERDISTEIYQAGSTPCNGVEGFNCYFPLQSYGFQPTNGVGYQPYRVVVLSFELLHAPATVCGPKKSTNLVKNKCVNFNFNGLTGTGVLTESNKKFLPFQQFGRDIADTTDAVRDPQTLEILDITPCSFGGVSVITPGTNTSNQVAVLYQGVNCTEVPVAIHADQLTPTWRVYSTGSNVFQTRAGCLIGAEHVNNSYECDIPIGAGICASYQTQTNSPRRARSVASQSIIAYTMSLGAENSVAYSNNSIAIPTNFTISVTTEILPVSMTKTSVDCTMYICGDSTECSNLLLQYGSFCTQLNRALTGIAVEQDKNTQEVFAQVKQIYKTPPIKDFGGFNFSQILPDPSKPSKRSFIEDLLFNKVTLADAGFIKQYGDCLGDIAARDLICAQKFNGLTVLPPLLTDEMIAQYTSALLAGTITSGWTFGAGAALQIPFAMQMAYRFNGCGVTQNVLYENQKLIANQFNSAIGKIQDSLSSTASALGKLQDVVNQNAQALNTLVKQLSSNFGAISSVLNDILSRLDKVEAEVQIDRLITGRLQSLQTYVTQQLIRAAEIRASANLAATKMSECVLGQSKRVDFCGKGCHLMSFPQSAPHGVVFLHVTYVPAQEKNFTTAPAICHDGKAHFPREGVFVSNGTHWFVTQRNFYEPQIITTDNTFVSGNCDVVIGIVNNTVYDPLQPELDSGGSGYIPEAPRDGQAYVRKDGEWVLLSTFL

SEQ ID NO: 10318 - protein, 1177 aa, Artificial Sequence
  SARS-CoV-2/USA/WI-13/2020__EPI_ISL_417516 spike protein (1-1147)(I909C_Y1047C) Foldon construct
MFVFLVLLPLVSSQCVNLTTRTQLPPAYTNSFTRGVYYPDKVFRSSVLHSTQDLFLPFFSNVTWFHAIHVSGTNGTKRFDNPVLPFNDGVYFASTEKSNIIRGWIFGTTLDSKTQSLLIVNNATNVVIKVCEFQFCNDPFLGVYYHKNNKSWMESEFRVYSSANNCTFEYVSQPFLMDLEGKQGNFKNLREFVFKNIDGYFKIYSKHTPINLVRDLPQGFSALEPLVDLPIGINITRFQTLLALHRSYLTPGDSSSGWTAGAAAYYVGYLQPRTFLLKYNENGTITDAVDCALDPLSETKCTLKSFTVEKGIYQTSNFRVLPTESIVRFPNITNLCPFGEVFNATRFASVYAWNRKRISNCVADYSVLYNSASFSTFKCYGVSPTKLNDLCFTNVYADSFVIRGDEVRQIAPGQTGKIADYNYKLPDDFTGCVIAWNSNNLDSKVGGNYNYLYRLFRKSNLKPFERDISTEIYQAGSTPCNGVEGFNCYFPLQSYGFQPTNGVGYQPYRVVVLSFELLHAPATVCGPKKSTNLVKNKCVNFNFNGLTGTGVLTESNKKFLPFQQFGRDIADTTDAVRDPQTLEILDITPCSFGGVSVITPGTNTSNQVAVLYQGVNCTEVPVAIHADQLTPTWRVYSTGSNVFQTRAGCLIGAEHVNNSYECDIPIGAGICASYQTQTNSPRRARSVASQSIIAYTMSLGAENSVAYSNNSIAIPTNFTISVTTEILPVSMTKTSVDCTMYICGDSTECSNLLLQYGSFCTQLNRALTGIAVEQDKNTQEVFAQVKQIYKTPPIKDFGGFNFSQILPDPSKPSKRSFIEDLLFNKVTLADAGFIKQYGDCLGDIAARDLICAQKFNGLTVLPPLLTDEMIAQYTSALLAGTITSGWTFGAGAALQIPFAMQMAYRFNGCGVTQNVLYENQKLIANQFNSAIGKIQDSLSSTASALGKLQDVVNQNAQALNTLVKQLSSNFGAISSVLNDILSRLDKVEAEVQIDRLITGRLQSLQTYVTQQLIRAAEIRASANLAATKMSECVLGQSKRVDFCGKGCHLMSFPQSAPHGVVFLHVTYVPAQEKNFTTAPAICHDGKAHFPREGVFVSNGTHWFVTQRNFYEPQIITTDNTFVSGNCDVVIGIVNNTVYDPLQPELDSGGSGYIPEAPRDGQAYVRKDGEWVLLSTFL

SEQ ID NO: 10319 - protein, 1176 aa, Artificial Sequence
  SARS-CoV-2/India/1-27/2020__EPI_ISL_413522 spike protein (1-1146)(I908C_Y1046C) Foldon construct
MFVFLVLLPLVSSQCVNLTTRTQLPPAYTNSFTRGVYYPDKVFRSSVLHSTQDLFLPFFSNVTWFHAIHVSGTNGTKRFDNPVLPFNDGVYFASTEKSNIIRGWIFGTTLDSKTQSLLIVNNATNVVIKVCEFQFCNDPFLGVYHKNNKSWMESEFRVYSSANNCTFEYVSQPFLMDLEGKQGNFKNLREFVFKNIDGYFKIYSKHTPINLVRDLPQGFSALEPLVDLPIGINITRFQTLLALHRSYLTPGDSSSGWTAGAAAYYVGYLQPRTFLLKYNENGTITDAVDCALDPLSETKCTLKSFTVEKGIYQTSNFRVQPTESIVRFPNITNLCPFGEVFNATRFASVYAWNRKRISNCVADYSVLYNSASFSTFKCYGVSPTKLNDLCFTNVYADSFVIRGDEVIQIAPGQTGKIADYNYKLPDDFTGCVIAWNSNNLDSKVGGNYNYLYRLFRKSNLKPFERDISTEIYQAGSTPCNGVEGFNCYFPLQSYGFQPTNGVGYQPYRVVVLSFELLHAPATVCGPKKSTNLVKNKCVNFNFNGLTGTGVLTESNKKFLPFQQFGRDIADTTDAVRDPQTLEILDITPCSFGGVSVITPGTNTSNQVAVLYQDVNCTEVPVAIHADQLTPTWRVYSTGSNVFQTRAGCLIGAEHVNNSYECDIPIGAGICASYQTQTNSPRRARSVASQSIIAYTMSLGAENSVAYSNNSIAIPTNFTISVTTEILPVSMTKTSVDCTMYICGDSTECSNLLLQYGSFCTQLNRALTGIAVEQDKNTQEVFAQVKQIYKTPPIKDFGGFNFSQILPDPSKPSKRSFIEDLLFNKVTLADAGFIKQYGDCLGDIAARDLICAQKFNGLTVLPPLLTDEMIAQYTSALLAGTITSGWTFGAGAALQIPFAMQMAYRFNGCGVTQNVLYENQKLIANQFNSAIGKIQDSLSSTASALGKLQDVVNQNAQALNTLVKQLSSNFGAISSVLNDILSRLDKVEAEVQIDRLITGRLQSLQTYVTQQLIRAAEIRASANLAATKMSECVLGQSKRVDFCGKGCHLMSFPQSAPHGVVFLHVTYVPAQEKNFTTAPAICHDGKAHFPREGVFVSNGTHWFVTQRNFYEPQIITTDNTFVSGNCDVVIGIVNNTVYDPLQPELDSGGSGYIPEAPRDGQAYVRKDGEWVLLSTFL

SEQ ID NO: 10320 - protein, 1171 aa, Artificial Sequence
  SARS-CoV-2/pangolin/Guangxi/P4L/2017__EPI_ISL_410538 spike protein (1-1141)(I903C_Y1041C) Foldon construct
MFVFLFVLPLVSSQCVNLTTRTGIPPGYTNSSTRGVYYPDKVFRSSILHLTQDLFLPFFSNVTWFNTINYQGGFKKFDNPVLPFNDGVYFASTEKSNIIRGWIFGTTLDARTQSLLIVNNATNVVIKVCEFQFCTDPFLGVYYHNNNKTWVENEFRVYSSANNCTFEYISQPFLMDLEGKQGNFKNLREFVFKNVDGYFKIYSKHTPIDLVRDLPRGFAALEPLVDLPIGINITRFQTLLALHRSYLTPGNLESGWTTGAAAYYVGYLQQRTFLLSYNQNGTITDAVDCSLDPLSETKCTLKSLTVEKGIYQTSNFRVQPTISIVRFPNITNLCPFGEVFNASKFASVYAWNRKRISNCVADYSVLYNSTSFSTFKCYGVSPTKLNDLCFTNVYADSFVVKGDEVRQIAPGQTGVIADYNYKLPDDFTGCVIAWNSVKQDALTGGNYGYLYRLFRKSKLKPFERDISTEIYQAGSTPCNGQVGLNCYYPLERYGFHPTTGVNYQPFRVVVLSFELLNGPATVCGPKLSTTLVKDKCVNFNFNGLTGTGVLTTSKKQFLPFQQFGRDISDTTDAVRDPQTLEILDITPCSFGGVSVITPGTNTSNQVAVLYQDVNCTEVPMAIHAEQLTPAWRVYSAGANVFQTRAGCLVGAEHVNNSYECDIPVGAGICASYHSMSSLRSVNQRSIIAYTMSLGAENSVAYSNNSIAIPTNFTISVTTEILPVSMTKTSVDCTMYICGDSIECSNLLLQYGSFCTQLNRALTGIAVEQDKNTQEVFAQVKQIYKTPPIKDFGGFNFSQILPDPSKPSKRSFIEDLLFNKVTLADAGFIKQYGDCLGDIAARDLICAQKFNGLTVLPPLLTDEMIAQYTSALLAGTITSGWTFGAGAALQIPFAMQMAYRFNGCGVTQNVLYENQKLIANQFNSAIGKIQDSLSSTASALGKLQDVVNQNAQALNTLVKQLSSNFGAISSVLNDILSRLDKVEAEVQIDRLITGRLQSLQTYVTQQLIRAAEIRASANLAATKMSECVLGQSKRVDFCGKGCHLMSFPQSAPHGVVFLHVTYVPAQEKNFTTAPAICHEGKAHFPREGVFVSNGTHWFITQRNFYEPQIITTDNTFVSGSCDVVIGIVNNTVYDPLQPELDSGGSGYIPEAPRDGQAYVRKDGEWVLLSTFL

SEQ ID NO: 10321 - protein, 1171 aa, Artificial Sequence
  SARS-CoV-2/pangolin/Guangxi/P5L/2017__EPI_ISL_410540 spike protein (1-1141)(I903C_Y1041C) Foldon construct
MFVFLFVLPLVSSQCVNLTTRTGIPPGYTNSSTRGVYYPDKVFRSSILHLTQDLFLPFFSNVTWFNTINYQGGFKKFDNPVLPFNDGVYFASTEKSNIIRGWIFGTTLDARTQSLLIVNNATNVVIKVCEFQFCTDPFLGVYYHNNNKTWVENEFRVYSSANNCTFEYISQPFLMDLEGKQGNFKNLREFVFKNVDGYFKIYSKHTPIDLVRDLPRGFAALEPLVDLPIGINITRFQTLLALHRSYLTPGKLESGWTTGAAAYYVGYLQQRTFLLSYNQNGTITDAVDCSLDPLSETKCTLKSLTVEKGIYQTSNFRVQPTISIVRFPNITNLCPFGEVFNASKFASVYAWNRKRISNCVADYSVLYNSTSFSTFKCYGVSPTKLNDLCFTNVYADSFVVKGDEVRQIAPGQTGVIADYNYKLPDDFTGCVIAWNSVKQDALTGGNYGYLYRLFRKSKLKPFERDISTEIYQAGSTPCNGQVGLNCYYPLERYGFHPTTGVNYQPFRVVVLSFELLNGPATVCGPKLSTTLVKDKCVNFNFNGLTGTGVLTTSKKQFLPFQQFGRDISDTTDAVRDPQTLEILDITPCSFGGVSVITPGTNTSNQVAVLYQDVNCTEVPMAIHAEQLTPAWRVYSAGANVFQTRAGCLVGAEHVNNSYECDIPVGAGICASYHSMSSFRSVNQRSIIAYTMSLGAENSVAYSNNSIAIPTNFTISVTTEILPVSMTKTSVDCTMYICGDSIECSNLLLQYGSFCTQLNRALTGIAVEQDKNTQEVFAQVKQIYKTPPIKDFGGFNFSQILPDPSKPSKRSFIEDLLFNKVTLADAGFIKQYGDCLGDIAARDLICAQKFNGLTVLPPLLTDEMIAQYTSALLAGTITSGWTFGAGAALQIPFAMQMAYRFNGCGVTQNVLYENQKLIANQFNSAIGKIQDSLSSTASALGKLQDVVNQNAQALNTLVKQLSSNFGAISSVLNDILSRLDKVEAEVQIDRLITGRLQSLQTYVTQQLIRAAEIRASANLAATKMSECVLGQSKRVDFCGKGCHLMSFPQSAPHGVVFLHVTYVPAQEKNFTTAPAICHEGKAHFPREGVFVSNGTHWFITQRNFYEPQIITTDNTFVSGSCDVVIGIVNNTVYDPLQPELDSGGSGYIPEAPRDGQAYVRKDGEWVLLSTFL

SEQ ID NO: 10322 - protein, 1171 aa, Artificial Sequence
  SARS-CoV-2/pangolin/Guangxi/P5E/2017__EPI_ISL_410541 spike protein (1-1141)(I903C_Y1041C) Foldon construct
MFVFLFVLPLVSSQCVNLTTRTGIPPGYTNSSTRGVYYPDKVFRSSILHLTQDLFLPFFSNVTWFNTITYQGGSKKFDNPVLPFNDGVYFASTEKSNIIRGWIFGTTLDARTQSLLIVNNATNVVIKVCEFQFCTDPFLGVYYHNNNKTWVENEFRVYSSANNCTFEYISQPFLMDLEGKQGNFKNLREFVFKNVDGYFKIYSKHTPIDLVRDLPRGFAALEPLVDLPIGINITRFQTLLALHRSYLTPGKLESGWTTGAAAYYVGYLQQRTFLLSYNQNGTITDAVDCSLDPLSETKCTLKSLTVEKGIYQTSNFRVQPTISIVRFPNITNLCPFGEVFNASKFASVYAWNRKRISNCVADYSVLYNSTSFSTFKCYGVSPTKLNDLCFTNVYADSFVVKGDEVRQIAPGQTGVIADYNYKLPDDFTGCVIAWNSVKQDALTGDNYGYLYRLFRKSKLKPFERDISTEIYQAGSTPCNGQVGLNCYYPLERYGFHPTTGVNYQPFRVVVLSFELLNGPATVCGPKLSTTLVKDKCVNFNFNGLTGTGVLTTSKKQFLPFQQFGRDISDTTDAVRDPQTLEILDITPCSFGGVSVITPGTNTSNQVAVLYQDVNCTEVPMAIHAEQLTPAWRVYSAGANVFQTRAGCLVGAEHVNNSYECDIPVGAGICASYHSMSSFRSVNQRSIIAYTMSLGAENSVAYSNNSIAIPTNFTISVTTEILPVSMTKTSVDCTMYICGDSIECSNLLLQYGSFCTQLNRALTGIAVEQDKNTQEVFAQVKQIYKTPPIKDFGGFNFSQILPDPSKPSKRSFIEDLLFNKVTLADAGFIKQYGDCLGDIAARDLICAQKFNGLTVLPPLLTDEMIAQYTSALLAGTITSGWTFGAGAALQIPFAMQMAYRFNGCGVTQNVLYENQKLIANQFNSAIGKIQDSLSSTASALGKLQDVVNQNAQALNTLVKQLSSNFGAISSVLNDILSRLDKVEAEVQIDRLITGRLQSLQTYVTQQLIRAAEIRASANLAATKMSECVLGQSKRVDFCGKGCHLMSFPQSAPHGVVFLHVTYVPAQEKNFTTAPAICHEGKAHFPREGVFVSNGTHWFITQRNFYEPQIITTDNTFVSGSCDVVIGIVNNTVYDPLQPELDSGGSGYIPEAPRDGQAYVRKDGEWVLLSTFL

SEQ ID NO: 10323 - protein, 1169 aa, Artificial Sequence
  SARS-CoV-2/pangolin/Guangxi/P1E/2017__EPI_ISL_410539 spike protein (1-1139)(I901C_Y1039C) Foldon construct
MFVFLFVLPLVSSQCVNLTTRTGIQPGYTNSSTRGVYYPDKVFRSSILHLTQDLFLPFFSNVTWFNTINYQGGFKKFDNPVLPFNDGVYFASTEKSNIIRGWIFGTTLDARTQSLLIVNNATNVVIKVCEFQFCTDPFLGVYYHNNNKTWVENEFRVYSSANNCTFEYISQPFLMDLEGKQGNFKNLREFVFKNVDGYFKIYSKHTPIDLVRDLPRGFAALEPLVDLPIGINITRFQTLLALHRSYLTPGKLESGWTTGAAAYYVGYLQQRTFLLSYNQNGTITDAVDCSLDPLSETKCTLKSLTVEKGIYQTSNFRVQPTISIVRFPNITNLCPFGEVFNASKFASVYAWNRKRISNCVADYSVLYNSTSFSTFKCYGVSPTKLNDLCFTNVYADSFVVKGDEVRQIAPGQTGVIADYNYKLPDDFTGCVIAWNSVKQDALTGGNYLYRLFRKSKLKPFERDISTEIYQAGSTPCNGQVGLNCYYPLERYGFHPTTGVNYQPFRVVVLSFELLNGPATVCGPKLSTTLVKDKCVNFNFNGLTGTGVLTTSKKQFLPFQQFGRDISDTTDAVRDPQTLEILDITPCSFGGVSVITPGTNTSNQVAVLYQDVNCTEVPMAIHAEQLTPAWRVYSAGANVFQTRAGCLVGAEHVNNSYECDIPVGAGICASYHSMSSLRSVNQRSIIAYTMSLGAENSVAYSNNSIAIPTNFTISVTTEILPVSMTKTSVDCTMYICGDSIECSNLLLQYGSFCTQLNRALTGIAVEQDKNTQEVFAQVKQIYKTPPIKDFGGFNFSQILPDPSKPSKRSFIEDLLFNKVTLADAGFIKQYGDCLGDIAARDLICAQKFNGLTVLPPLLTDEMIAQYTSALLAGTITSGWTFGAGAALQIPFAMQMAYRFNGCGVTQNVLYENQKLIANQFNSAIGKIQDSLSSTASALGKLQDVVNQNAQALNTLVKQLSSNFGAISSVLNDILSRLDKVEAEVQIDRLITGRLQSLQTYVTQQLIRAAEIRASANLAATKMSECVLGQSKRVDFCGKGCHLMSFPQSAPHGVVFLHVTYVPAQEKNFTTAPAICHEGKAHFPREGVFVSNGTHWFITQRNFYEPQIITTDNTFVSGSCDVVIGIVNNTVYDPLQPELDSGGSGYIPEAPRDGQAYVRKDGEWVLLSTFL

SEQ ID NO: 10324 - protein, 1177 aa, Artificial Sequence
  SARS-CoV-2/Wuhan/WIV05/2019__EPI_ISL_402128 spike protein (1-1147)(Q965C_S1003C) Foldon construct
MFVFLVLLPLVSSQCVNLTTRTQLPPAYTNSFTRGVYYPDKVFRSSVLHSTQDLFLPFFSNVTWFHAIHVSGTNGTKRFDNPVLPFNDGVYFASTEKSNIIRGWIFGTTLDSKTQSLLIVNNATNVVIKVCEFQFCNDPFLGVYYHKNNKSWMESEFRVYSSANNCTFEYVSQPFLMDLEGKQGNFKNLREFVFKNIDGYFKIYSKHTPINLVRDLPQGFSALEPLVDLPIGINITRFQTLLALHRSYLTPGDSSSGWTAGAAAYYVGYLQPRTFLLKYNENGTITDAVDCALDPLSETKCTLKSFTVEKGIYQTSNFRVQPTESIVRFPNITNLCPFGEVFNATRFASVYAWNRKRISNCVADYSVLYNSASFSTFKCYGVSPTKLNDLCFTNVYADSFVIRGDEVRQIAPGQTGKIADYNYKLPDDFTGCVIAWNSNNLDSKVGGNYNYLYRLFRKSNLKPFERDISTEIYQAGSTPCNGVEGFNCYFPLQSYGFQPTNGVGYQPYRVVVLSFELLHAPATVCGPKKSTNLVKNKCVNFNFNGLTGTGVLTESNKKFLPFQQFGRDIADTTDAVRDPQTLEILDITPCSFGGVSVITPGTNTSNQVAVLYQDVNCTEVPVAIHADQLTPTWRVYSTGSNVFQTRAGCLIGAEHVNNSYECDIPIGAGICASYQTQTNSPRRARSVASQSIIAYTMSLGAENSVAYSNNSIAIPTNFTISVTTEILPVSMTKTSVDCTMYICGDSTECSNLLLQYGSFCTQLNRALTGIAVEQDKNTQEVFAQVKQIYKTPPIKDFGGFNFSQILPDPSKPSKRSFIEDLLFNKVTLADAGFIKQYGDCLGDIAARDLICAQKFNGLTVLPPLLTDEMIAQYTSALLAGTITSGWTFGAGAALQIPFAMQMAYRFNGIGVTQNVLYENQKLIANQFNSAIGKIQDSLSSTASALGKLQDVVNQNAQALNTLVKCLSSNFGAISSVLNDILSRLDKVEAEVQIDRLITGRLQCLQTYVTQQLIRAAEIRASANLAATKMSECVLGQSKRVDFCGKGYHLMSFPQSAPHGVVFLHVTYVPAQEKNFTTAPAICHDGKAHFPREGVFVSNGTHWFVTQRNFYEPQIITTDNTFVSGNCDVVIGIVNNTVYDPLQPELDSGGSGYIPEAPRDGQAYVRKDGEWVLLSTFL

SEQ ID NO: 10325 - protein, 1173 aa, Artificial Sequence
  SARS-CoV-2/bat/Yunnan/RaTG13/2013__EPI_ISL_402131 spike protein (1-1143)(Q961C_S999C) Foldon construct
MFVFLVLLPLVSSQCVNLTTRTQLPPAYTNSSTRGVYYPDKVFRSSVLHLTQDLFLPFFSNVTWFHAIHVSGTNGIKRFDNPVLPFNDGVYFASTEKSNIIRGWIFGTTLDSKTQSLLIVNNATNVVIKVCEFQFCNDPFLGVYYHKNNKSWMESEFRVYSSANNCTFEYVSQPFLMDLEGKQGNFKNLREFVFKNIDGYFKIYSKHTPINLVRDLPPGFSALEPLVDLPIGINITRFQTLLALHRSYLTPGDSSSGWTAGAAAYYVGYLQPRTFLLKYNENGTITDAVDCALDPLSETKCTLKSFTVEKGIYQTSNFRVQPTDSIVRFPNITNLCPFGEVFNATTFASVYAWNRKRISNCVADYSVLYNSTSFSTFKCYGVSPTKLNDLCFTNVYADSFVITGDEVRQIAPGQTGKIADYNYKLPDDFTGCVIAWNSKHIDAKEGGNFNYLYRLFRKANLKPFERDISTEIYQAGSKPCNGQTGLNCYYPLYRYGFYPTDGVGHQPYRVVVLSFELLNAPATVCGPKKSTNLVKNKCVNFNFNGLTGTGVLTESNKKFLPFQQFGRDIADTTDAVRDPQTLEILDITPCSFGGVSVITPGTNASNQVAVLYQDVNCTEVPVAIHADQLTPTWRVYSTGSNVFQTRAGCLIGAEHVNNSYECDIPIGAGICASYQTQTNSRSVASQSIIAYTMSLGAENSVAYSNNSIAIPTNFTISVTTEILPVSMTKTSVDCTMYICGDSTECSNLLLQYGSFCTQLNRALTGIAVEQDKNTQEVFAQVKQIYKTPPIKDFGGFNFSQILPDPSKPSKRSFIEDLLFNKVTLADAGFIKQYGDCLGDIAARDLICAQKFNGLTVLPPLLTDEMIAQYTSALLAGTITSGWTFGAGAALQIPFAMQMAYRFNGIGVTQNVLYENQKLIANQFNSAIGKIQDSLSSTASALGKLQDVVNQNAQALNTLVKCLSSNFGAISSVLNDILSRLDKVEAEVQIDRLITGRLQCLQTYVTQQLIRAAEIRASANLAATKMSECVLGQSKRVDFCGKGYHLMSFPQSAPHGVVFLHVTYVPAQEKNFTTAPAICHDGKAHFPREGVFVSNGTHWFVTQRNFYEPQIITTDNTFVSGSCDVVIGIVNNTVYDPLQPELDSGGSGYIPEAPRDGQAYVRKDGEWVLLSTFL

SEQ ID NO: 10326 - protein, 1177 aa, Artificial Sequence
  SARS-CoV-2/Wuhan/HBCDC-HB-01/2019__EPI_ISL_402132 spike protein (1-1147)(Q965C_S1003C) Foldon construct
MFVFLVLLPLVSSQCVNLTTRTQLPPAYTNSITRGVYYPDKVFRSSVLHSTQDLFLPFFSNVTWFHAIHVSGTNGTKRFDNPVLPFNDGVYFASTEKSNIIRGWIFGTTLDSKTQSLLIVNNATNVVIKVCEFQFCNDPFLGVYYHKNNKSWMESEFRVYSSANNCTFEYVSQPFLMDLEGKQGNFKNLREFVFKNIDGYFKIYSKHTPINLVRDLPQGFSALEPLVDLPIGINITRFQTLLALHRSYLTPGDSSSGWTAGAAAYYVGYLQPRTFLLKYNENGTITDAVDCALDPLSETKCTLKSFTVEKGIYQTSNFRVQPTESIVRFPNITNLCPFGEVFNATRFASVYAWNRKRISNCVADYSVLYNSASFSTFKCYGVSPTKLNDLCFTNVYADSFVIRGDEVRQIAPGQTGKIADYNYKLPDDFTGCVIAWNSNNLDSKVGGNYNYLYRLFRKSNLKPFERDISTEIYQAGSTPCNGVEGFNCYFPLQSYGFQPTNGVGYQPYRVVVLSFELLHAPATVCGPKKSTNLVKNKCVNFNFNGLTGTGVLTESNKKFLPFQQFGRDIADTTDAVRDPQTLEILDITPCSFGGVSVITPGTNTSNQVAVLYQDVNCTEVPVAIHADQLTPTWRVYSTGSNVFQTRAGCLIGAEHVNNSYECDIPIGAGICASYQTQTNSPRRARSVASQSIIAYTMSLGAENSVAYSNNSIAIPTNFTISVTTEILPVSMTKTSVDCTMYICGDSTECSNLLLQYGSFCTQLNRALTGIAVEQDKNTQEVFAQVKQIYKTPPIKDFGGFNFSQILPDPSKPSKRSFIEDLLFNKVTLADAGFIKQYGDCLGDIAARDLICAQKFNGLTVLPPLLTDEMIAQYTSALLAGTITSGWTFGAGAALQIPFAMQMAYRFNGIGVTQNVLYENQKLIANQFNSAIGKIQDSLSSTASALGKLQDVVNQNAQALNTLVKCLSSNFGAISSVLNDILSRLDKVEAEVQIDRLITGRLQCLQTYVTQQLIRAAEIRASANLAATKMSECVLGQSKRVDFCGKGYHLMSFPQSAPHGVVFLHVTYVPAQEKNFTTAPAICHDGKAHFPREGVFVSNGTHWFVTQRNFYEPQIITTDNTFVSGNCDVVIGIVNNTVYDPLQPELDSGGSGYIPEAPRDGQAYVRKDGEWVLLSTFL

SEQ ID NO: 10327 - protein, 1177 aa, Artificial Sequence
  SARS-CoV-2/Guangdong/20SF028/2020__EPI_ISL_403936 spike protein (1-1147)(Q965C_S1003C) Foldon construct
MFVFLVLLPLVSSQCVNLTTRTQLPPAYTNSFTRGVYYPDKVFRSSVLYSTQDLFLPFFSNVTWFHAIHVSGTNGTKRFDNPVLPFNDGVYFASTEKSNIIRGWIFGTTLDSKTQSLLIVNNATNVVIKVCEFQFCNDPFLGVYYHKNNKSWMESEFRVYSSANNCTFEYVSQPFLMDLEGKQGNFKNLREFVFKNIDGYFKIYSKHTPINLVRDLPQGFSALEPLVDLPIGINITRFQTLLALHRSYLTPGDSSSGWTAGAAAYYVGYLQPRTFLLKYNENGTITDAVDCALDPLSETKCTLKSFTVEKGIYQTSNFRVQPTESIVRFPNITNLCPFGEVFNATRFASVYAWNRKRISNCVADYSVLYNSASFSTFKCYGVSPTKLNDLCFTNVYADSFVIRGDEVRQIAPGQTGKIADYNYKLPDDFTGCVIAWNSNNLDSKVGGNYNYLYRLFRKSNLKPFERDISTEIYQAGSTPCNGVEGFNCYFPLQSYGFQPTNGVGYQPYRVVVLSFELLHAPATVCGPKKSTNLVKNKCVNFNFNGLTGTGVLTESNKKFLPFQQFGRDIADTTDAVRDPQTLEILDITPCSFGGVSVITPGTNTSNQVAVLYQDVNCTEVPVAIHADQLTPTWRVYSTGSNVFQTRAGCLIGAEHVNNSYECDIPIGAGICASYQTQTNSPRRARSVASQSIIAYTMSLGAENSVAYSNNSIAIPTNFTISVTTEILPVSMTKTSVDCTMYICGDSTECSNLLLQYGSFCTQLNRALTGIAVEQDKNTQEVFAQVKQIYKTPPIKDFGGFNFSQILPDPSKPSKRSFIEDLLFNKVTLADAGFIKQYGDCLGDIAARDLICAQKFNGLTVLPPLLTDEMIAQYTSALLAGTITSGWTFGAGAALQIPFAMQMAYRFNGIGVTQNVLYENQKLIANQFNSAIGKIQDSLSSTASALGKLQDVVNQNAQALNTLVKCLSSNFGAISSVLNDILSRLDKVEAEVQIDRLITGRLQCLQTYVTQQLIRAAEIRASANLAATKMSECVLGQSKRVDFCGKGYHLMSFPQSAPHGVVFLHVTYVPAQEKNFTTAPAICHDGKAHFPREGVFVSNGTHWFVTQRNFYEPQIITTDNTFVSGNCDVVIGIVNNTVYDPLQPELDSGGSGYIPEAPRDGQAYVRKDGEWVLLSTFL

SEQ ID NO: 10328 - protein, 1177 aa, Artificial Sequence
  SARS-CoV-2/Shenzhen/SZTH-001/2020__EPI_ISL_406592 spike protein (1-1147)(Q965C_S1003C) Foldon construct
MFVFLVLLPLVSSQCVNLTTRTQLPPAYTNSFTRGVYYPDKVFRSSVLHSTQDLFLPFFSNVTWFHAIHVSGTNGTKRFDNPVLPFNDGVYFASTEKSNIIRGWIFGTTLDSKTQSLLIVNNATNVVIKVCEFQFCNDPFLGVYYHKNNKSWMESEFRVYSSANNCTFEYVSQPFLMDLEGKQGNFKNLREFVFKNIDGYFKIYSKHTPINLVRDLPQGFSALEPLVDLPIGINITRFQTLLALHRSYLTPGDSSSGWTAGAAAYYVGYLQPRTFLLKYNENGTITDAVDCALDPLSETKCTLKSFTVEKGIYQTSNFRVQPTESIVRFPNITNLCPFGEVFNATRFASVYAWNRKRISNCVADYSVLYNSASFSTFKCYGVSPTKLNDLCFTNVYADSFVIRGDEVRQIAPGQTGKIADYNYKLPDDFTGCVIAWNSNNLDSKVGGNYNYLYRLFRKSNLKPFERDISTEIYQAGSTPCNGVEGFNCYFPLQSYGFQPTNGVGYQPYRVVVLSFELLHAPATVCGPKKSTNLVKNKCVNFNFNGLTGTGVLTESNKKFLPFQQFGRDIADTTDAVRDPQTLEILDITPCSFGGVSVITPGTNTSNQVAVLYQDVNCTEVPVAIHADQLTPTWRVYSTGSNVFQTRAGCLIGAEHVNNSYECDIPIGAGICASYQTQTNSPRRARSVASQSIIAYTMSLGAENSVAYSNNSIAIPTNFTISVTTEILPVSMTKTSVDCTMYICGDSTECSNLLLQYGSFCTQLNRALTGIAVEQDKNTQEVFAQVKQIYKTPPIKDFGGFNFSQILPDPSKPSKRSFIEDLLFNKVTLADAGFIKQYGDCLGDIAARDLICAQKFNGLTVLPPLLTDEMIAQYTSALLAGTITSGWTFGAGAALQIPFAMQMAYRFNGIGVTQNVLYENQKLIANQFNSAIGKIQDSLSSTASALGKLQDVVNQNAQALNTLVKCLSSNFGAISSVLNDILSRLDKVEAEVQIDRLITGRLQCLQTYVTQQLIRAAEIRASANLAATKMSECVLGQSKRVDFCGKGYHLMSFPQSAPHGVVFLHVTYVPAQEKNFTTAPAICHDGKAHFPREGVFVSNGTHWFVTQRNFYEPQIITTDNTFVSGNCDVLIGIVNNTVYDPLQPELDSGGSGYIPEAPRDGQAYVRKDGEWVLLSTFL

SEQ ID NO: 10329 - protein, 1177 aa, Artificial Sequence
  SARS-CoV-2/Shenzhen/SZTH-004/2020__EPI_ISL_406595 spike protein (1-1147)(Q965C_S1003C) Foldon construct
MFVFLVLLPLVSSQCVNLTTRTQLPPAYTNSFTRGVYYPDKVFRSSVLHSTQDLFLPFFSNVTWFHAIHVSGTNGTKRFDNPVLPFNDGVYFASTEKSNIIRGWIFGTTLDSKTQSLLIVNNATNVVIKVCEFQFCNDPFLGVYYHKNNKSWMESEFRVYSSANNCTFEYVSQPFLMDLEGKQGNFKNLREFVFKNIDGYFKIYSKHTPINLVRDLPQGFSALEPLVDLPIGINITRFQTLLALHRSYLTPGDSSSGWTAGAAAYYVGYLQPRTFLLKYNENGTITDAVDCALDPLSETKCTLKSFTVEKGIYQTSNFRVQPTESIVRFPNITNLCPFGEVFNATRFASVYAWDRKRISNCVAYYSVLYNSASFSTFKCYGVSPTKLNDLCFTNVYADSFVIRGDEVRQIAPGQTGKIADYNYKLPDDFTGCVIAWNSNNLDSKVGGNYNYLYRLFRKSNLKPFERDISTEIYQAGSTPCNGVEGFNCYFPLQSYGFQPTNGVGYQPYRVVVLSFELLHAPATVCGPKKSTNLVKNKCVNFNFNGLTGTGVLTESNKKFLPFQQFGRDIADTTDAVRDPQTLEILDITPCSFGGVSVITPGTNTSNQVAVLYQDVNCTEVPVAIHADQLTPTWRVYSTGSNVFQTRAGCLIGAEHVNNSYECDIPIGAGICASYQTQTNSPRRARSVASQSIIAYTMSLGAENSVAYSNNSIAIPTNFTISVTTEILPVSMTKTSVDCTMYICGDSTECSNLLLQYGSFCTQLNRALTGIAVEQDKNTQEVFAQVKQIYKTPPIKDFGGFNFSQILPDPSKPSKRSFIEDLLFNKVTLADAGFIKQYGDCLGDIAARDLICAQKFNGLTVLPPLLTDEMIAQYTSALLAGTITSGWTFGAGAALQIPFAMQMAYRFNGIGVTQNVLYENQKLIANQFNSAIGKIQDSLSSTASALGKLQDVVNQNAQALNTLVKCLSSNFGAISSVLNDILSRLDKVEAEVQIDRLITGRLQCLQTYVTQQLIRAAEIRASANLAATKMSECVLGQSKRVDFCGKGYHLMSFPQSAPHGVVFLHVTYVPAQEKNFTTAPAICHDGKAHFPREGVFVSNGTHWFVTQRNFYEPQIITTDNTFVSGNCDVVIGIVNNTVYDPLQPELDSGGSGYIPEAPRDGQAYVRKDGEWVLLSTFL

SEQ ID NO: 10330 - protein, 1177 aa, Artificial Sequence
  SARS-CoV-2/France/IDF0372/2020__EPI_ISL_406596 spike protein (1-1147)(Q965C_S1003C) Foldon construct
MFVFLVLLPLVSSQCVNLTTRTQLPPAYTNSFTRGVYYPDKVFRSSVLHSTQDLFLPFFSNVTWFHAIHVSGTNGTKRFDNPVLPFNDGVYFASTEKSNIIRGWIFGTTLDSKTQSLLIVNNATNVVIKVCEFQFCNDPFLGVYYHKNNKSWMESEFRVYSSANNCTFEYVSQPFLMDLEGKQGNFKNLREFVFKNIDGYFKIYSKHTPINLVRDLPQGFSALEPLVDLPIGINITRFQTLLALHRSYLTPGDSSSGWTAGAAAYYVGYLQPRTFLLKYNENGTITDAVDCALDPLSETKCTLKSFTVEKGIYQTSNFRVQPTESIVRFPNITNLCPFGEVFNATRFASVYAWNRKRISNCVADYSFLYNSASFSTFKCYGVSPTKLNDLCFTNVYADSFVIRGDEVRQIAPGQTGKIADYNYKLPDDFTGCVIAWNSNNLDSKVGGNYNYLYRLFRKSNLKPFERDISTEIYQAGSTPCNGVEGFNCYFPLQSYGFQPTNGVGYQPYRVVVLSFELLHAPATVCGPKKSTNLVKNKCVNFNFNGLTGTGVLTESNKKFLPFQQFGRDIADTTDAVRDPQTLEILDITPCSFGGVSVITPGTNTSNQVAVLYQDVNCTEVPVAIHADQLTPTWRVYSTGSNVFQTRAGCLIGAEHVNNSYECDIPIGAGICASYQTQTNSPRRARSVASQSIIAYTMSLGAENSVAYSNNSIAIPTNFTISVTTEILPVSMTKTSVDCTMYICGDSTECSNLLLQYGSFCTQLNRALTGIAVEQDKNTQEVFAQVKQIYKTPPIKDFGGFNFSQILPDPSKPSKRSFIEDLLFNKVTLADAGFIKQYGDCLGDIAARDLICAQKFNGLTVLPPLLTDEMIAQYTSALLAGTITSGWTFGAGAALQIPFAMQMAYRFNGIGVTQNVLYENQKLIANQFNSAIGKIQDSLSSTASALGKLQDVVNQNAQALNTLVKCLSSNFGAISSVLNDILSRLDKVEAEVQIDRLITGRLQCLQTYVTQQLIRAAEIRASANLAATKMSECVLGQSKRVDFCGKGYHLMSFPQSAPHGVVFLHVTYVPAQEKNFTTAPAICHDGKAHFPREGVFVSNGTHWFVTQRNFYEPQIITTDNTFVSGNCDVVIGIVNNTVYDPLQPELDSGGSGYIPEAPRDGQAYVRKDGEWVLLSTFL

SEQ ID NO: 10331 - protein, 1177 aa, Artificial Sequence
  SARS-CoV-2/Australia/VIC01/2020__EPI_ISL_406844 spike protein (1-1147)(Q965C_S1003C) Foldon construct
MFVFLVLLPLVSSQCVNLTTRTQLPPAYTNSFTRGVYYPDKVFRSSVLHSTQDLFLPFFSNVTWFHAIHVSGTNGTKRFDNPVLPFNDGVYFASTEKSNIIRGWIFGTTLDSKTQSLLIVNNATNVVIKVCEFQFCNDPFLGVYYHKNNKSWMESEFRVYSSANNCTFEYVSQPFLMDLEGKQGNFKNLREFVFKNIDGYFKIYSKHTPINLVRDLPQGFSALEPLVDLPIGINITRFQTLLALHRRYLTPGDSSSGWTAGAAAYYVGYLQPRTFLLKYNENGTITDAVDCALDPLSETKCTLKSFTVEKGIYQTSNFRVQPTESIVRFPNITNLCPFGEVFNATRFASVYAWNRKRISNCVADYSVLYNSASFSTFKCYGVSPTKLNDLCFTNVYADSFVIRGDEVRQIAPGQTGKIADYNYKLPDDFTGCVIAWNSNNLDSKVGGNYNYLYRLFRKSNLKPFERDISTEIYQAGSTPCNGVEGFNCYFPLQSYGFQPTNGVGYQPYRVVVLSFELLHAPATVCGPKKSTNLVKNKCVNFNFNGLTGTGVLTESNKKFLPFQQFGRDIADTTDAVRDPQTLEILDITPCSFGGVSVITPGTNTSNQVAVLYQDVNCTEVPVAIHADQLTPTWRVYSTGSNVFQTRAGCLIGAEHVNNSYECDIPIGAGICASYQTQTNSPRRARSVASQSIIAYTMSLGAENSVAYSNNSIAIPTNFTISVTTEILPVSMTKTSVDCTMYICGDSTECSNLLLQYGSFCTQLNRALTGIAVEQDKNTQEVFAQVKQIYKTPPIKDFGGFNFSQILPDPSKPSKRSFIEDLLFNKVTLADAGFIKQYGDCLGDIAARDLICAQKFNGLTVLPPLLTDEMIAQYTSALLAGTITSGWTFGAGAALQIPFAMQMAYRFNGIGVTQNVLYENQKLIANQFNSAIGKIQDSLSSTASALGKLQDVVNQNAQALNTLVKCLSSNFGAISSVLNDILSRLDKVEAEVQIDRLITGRLQCLQTYVTQQLIRAAEIRASANLAATKMSECVLGQSKRVDFCGKGYHLMSFPQSAPHGVVFLHVTYVPAQEKNFTTAPAICHDGKAHFPREGVFVSNGTHWFVTQRNFYEPQIITTDNTFVSGNCDVVIGIVNNTVYDPLQPELDSGGSGYIPEAPRDGQAYVRKDGEWVLLSTFL

SEQ ID NO: 10332 - protein, 1177 aa, Artificial Sequence
  SARS-CoV-2/Germany/BavPat1/2020__EPI_ISL_406862 spike protein (1-1147)(Q965C_S1003C) Foldon construct
MFVFLVLLPLVSSQCVNLTTRTQLPPAYTNSFTRGVYYPDKVFRSSVLHSTQDLFLPFFSNVTWFHAIHVSGTNGTKRFDNPVLPFNDGVYFASTEKSNIIRGWIFGTTLDSKTQSLLIVNNATNVVIKVCEFQFCNDPFLGVYYHKNNKSWMESEFRVYSSANNCTFEYVSQPFLMDLEGKQGNFKNLREFVFKNIDGYFKIYSKHTPINLVRDLPQGFSALEPLVDLPIGINITRFQTLLALHRSYLTPGDSSSGWTAGAAAYYVGYLQPRTFLLKYNENGTITDAVDCALDPLSETKCTLKSFTVEKGIYQTSNFRVQPTESIVRFPNITNLCPFGEVFNATRFASVYAWNRKRISNCVADYSVLYNSASFSTFKCYGVSPTKLNDLCFTNVYADSFVIRGDEVRQIAPGQTGKIADYNYKLPDDFTGCVIAWNSNNLDSKVGGNYNYLYRLFRKSNLKPFERDISTEIYQAGSTPCNGVEGFNCYFPLQSYGFQPTNGVGYQPYRVVVLSFELLHAPATVCGPKKSTNLVKNKCVNFNFNGLTGTGVLTESNKKFLPFQQFGRDIADTTDAVRDPQTLEILDITPCSFGGVSVITPGTNTSNQVAVLYQGVNCTEVPVAIHADQLTPTWRVYSTGSNVFQTRAGCLIGAEHVNNSYECDIPIGAGICASYQTQTNSPRRARSVASQSIIAYTMSLGAENSVAYSNNSIAIPTNFTISVTTEILPVSMTKTSVDCTMYICGDSTECSNLLLQYGSFCTQLNRALTGIAVEQDKNTQEVFAQVKQIYKTPPIKDFGGFNFSQILPDPSKPSKRSFIEDLLFNKVTLADAGFIKQYGDCLGDIAARDLICAQKFNGLTVLPPLLTDEMIAQYTSALLAGTITSGWTFGAGAALQIPFAMQMAYRFNGIGVTQNVLYENQKLIANQFNSAIGKIQDSLSSTASALGKLQDVVNQNAQALNTLVKCLSSNFGAISSVLNDILSRLDKVEAEVQIDRLITGRLQCLQTYVTQQLIRAAEIRASANLAATKMSECVLGQSKRVDFCGKGYHLMSFPQSAPHGVVFLHVTYVPAQEKNFTTAPAICHDGKAHFPREGVFVSNGTHWFVTQRNFYEPQIITTDNTFVSGNCDVVIGIVNNTVYDPLQPELDSGGSGYIPEAPRDGQAYVRKDGEWVLLSTFL

SEQ ID NO: 10333 - protein, 1177 aa, Artificial Sequence
  SARS-CoV-2/Wuhan/HBCDC-HB-02/2020__EPI_ISL_412978 spike protein (1-1147)(Q965C_S1003C) Foldon construct
MFVFLVLLPLVSSQCVNLTTRTQLPPAYTNSFTRGVYYPDKVFRSSVLHSTQDLFLPFFSNVTWFHAIHVSGTNGTKRFDNPVLPFNDGVYFASTEKSNIIRGWIFGTTLDSKTQSLLIVNNATNVVIKVCEFQFCNDPFLGVYYHKNNKSWMESEFRVYSSANNCTFEYVSQPFLMDLEGKQGNFKNLREFVFKNIDGYFKIYSKHTPINLVRDLPQGFSALEPLVDLPIGINITRFQTLLALHRSYLTPGDSSSGWTAGAAAYYVGYLQPRTFLLKYNENGTITDAVDCALDPLSETKCTLKSFTVEKGIYQTSNFRVQPTESIVRFPNITNLCPFGEVFNATRFASVYAWNRKRISNCVADYSVLYNSASFSTFKCYGVSPTKLNDLCFTNVYADSFVIRGDEVRQIAPGQTGKIADYNYKLPDDFTGCVIAWNSNNLDSKVGGNYNYLYRLFRKSNLKPFERDISTEIYQAGSTPCNGVEGFNCYFPLQSYGFQPTNGVGYQPYRVVVLSFELLHAPATVCGPKKSTNLVKNKCVNFNFNGLTGTGVLTESNKKFLPFQQFGRDIADTTDAVRDPQTLEILDITPCSFGGVSVITPGTNTSNQVAVLYQDVNCTEVPVAIHADQLTPTWRVYSTGSNVFQTRAGCLIGAEHVNNSYECDIPIGAGICASYQTQTNSPRRARSVASQSIIAYTMSLGAENSVAYSNNSIAIPTNFTISVTTEILPVSMTKTSVDCTMYICGDSTECSNFLLQYGSFCTQLNRALTGIAVEQDKNTQEVFAQVKQIYKTPPIKDFGGFNFSQILPDPSKPSKRSFIEDLLFNKVTLADAGFIKQYGDCLGDIAARDLICAQKFNGLTVLPPLLTDEMIAQYTSALLAGTITSGWTFGAGAALQIPFAMQMAYRFNGIGVTQNVLYENQKLIANQFNSAIGKIQDSLSSTASALGKLQDVVNQNAQALNTLVKCLSSNFGAISSVLNDILSRLDKVEAEVQIDRLITGRLQCLQTYVTQQLIRAAEIRASANLAATKMSECVLGQSKRVDFCGKGYHLMSFPQSAPHGVVFLHVTYVPAQEKNFTTAPAICHDGKAHFPREGVFVSNGTHWFVTQRNFYEPQIITTDNTFVSGNCDVVIGIVNNTVYDPLQPELDSGGSGYIPEAPRDGQAYVRKDGEWVLLSTFL

SEQ ID NO: 10334 - protein, 1177 aa, Artificial Sequence
  SARS-CoV-2/Australia/QLD02/2020__EPI_ISL_407896 spike protein (1-1147)(Q965C_S1003C) Foldon construct
MFVFLVLLPLVSSQCVNLTTRTQLPPAYTNSFTRGVYYPDKVFRSSVLHSTQDLFLPFFSNVTWFHAIHVSGTNGTKRFDNPVLPFNDGVYFASTEKSNIIRGWIFGTTLDSKTQSLLIVNNATNVVIKVCEFQFCNDPFLGVYYHKNNKSWMESEFRVYSSANNCTFEYVSQPFLMDLEGKQGNFKNLREFVFKNIDGYFKIYSKHTPINLVRDLPQGFSALEPLVDLPIGINITRFQTLLALHRSYLTPGDSSSGWTAGAAAYYVGYLQPRTFLLKYNENGTITDAVDCALDPLSETKCTLKSFTVEKGIYQTSNFRVQPTESIVRFPNITNLCPFGEVFNATRFASVYAWNRKRISNCVADYSVLYNSASFSTFKCYGVSPTKLNDLCFTNVYADSFVIRGDEVRQIAPGQTGKIADYNYKLPDDFTGCVIAWNSNNLDSKVGGNYNYLYRLFRKSNLKPFERDISTEIYQAGSTPCNGVEGFNCYFPLQSYGFQPTNGVGYQPYRVVVLSFELLHAPATVCGPKKSTNLVKNKCVNFNFNGLTGTGVLTESNKKFLPFQQFGRDIADTTDAVRDPQTLEILDITPCSFGGVSVITPGTNTSNQVAVLYQDVNCTEVPVAIHADQLTPTWRVYSTGSNVFQTRAGCLIGAEHVNNSYECDIPIGAGICASYQTQTNSPRRARSVASQSIIAYTMSLGAENSVAYSNNSIAIPTNFTISVTTEILPVSMTKTSVDCTMYICGDSTECSNLLLQYGSFCTQLNRALTGIAVEQDKNTQEVFAQVKQIYKTPPIKDFGGFNFSQILPDPSKPSKRSFIEDLLFNKVTLADAGFIKQYGDCLGDIAARDLICAQKFNGLTVLPPLLTDEMIAQYTSALLAGTITSGWTFGAGAALQIPFAMQMAYRFNGIGVTQNVLYENQKLIANQFNSAIGKIQDSLSSTASALGKLQDVVNQNAQALNTLVKCLSSNFGAISSVLNDILSRLDKVEAEVQIDRLITGRLQCLQTYVTQQLIRAAEIRASANLAATKMSECVLGQSKRVDFCGKGYHLMSFPQSAPHGVVFLHVTYVPAQEKNFTTAPAICHDGKAHFPREGVFVSNGTHWFVTQRNFYEPQIITTDNTFVSGNCDVVIGIVNNTVYDPLQLELDSGGSGYIPEAPRDGQAYVRKDGEWVLLSTFL

SEQ ID NO: 10335 - protein, 1177 aa, Artificial Sequence
  SARS-CoV-2/India/1-31/2020__EPI_ISL_413523 spike protein (1-1147)(Q965C_S1003C) Foldon construct
MFVFLVLLPLVSSQCVNLTTRTQLPPAYTNSFTRGVYYPDKVFRSSVLHSTQDLFLPFFSNVTWFHAIHVSGTNGTKRFDNPVLPFNDGVYFASTEKSNIIRGWIFGTTLDSKTQSLLIVNNATNVVIKVCEFQFCNDPFLGVYYHKNNKSWMESEFRVYSSANNCTFEYVSQPFLMDLEGKQGNFKNLREFVFKNIDGYFKIYSKHTPINLVRDLPQGFSALEPLVDLPIGINITRFQTLLALHRSYLTPGDSSSGWTAGAAAYYVGYLQPRTFLLKYNENGTITDAVDCALDPLSETKCTLKSFTVEKGIYQTSNFRVQPTESIVRFPNITNLCPFGEVFNATRFASVYAWNRKRISNCVADYSVLYNSASFSTFKCYGVSPTKLNDLCFTNVYADSFVIRGDEVRQIAPGQTGKIADYNYKLPDDFTGCVIAWNSNNLDSKVGGNYNYLYRLFRKSNLKPFERDISTEIYQAGSTPCNGVEGFNCYFPLQSYGFQPTNGVGYQPYRVVVLSFELLHAPATVCGPKKSTNLVKNKCVNFNFNGLTGTGVLTESNKKFLPFQQFGRDIADTTDAVRDPQTLEILDITPCSFGGVSVITPGTNTSNQVAVLYQDVNCTEVPVAIHADQLTPTWRVYSTGSNVFQTRAGCLIGAEHVNNSYECDIPIGAGICASYQTQTNSPRRARSVASQSIIAYTMSLGAENSVAYSNNSIAIPTNFTISVTTEILPVSMTKTSVDCTMYICGDSTECSNLLLQYGSFCTQLNRALTGIAVEQDKNTQEVFAQVKQIYKTPPIKDFGGFNFSQILPDPSKPSKRSFIEDLLFNKVTLADAGFIKQYGDCLGDIAARDLICAQKFNGLTVLPPLLTDEMIAQYTSALLAGTITSGWTFGAGAALQIPFAMQMAYRFNGIGVTQNVLYENQKLIANQFNSVIGKIQDSLSSTASALGKLQDVVNQNAQALNTLVKCLSSNFGAISSVLNDILSRLDKVEAEVQIDRLITGRLQCLQTYVTQQLIRAAEIRASANLAATKMSECVLGQSKRVDFCGKGYHLMSFPQSAPHGVVFLHVTYVPAQEKNFTTAPAICHDGKAHFPREGVFVSNGTHWFVTQRNFYEPQIITTDNTFVSGNCDVVIGIVNNTVYDPLQPELDSGGSGYIPEAPRDGQAYVRKDGEWVLLSTFL

SEQ ID NO: 10336 - protein, 1177 aa, Artificial Sequence
  SARS-CoV-2/Guangdong/GD2020087-P0008/2020__EPI_ISL_413863 spike protein (1-1147)(Q965C_S1003C) Foldon construct
MFVFLVLLPLVSSQCVNLTTRTQLPPAYTNSFTRGVYYPDKVFRSSVLHSTQDLFLPFFSNVTWFHAIHVSGTNGTKRFDNPVLPFNDGVYFASTEKSNIIRGWIFGTTLDSKTQSLLIVNNATNVVIKVCEFQFCNDPFLGVYYHKNNKSWMESEFRVYSSANNCTFEYVSQPFLMDLEGKQGNFKNLREFVFKNIDGYFKIYSKHTPINLVRDLPQGFSALEPLVDLPIGINITRFQTLLALHRSYLTPGDSSSGWTAGAAAYYVGYLQPRTFLLKYNENGTITDAVDCALDPLSETKCTLKSFTVEKGIYQTSNFRVQPTESIVRFPNITNLCPFGEVFNATRFASVYAWNRKRISNCVADYSVLYNSASFSTFKCYGVSPTKLNDLCFTNVYADSFVIRGDEVREIAPGQTGKIADYNYKLPDDFTGCVIAWNSNNLDSKVGGNYNYLYRLFRKSNLKPFERDISTEIYQAGSTPCNGVEGFNCYFPLQSYGFQPTNGVGYQPYRVVVLSFELLHAPATVCGPKKSTNLVKNKCVNFNFNGLTGTGVLTESNKKFLPFQQFGRDIADTTDAVRDPQTLEILDITPCSFGGVSVITPGTNTSNQVAVLYQDVNCTEVPVAIHADQLTPTWRVYSTGSNVFQTRAGCLIGAEHVNNSYECDIPIGAGICASYQTQTNSPRRARSVASQSIIAYTMSLGAENSVAYSNNSIAIPTNFTISVTTEILPVSMTKTSVDCTMYICGDSTECSNLLLQYGSFCTQLNRALTGIAVEQDKNTQEVFAQVKQIYKTPPIKDFGGFNFSQILPDPSKPSKRSFIEDLLFNKVTLADAGFIKQYGDCLGDIAARDLICAQKFNGLTVLPPLLTDEMIAQYTSALLAGTITSGWTFGAGAALQIPFAMQMAYRFNGIGVTQNVLYENQKLIANQFNSAIGKIQDSLSSTASALGKLQDVVNQNAQALNTLVKCLSSNFGAISSVLNDILSRLDKVEAEVQIDRLITGRLQCLQTYVTQQLIRAAEIRASANLAATKMSECVLGQSKRVDFCGKGYHLMSFPQSAPHGVVFLHVTYVPAQEKNFTTAPAICHDGKAHFPREGVFVSNGTHWFVTQRNFYEPQIITTDNTFVSGNCDVVIGIVNNTVYDPLQPELDSGGSGYIPEAPRDGQAYVRKDGEWVLLSTFL

SEQ ID NO: 10337 - protein, 1177 aa, Artificial Sequence
  SARS-CoV-2/Sweden/01/2020__EPI_ISL_411951 spike protein (1-1147)(Q965C_S1003C) Foldon construct
MFVFLVLLPLVSSQCVNLTTRTQLPPAYTNSFTRGVYYPDKVFRSSVLHSTQDLFLPFFSNVTWFHAIHVSGTNGTKRFDNPVLPFNDGVYFASTEKSNIIRGWIFGTTLDSKTQSLLIVNNATNVVIKVCEFQFCNDPFLGVYYHKNNKSWMESEFRVYSSANNCTFEYVSQPFLMDLEGKQGNFKNLREFVFKNIDGYFKIYSKHTPINLVRDLPQGFSALEPLVDLPIGINITRFQTLLALHRSYLTPGDSSSGWTAGAAAYYVGYLQPRTFLLKYNENGTITDAVDCALDPLSETKCTLKSFTVEKGIYQTSNFRVQPTESIVRFPNITNLCPFGEVFNATRFASVYAWNRKRISNCVADYSVLYNSASFSTFKCYGVSPTKLNDLCFTNVYADSFVIRGDEVRQIAPGQTGKIADYNYKLPDDFTGCVIAWNSNNLDSKVGGNYNYLYRLFRKSNLKPFERDISTEIYQAGSTPCNGVEGFNCYFPLQSYGFQPTNGVGYQPYRVVVLSFELLHAPATVCGPKKSTNLVKNKCVNFNFNGLTGTGVLTESNKKFLPFQQFGRDIADTTDAVRDPQTLEILDITPCSFGGVSVITPGTNTSNQVAVLYQDVNCTEVPVAIHADQLTPTWRVYSTGSNVFQTRAGCLIGAEHVNNSYECDIPIGAGICASYQTQTNSPRRARSVASQSIIAYTMSLGAENSVAYSNNSIAIPTNFTISVTTEILPVSMTKTSVDCTMYICGDSTECSNLLLQYGSFCTQLNRALTGIAVEQDKNTQEVFAQVKQIYKTPPIKDCGGFNFSQILPDPSKPSKRSFIEDLLFNKVTLADAGFIKQYGDCLGDIAARDLICAQKFNGLTVLPPLLTDEMIAQYTSALLAGTITSGWTFGAGAALQIPFAMQMAYRFNGIGVTQNVLYENQKLIANQFNSAIGKIQDSLSSTASALGKLQDVVNQNAQALNTLVKCLSSNFGAISSVLNDILSRLDKVEAEVQIDRLITGRLQCLQTYVTQQLIRAAEIRASANLAATKMSECVLGQSKRVDFCGKGYHLMSFPQSAPHGVVFLHVTYVPAQEKNFTTAPAICHDGKAHFPREGVFVSNGTHWFVTQRNFYEPQIITTDNTFVSGNCDVVIGIVNNTVYDPLQPELDSGGSGYIPEAPRDGQAYVRKDGEWVLLSTFL

SEQ ID NO: 10338 - protein, 1177 aa, Artificial Sequence
  SARS-CoV-2/Tianmen/HBCDC-HB-07/2020__EPI_ISL_412983 spike protein (1-1147)(Q965C_S1003C) Foldon construct
MFVFLVLLPLVSSQCVNLTTRTQLPPAYTNSFTRGVYYPDKVFRSSVLHSTQDLFLPFFSNVTWFHAIHVSGTNGTKRFDNPVLPFNDGVYFASTEKSNIIRGWIFGTTLDSKTQSLLIVNNATNVVIKVCEFQFCNDPFLGVYYHKNNKSWMESEFRVYSSANNCTFEYVSQPFLMDLEGKQGNFKNLREFVFKNIDGYFKIYSKHTPINLVRDLPQGFSALEPLVDLPIGINITRFQTLLALHRSYLTPGDSSSGWTAGAAAYYVGYLQPRTFLLKYNENGTITDAVDCALDPLSETKCTLKSFTVEKGIYQTSNFRVQPTESIVRFPNITNLCPFGEVFNATRFASVYAWNRKRISNCVADYSVLYNSASFSTFKCYGVSPTKLNDLCFTNVYADSFVIRGDEVRQIAPGQTGKIADYNYKLPDDFTGCVIAWNSNNLDSKVGGNYNYLYRLFRKSNLKPFERDISTEIYQAGSTPCNGVEGFNCYFPLQSYGFQPTNGVGYQPYRVVVLSFELLHAPATVCGPKKSTNLVKNKCVNFNFNGLTGTGVLTESNKKFLPFQQFGRDIADTTDAVRDPQTLEILDITPCSFGGVSVITPGTNTSNQVAVLYQDLNCTEVPVAIHADQLTPTWRVYSTGSNVFQTRAGCLIGAEHVNNSYECDIPIGAGICASYQTQTNSPRRARSVASQSIIAYTMSLGAENSVAYSNNSIAIPTNFTISVTTEILPVSMTKTSVDCTMYICGDSTECSNLLLQYGSFCTQLNRALTGIAVEQDKNTQEVFAQVKQIYKTPPIKDFGGFNFSQILPDPSKPSKRSFIEDLLFNKVTLADAGFIKQYGDCLGDIAARDLICAQKFNGLTVLPPLLTDEMIAQYTSALLAGTITSGWTFGAGAALQIPFAMQMAYRFNGIGVTQNVLYENQKLIANQFNSAIGKIQDSLSSTASALGKLQDVVNQNAQALNTLVKCLSSNFGAISSVLNDILSRLDKVEAEVQIDRLITGRLQCLQTYVTQQLIRAAEIRASANLAATKMSECVLGQSKRVDFCGKGYHLMSFPQSAPHGVVFLHVTYVPAQEKNFTTAPAICHDGKAHFPREGVFVSNGTHWFVTQRNFYEPQIITTDNTFVSGNCDVVIGIVNNTVYDPLQPELDSGGSGYIPEAPRDGQAYVRKDGEWVLLSTFL

SEQ ID NO: 10339 - protein, 1177 aa, Artificial Sequence
  SARS-CoV-2/Hong Kong/case42_VM20002493/2020__EPI_ISL_414527 spike protein (1-1147)(Q965C_S1003C) Foldon construct
MFVFLVLLPLVSSQCVNLTTRTQLPPAYTNSFTRGVYYPDKVFRSSVLHSTQDLFLPFFSNVTWFHAIHVSGTNGTKRFDNPVLPFNDGVYFASTEKSNIIRGWIFGTTLDSKTQSLLIVNNATNVVIKVCEFQFCNDPFLGVYYHKNNKSWMESEFRVYSSANNCTFEYVSQPFLMDLEGKQGNFKNLREFVFKNIDGYFKIYSKHTPINLVRDLPQGFSALEPLVDLPIGINITRFQTLLALHRSYLTPGDSSSGWTAGAAAYYVGYLQPRTFLLKYNENGTITDAVDCALDPLSETKCTLKSFTVEKGIYQTSNFRVQPTESIVRFPNITNLCPFGEVFNATRFASVYAWNRKRISNCVADYSVLYNSASFSTFKCYGVSPTKLNDLCFTNVYADSFVIRGDEVRQIAPGQTGKIADYNYKLPDDFTGCVIAWNSNNLDSKVGGNYNYLYRLFRKSNLKPFERDISTEIYQAGSTPCNGVEGFNCYFPLQSYGFQPTNGVGYQPYRVVVLSFELLHAPATVCGPKKSTNLVKNKCVNFNFNGLTGTGVLTESNKKFLPFQQFGRDIADTTDAVRDPQTLEILDITPCSFGGVSVITPGTNTSNQVAVLYQDVNCTEVPVAIHADQLTPTWRVYSTGSNVFQTRAGCLIGAEHVNNSYECDIPIGAGICASYQTQTNSPRRARSVASQSIIAYTMSLGAENSVAYSNNSIAIPTNFAISVTTEILPVSMTKTSVDCTMYICGDSTECSNLLLQYGSFCTQLNRALTGIAVEQDKNTQEVFAQVKQIYKTPPIKDFGGFNFSQILPDPSKPSKRSFIEDLLFNKVTLADAGFIKQYGDCLGDIAARDLICAQKFNGLTVLPPLLTDEMIAQYTSALLAGTITSGWTFGAGAALQIPFAMQMAYRFNGIGVTQNVLYENQKLIANQFNSAIGKIQDSLSSTASALGKLQDVVNQNAQALNTLVKCLSSNFGAISSVLNDILSRLDKVEAEVQIDRLITGRLQCLQTYVTQQLIRAAEIRASANLAATKMSECVLGQSKRVDFCGKGYHLMSFPQSAPHGVVFLHVTYVPAQEKNFTTAPAICHDGKAHFPREGVFVSNGTHWFVTQRNFYEPQIITTDNTFVSGNCDVVIGIVNNTVYDPLQPELDSGGSGYIPEAPRDGQAYVRKDGEWVLLSTFL

SEQ ID NO: 10340 - protein, 1177 aa, Artificial Sequence
  SARS-CoV-2/USA/CruiseA-23/2020__EPI_ISL_414482 spike protein (1-1147)(Q965C_S1003C) Foldon construct
MFVFLVLLPLVSSQCVNLTTRTQLPPAYTNSFTRGVYYPDKVFRSSVLHSTQDLFLPFFSNVTWFHAIHVSGTNGTKRFDNPVLPFNDGVYFASTEKSNIIRGWIFGTTLDSKTQSLLIVNNATNVVIKVCEFQFCNDPFLGVYYHKNNKSWMESEFRVYSSANNCTFEYVSQPFLMDLEVKQGNFKNLREFVFKNIDGYFKIYSKHTPINLVRDLPQGFSALEPLVDLPIGINITRFQTLLALHRSYLTPGDSSSGWTAGAAAYYVGYLQPRTFLLKYNENGTITDAVDCALDPLSETKCTLKSFTVEKGIYQTSNFRVQPTESIVRFPNITNLCPFGEVFNATRFASVYAWNRKRISNCVADYSVLYNSASFSTFKCYGVSPTKLNDLCFTNVYADSFVIRGDEVRQIAPGQTGKIADYNYKLPDDFTGCVIAWNSNNLDSKVGGNYNYLYRLFRKSNLKPFERDISTEIYQAGSTPCNGVEGFNCYFPLQSYGFQPTNGVGYQPYRVVVLSFELLHAPATVCGPKKSTNLVKNKCVNFNFNGLTGTGVLTESNKKFLPFQQFGRDIADTTDAVRDPQTLEILDITPCSFGGVSVITPGTNTSNQVAVLYQDVNCTEVPVAIHADQLTPTWRVYSTGSNVFQTRAGCLIGAEHVNNSYECDIPIGAGICASYQTQTNSPRRARSVASQSIIAYTMSLGAENSVAYSNNSIAIPTNFTISVTTEILPVSMTKTSVDCTMYICGDSTECSNLLLQYGSFCTQLNRALTGIAVEQDKNTQEVFAQVKQIYKTPPIKDFGGFNFSQILPDPSKPSKRSFIEDLLFNKVTLADAGFIKQYGDCLGDIAARDLICAQKFNGLTVLPPLLTDEMIAQYTSALLAGTITSGWTFGAGAALQIPFAMQMAYRFNGIGVTQNVLYENQKLIANQFNSAIGKIQDSLSSTASALGKLQDVVNQNAQALNTLVKCLSSNFGAISSVLNDILSRLDKVEAEVQIDRLITGRLQCLQTYVTQQLIRAAEIRASANLAATKMSECVLGQSKRVDFCGKGYHLMSFPQSAPHGVVFLHVTYVPAQEKNFTTAPAICHDGKAHFPREGVFVSNGTHWFVTQRNFYEPQIITTDNTFVSGNCDVVIGIVNNTVYDPLQPELDSGGSGYIPEAPRDGQAYVRKDGEWVLLSTFL

SEQ ID NO: 10341 - protein, 1177 aa, Artificial Sequence
  SARS-CoV-2/Hong Kong/case85_VM20002868/2020__EPI_ISL_414519 spike protein (1-1147)(Q965C_S1003C) Foldon construct
MFVFLVLVPLVSSQCVNLTTRTQLPPAYTNSFTRGVYYPDKVFRSSVLHSTQDLFLPFFSNVTWFHAIHVSGTNGTKRFDNPVLPFNDGVYFASTEKSNIIRGWIFGTTLDSKTQSLLIVNNATNVVIKVCEFQFCNDPFLGVYYHKNNKSWMESEFRVYSSANNCTFEYVSQPFLMDLEGKQGNFKNLREFVFKNIDGYFKIYSKHTPINLVRDLPQGFSALEPLVDLPIGINITRFQTLLALHRSYLTPGDSSSGWTAGAAAYYVGYLQPRTFLLKYNENGTITDAVDCALDPLSETKCTLKSFTVEKGIYQTSNFRVQPTESIVRFPNITNLCPFGEVFNATRFASVYAWNRKRISNCVADYSVLYNSASFSTFKCYGVSPTKLNDLCFTNVYADSFVIRGDEVRQIAPGQTGKIADYNYKLPDDFTGCVIAWNSNNLDSKVGGNYNYLYRLFRKSNLKPFERDISTEIYQAGSTPCNGVEGFNCYFPLQSYGFQPTNGVGYQPYRVVVLSFELLHAPATVCGPKKSTNLVKNKCVNFNFNGLTGTGVLTESNKKFLPFQQFGRDIADTTDAVRDPQTLEILDITPCSFGGVSVITPGTNTSNQVAVLYQDVNCTEVPVAIHADQLTPTWRVYSTGSNVFQTRAGCLIGAEHVNNSYECDIPIGAGICASYQTQTNSPRRARSVASQSIIAYTMSLGAENSVAYSNNSIAIPTNFTISVTTEILPVSMTKTSVDCTMYICGDSTECSNLLLQYGSFCTQLNRALTGIAVEQDKNTQEVFAQVKQIYKTPPIKDFGGFNFSQILPDPSKPSKRSFIEDLLFNKVTLADAGFIKQYGDCLGDIAARDLICAQKFNGLTVLPPLLTDEMIAQYTSALLAGTITSGWTFGAGAALQIPFAMQMAYRFNGIGVTQNVLYENQKLIANQFNSAIGKIQDSLSSTASALGKLQDVVNQNAQALNTLVKCLSSNFGAISSVLNDILSRLDKVEAEVQIDRLITGRLQCLQTYVTQQLIRAAEIRASANLAATKMSECVLGQSKRVDFCGKGYHLMSFPQSAPHGVVFLHVTYVPAQEKNFTTAPAICHDGKAHFPREGVFVSNGTHWFVTQRNFYEPQIITTDNTFVSGNCDVVIGIVNNTVYDPLQPELDSGGSGYIPEAPRDGQAYVRKDGEWVLLSTFL

SEQ ID NO: 10342 - protein, 1177 aa, Artificial Sequence; identical to SEQ ID NO: 10332
  SARS-CoV-2/England/200990660/2020__EPI_ISL_414523 spike protein (1-1147)(Q965C_S1003C) Foldon construct

SEQ ID NO: 10343 - protein, 1177 aa, Artificial Sequence
  SARS-CoV-2/Australia/NSW09/2020__EPI_ISL_413595 spike protein (1-1147)(Q965C_S1003C) Foldon construct
MFVFLVLLPLVSSQCVNLTTRTQLPPAYTNSFTRGVYYPDKVFRSSVLHSTQDLFLPFFSNVTWFHAIHVSGTNGTKRFDNPVLPFNDGVYFASTEKSNIIRGWIFGTTLDSKTQSLLIVNNATNVVIKVCEFQFCNDPFLGVYYHKNNKSWMESEFRVYSSANNCTFEYVSQPFLMDLEGKQGNFKNLREFVFKNIDGYFKIYSKHTPINLVRDLPQGFSALEPLVDLPIGINITRFQTLLALHRSYLTPGDSSSGWTAGAAAYYVGYLQPRTFLLKYNENGTITDAVDCALDPLSETKCTLKSFTVEKGIYQTSNFRVQPTESIVRFPNITNLCPFGEVFNATRFASVYAWNRKRISNCVADYSVLYNSASFSTFKCYGVSPTKLNDLCFTNVYADSFVIRGDEVRQIAPGQTGKIADYNYKLPDDFTGCVIAWNSNNLDSKVGGNYNYLYRLFRKSNLKPFERDISTEIYQAGSTPCNGVEGFNCYFPLQSYGFQPTNGVGYQPYRVVVLSFELLHAPATVCGPKKSTNLVKNKCVNFNFNGLTGTGVLTESNKKFLPFQQFGRDIADTTDAVRDPQTLEILDITPCSFGGVSVITPGTNTSNQVAVLYQDVNCTEVPVAIHADQLTPTWRVYSTGSNVFQTRAGCLIGAEHVNNSYECDIPIGAGICASYQTQTNSPRRARSVASQSIIAYTMSLGAENSVAYSNNSIAIPTNFTISVTTEILPVSMTKTSVDCTMYICGDSTECSNLLLQYGSFCTQLNRALTGIAVEQDKNTQEVFAQVKQIYKTPPIKDFGGFNFSQILPDPSKPSKRSFIEDLLFNKVTLADAGFIKQYGDCLGDIAARDLICAQKFNGLTVLPPLLTDEMIAQYTSALLAGTITSGWTFGAGAALQIPFAMQMAYRFNGIGVTQNVLYENQKLIANQFNSAIGKIQDSLSFTASALGKLQDVVNQNAQALNTLVKCLSSNFGAISSVLNDILSRLDKVEAEVQIDRLITGRLQCLQTYVTQQLIRAAEIRASANLAATKMSECVLGQSKRVDFCGKGYHLMSFPQSAPHGVVFLHVTYVPAQEKNFTTAPAICHDGKAHFPREGVFVSNGTHWFVTQRNFYEPQIITTDNTFVSGNCDVVIGIVNNTVYDPLQPELDSGGSGYIPEAPRDGQAYVRKDGEWVLLSTFL

SEQ ID NO: 10344 - protein, 1177 aa, Artificial Sequence; identical to SEQ ID NO: 10324
  SARS-CoV-2/Australia/NSW10/2020__EPI_ISL_413596 spike protein (1-1147)(Q965C_S1003C) Foldon construct

SEQ ID NO: 10345 - protein, 1177 aa, Artificial Sequence
  SARS-CoV-2/Switzerland/1000477797/2020__EPI_ISL_413023 spike protein (1-1147)(Q965C_S1003C) Foldon construct
MFVFLVLLPLVSSQCVNLTTRTQLPPAYTNSFTRGVYYPDKVFRSSVLHSTQDLFLPFFSNVTWFHAIHVSGTNGTKRFDNPVLPFNDGVYFASTEKSNIIRGWIFGTTLDSKTQSLLIVNNATNVVIKVCEFQFCNDPFLGVYYHKNNKSWMESEFRVYSSANNCTFEYVSQPFLMDLEGKQGNFKNLREFVFKNIDGYFNIYSKHTPINLVRDLPQGFSALEPLVDLPIGINITRFQTLLALHRSYLTPGDSSSGWTAGAAAYYVGYLQPRTFLLKYNENGTITDAVDCALDPLSETKCTLKSFTVEKGIYQTSNFRVQPTESIVRFPNITNLCPFGEVFNATRFASVYAWNRKRISNCVADYSVLYNSASFSTFKCYGVSPTKLNDLCFTNVYADSFVIRGDEVRQIAPGQTGKIADYNYKLPDDFTGCVIAWNSNNLDSKVGGNYNYLYRLFRKSNLKPFERDISTEIYQAGSTPCNGVEGFNCYFPLQSYGFQPTNGVGYQPYRVVVLSFELLHAPATVCGPKKSTNLVKNKCVNFNFNGLTGTGVLTESNKKFLPFQQFGRDIADTTDAVRDPQTLEILDITPCSFGGVSVITPGTNTSNQVAVLYQGVNCTEVPVAIHADQLTPTWRVYSTGSNVFQTRAGCLIGAEHVNNSYECDIPIGAGICASYQTQTNSPRRARSVASQSIIAYTMSLGAENSVAYSNNSIAIPTNFTISVTTEILPVSMTKTSVDCTMYICGDSTECSNLLLQYGSFCTQLNRALTGIAVEQDKNTQEVFAQVKQIYKTPPIKDFGGFNFSQILPDPSKPSKRSFIEDLLFNKVTLADAGFIKQYGDCLGDIAARDLICAQKFNGLTVLPPLLTDEMIAQYTSALLAGTITSGWTFGAGAALQIPFAMQMAYRFNGIGVTQNVLYENQKLIANQFNSAIGKIQDSLSSTASALGKLQDVVNQNAQALNTLVKCLSSNFGAISSVLNDILSRLDKVEAEVQIDRLITGRLQCLQTYVTQQLIRAAEIRASANLAATKMSECVLGQSKRVDFCGKGYHLMSFPQSAPHGVVFLHVTYVPAQEKNFTTAPAICHDGKAHFPREGVFVSNGTHWFVTQRNFYEPQIITTDNTFVSGNCDVVIGIVNNTVYDPLQPELDSGGSGYIPEAPRDGQAYVRKDGEWVLLSTFL

SEQ ID NO: 10346 - protein, 1177 aa, Artificial Sequence
  SARS-CoV-2/Belgium/BA-02291/2020__EPI_ISL_415159 spike protein (1-1147)(Q965C_S1003C) Foldon construct
MFVFLVLLPLVSSQCVNLTTRTQLPPAYTNSFTRGVYYPDKVFRSSVLHSTQDLFLPFFSNVTWFHAIHVSGTNGTKRFDNPVLPFNDGVYFASTEKSNIIRGWIFGTTLDSKTQSLLIVNNATNVVIKVCEFQFCNDPFLGVYYHKNNKSWMESEFRVYSSANNCTFEYVSQPFLMDLEGKQGNFKNLREFVFKNIDGYFKIYSKHTPINLVRDLPQGFSALEPLVDLPIGINITRFQTLLALHRSYLTPGDSSSGWTAGAAAYYVGYLQPRTFLLKYNENGTITDAVDCALDPLSETKCTLKSFTVEKGIYQTSNFRVQPTESIVRFPNITNLCPFGEVFNATRFASVYAWNRKRISNCVADYSVLYNSASFSTFKCYGVSPTKLNDLCFTNVYADSFVIRGDEVRQIAPGQTGKIADYNYKLPDDFTGCVIAWNSNNLDSKVGGNYNYLYRLFRRSNLKPFERDISTEIYQAGSTPCNGVEGFNCYFPLQSYGFQPTNGVGYQPYRVVVLSFELLPAPATVCGPKKSTNLVKNKCVNFNFNGLTGTGVLTESNKKFLPFQQFGRDIADTTDAVRDPQTLEILDITPCSFGGVSVITPGTNTSNQVAVLYQGVNCTEVPVAIHADQLTPTWRVYSTGSNVFQTRAGCLIGAEHVNNSYECDIPIGAGICASYQTQTNSPRRARSVASQSIIAYTMSLGAENSVAYSNNSIAIPTNFTISVTTEILPVSMTKTSVDCTMYICGDSTECSNLLLQYGSFCTQLNRALTGIAVEQDKNTQEVFAQVKQIYKTPPIKDFGGFNFSQILPDPSKPSKRSFIEDLLFNKVTLADAGFIKQYGDCLGDIAARDLICAQKFNGLTVLPPLLTDEMIAQYTSALLAGTITSGWTFGAGAALQIPFAMQMAYRFNGIGVTQNVLYENQKLIANQFNSAIGKIQDSLSSAAPALGKLQDVVNQNAQALNTLVKCLSSNFGAISSVLNDILSRLDKVEAEVQIDRLITGRLQCLQTYVTQQLIRAAEIRASANLAATKMSECVLGQSKRVDFCGKGYHLMSFPQSAPHGVVFLHVTYVPAQEKNFTTAPAICHDGKAHFPREGVFVSNGTHWFVTQRNFYEPQIITTDNTFVSGNCDVVIGIVNNTVYDPLQPELDSGGSGYIPEAPRDGQAYVRKDGEWVLLSTFL

SEQ ID NO: 10347 - protein, 1177 aa, Artificial Sequence
  SARS-CoV-2/USA/WA8-UW5/2020__EPI_ISL_413486 spike protein (1-1147)(Q965C_S1003C) Foldon construct
MFVFLVLLPLVSSQCVNLTTRTQLPPAYTNSFTRGVYYPDKVFRSSVLHSTQDLFLPFFSNVTWFHAIHVSGTNGTKRFDNPVLPFNDGVYFASTEKSNIIRGWIFGTTLDSKTQSLLIVNNATNVVIKVCEFQFCNDPFLGVYYHKNNKSWMESEFRVYSSANNCTFEYVSQPFLMDLEGKQGNFKNLREFVFKNIDGYFKIYSKHTPINLVRDLPQGFSALEPLVDLPIGINITRFQTLLALHRSYLTPGDSSSGWTAGAAAYYVGYLQPRTFLLKYNENGTITDAVDCALDPLSETKCTLKSFTVEKGIYQTSNFRVQPTESIVRFPNITNLCPFGEVFNATRFASVYAWNRKRISNCVADYSVLYNSASFSTFKCYGVSPTKLNDLCFTNVYADSFVIRGDEVRQIAPGQTGKIADYNYKLPDDFTGCVIAWNSNNLDSKVGGNYNYLYRLFRKSNLKPFERDISTEIYQAGSTPCNGVEGFNCYFPLQSYGFQPTNGVGYQPYRVVVLSFELLHAPATVCGPKKSTNLVKNKCVNFNFNGLTGTGVLTESNKKFLPFQQFGRDIADTTDAVRDPQTLEILDITPCSFGGVSVITPGTNTSNQVAVLYQDVNCTEVPVAIHADQLTPTWRVYSTGSNVFQTRAGCLIGAEYVNNSYECDIPIGAGICASYQTQTNSPRRARSVASQSIIAYTMSLGAENSVAYSNNSIAIPTNFTISVTTEILPVSMTKTSVDCTMYICGDSTECSNLLLQYGSFCTQLNRALTGIAVEQDKNTQEVFAQVKQIYKTPPIKDFGGFNFSQILPDPSKPSKRSFIEDLLFNKVTLADAGFIKQYGDCLGDIAARDLICAQKFNGLTVLPPLLTDEMIAQYTSALLAGTITSGWTFGAGAALQIPFAMQMAYRFNGIGVTQNVLYENQKLIANQFNSAIGKIQDSLSSTASALGKLQDVVNQNAQALNTLVKCLSSNFGAISSVLNDILSRLDKVEAEVQIDRLITGRLQCLQTYVTQQLIRAAEIRASANLAATKMSECVLGQSKRVDFCGKGYHLMSFPQSAPHGVVFLHVTYVPAQEKNFTTAPAICHDGKAHFPREGVFVSNGTHWFVTQRNFYEPQIITTDNTFVSGNCDVVIGIVNNTVYDPLQPELDSGGSGYIPEAPRDGQAYVRKDGEWVLLSTFL

SEQ ID NO: 10348 - protein, 1177 aa, Artificial Sequence
  SARS-CoV-2/England/20102000506/2020__EPI_ISL_415147 spike protein (1-1147)(Q965C_S1003C) Foldon construct
MFVFLVLLPLVSSQCVNLTTRTQLPPAYTNSFTRGVYYPDKVFRSSVLHSTQDLFLPFFSNVTWFHAIHVSGTNGTKRFDNPVLPFNDGVYFASTEKSNIIRGWIFGTTLDSKTQSLLIVNNATNVVIKVCEFQFCNDPFLGVYYHKNNKSWMESEFRVYSSANNCTFEYVSQPFLMDLEGKQGNFKNLREFVFKNIDGYFKIYSKHTPINLVRDLPQGFSALEPLVDLPIGINITRFQTLLALHRSYLTPGDSSSGWTAGAAAYYVGYLQPRTFLLKYNENGTITDAVDCALDPLSETKCTLKSFTVEKGIYQTSNFRVQPTESIVRFPNITNLCPFGEVFNATRFASVYAWNRKRISNCVADYSVLYNSASFSTFKCYGVSPTKLNDLCFTNVYADSFVIRGDEVRQIAPGQTGKIADYNYKLPDDFTGCVIAWNSNNLDSKVGGNYNYLYRLFRKSNLKPFERDISTEIYQAGSTPCNGVEGFNCYFPLQSYGFQPTNGVGYQPYRVVVLSFELLHAPATVCGPKKSTNLVKNKCVNFNFNGLTGTGVLTESNKKFLPFQQFGRDIADTTDAVRDPQTLEILDITPCSFGGVSVITPGTNTSNQVAVLYQGVNCTEVPVAIHADQLTPTWRVYSTGSNVFQTRAGCLIGAEHVNNSYECDIPIGAGICASYQTQTNSPRRARSVASQSIIAYTMSLGAENSVAYSNNSIAIPTNFTISVTTEILPVSMTKTSVDCTMYICGDSTECSNLLLQYGSFCTQLNRALTGIAVEQDKNTQEVFAQVKQIYKTPPIKDFGGFNFSQILPDPSKPSKRSFIEDLLFNKVTLADAGFIKQYGYCLGDIAARDLICAQKFNGLTVLPPLLTDEMIAQYTSALLAGTITSGWTFGAGAALQIPFAMQMAYRFNGIGVTQNVLYENQKLIANQFNSAIGKIQDSLSSTASALGKLQDVVNQNAQALNTLVKCLSSNFGAISSVLNDILSRLDKVEAEVQIDRLITGRLQCLQTYVTQQLIRAAEIRASANLAATKMSECVLGQSKRVDFCGKGYHLMSFPQSAPHGVVFLHVTYVPAQEKNFTTAPAICHDGKAHFPREGVFVSNGTHWFVTQRNFYEPQIITTDNTFVSGNCDVVIGIVNNTVYDPLQPELDSGGSGYIPEAPRDGQAYVRKDGEWVLLSTFL

SEQ ID NO: 10349 - protein, 1177 aa, Artificial Sequence
  SARS-CoV-2/Belgium/VAG-03013/2020__EPI_ISL_415155 spike protein (1-1147)(Q965C_S1003C) Foldon construct
MFVFLVLLPLVSSQCVNLTTRTQLPPAYTNSFTRGVYYPDKVFRSSVLHSTQDLFLPFFSNVTWFHAIHVSGTNGTKRFDNPVLPFNDGVYFASTEKSNIIRGWIFGTTLDSKTQSLLIVNNATNVVIKVCEFQFCNDPFLGVYYHKNNKSWMESEFRVYSSANNCTFEYVSQPFLMDLEGKQGNFKNLREFVFKNIDGYFKIYSKHTPINLVRDLPQGFSALEPLVDLPIGINITRFQTLLALHRSYLTPGDSSSGWTAGAAAYYVGYLQPRTFLLKYNENGTITDAVDCALDPLSETKCTLKSFTVEKGIYQTSNFRVQPTESIVRFPNITNLCPFGEVFNATRFASVYAWNRKRISNCVADYSVLYNSASFSTFKCYGVSPTKLNDLCFTNVYADSFVIRGDEVRQIAPGQTGKIADYNYKLPDDFTGCVIAWNSNNLDSKVGGNYNYLYRLFRKSNLKPFERDISTEIYQAGSTPCNGVEGFNCYFPLQSYGFQPTNGVGYQPYRVVVLSFELLHAPATVCGPKKSTNLVKNKCVNFNFNGLTGTGVLTESNKKFLPFQQFGRDIADTTDAVRDPQTLEILDITPCSFGGVSVITPGTNTSNQVAVLYQGVNCTEVPVAIHADQLTPTWRVYSTGSNVFQTRAGCLIGAEHVNNSYECDIPIGAGICASYQTQTNSPRRARSVASQSIIAYTMSLGAENSVAYSNNSIAIPTNFTISVTTEILPVSMTKTSVDCTMYICGDSTECSNLLLQYGSFCTQLNRALTGIAVEQDKNTQEVFAQVKQIYKTPPIKDFGGFNFSQILPDPSKPSKRSFIEDLLFNKVTLADAGFIKQYGDCLGDIAARDLICAQKFNGLTVLPPLLTDEMIAQYTSALLAGTITSGWTFGAGAALQIPFAMQMAYRFNGIGVTQNVLYENQKLIANQFNSAIGKIQDSLSSTATALGKLQDVVNQNAQALNTLVKCLSSNFGAISSVLNDILSRLDKVEAEVQIDRLITGRLQCLQTYVTQQLIRAAEIRASANLAATKMSECVLGQSKRVDFCGKGYHLMSFPQSAPHGVVFLHVTYVPAQEKNFTTAPAICHDGKAHFPREGVFVSNGTHWFVTQRNFYEPQIITTDNTFVSGNCDVVIGIVNNTVYDPLQPELDSGGSGYIPEAPRDGQAYVRKDGEWVLLSTFL

SEQ ID NO: 10350 - protein, 1177 aa, Artificial Sequence
  SARS-CoV-2/Belgium/BC-03016/2020__EPI_ISL_415157 spike protein (1-1147)(Q965C_S1003C) Foldon construct
MFVFLVLLPLVSSQCVNLTTRTQLPPAYTNSFTRGVYYPDKVFRSSVLHSTQDLFLPFFSNVTWFHAIHVSGTNGTKRFDNPVLPFNDGVYFASTEKSNIIRGWIFGTTLDSKTQSLLIVNNATNVVIKVCEFQFCNDPFLGVYYHKNNKSWMESEFRVYSSANNCTFEYVSQPFLMDLEGKQGNFKNLREFVFKNIDGYFKIYSKHTPINLVRDLPQGFSALEPLVDLPIGINITRFQTLLALHRSYLTPGDSSSGWTAGAAAYYVGYLQPRTFLLKYNENGTITDAVDCALDPLSETKCTLKSFTVEKGIYQTSNFRVQPTESIVRFPNITNLCPFGEVFNATRFASVYAWNRKRISNCVADYSVLYNSASFSTFKCYGVSPTKLNDLCFTNVYADSFVIRGDEVRQIAPGQTGKIADYNYKLPDDFTGCVIAWNSNNLDSKVGGNYNYLYRLFRKSNLKPFERDISTEIYQAGSTPCNGVEGFNCYFPLQSYGFQPTNGVGYQPYRVVVLSFELLHAPATVCGPKKSTNLVKNKCVNFNFNGLTGTGVLTESNKKFLPFQQFGRDIADTTDAVRDPQTLEILDITPCSFGGVSVITPGTNTSNQVAVLYQGVNCTEVPVAIHADQLTPTWRVYSTGSNVFQTRAGCLIGAEHVNNSYECDIPIGAGICASYQTQTNSPRRARSVASQSIIAYTMSLGAENSVAYSNNSIAIPTNFTISVTTEILPVSMTKTSVDCTMYICGDSTECSNLLLQYGSFCTQLNRALTGIAVEQDKNTQEVFAQVKQIYKTPPIKDFGGFNFSQILPDPSKPSKRSFIEDLLFNKVTLADAGFIKQYGDCLGDIAARDLICAQKFNGLTVLPPLLTDEMIAQYTSALLAGTITSGWTFGAGAALQIPFAMQMAYRFNGIGVTQNVLYENQKLIANQFNSAIGKIQDSLSSTAPALGKLQDVVNQNAQALNTLVKCLSSNFGAISSVLNDILSRLDKVEAEVQIDRLITGRLQCLQTYVTQQLIRAAEIRASANLAATKMSECVLGQSKRVDFCGKGYHLMSFPQSAPHGVVFLHVTYVPAQEKNFTTAPAICHDGKAHFPREGVFVSNGTHWFVTQRNFYEPQIITTDNTFVSGNCDVVIGIVNNTVYDPLQPELDSGGSGYIPEAPRDGQAYVRKDGEWVLLSTFL

SEQ ID NO: 10351 - protein, 1177 aa, Artificial Sequence
  SARS-CoV-2/Germany/BavPat3/2020__EPI_ISL_414521 spike protein (1-1147)(Q965C_S1003C) Foldon construct
MFVFLVLLPLVSSQCVNLTTRTQLPPAYTNSFTRGVYYPDKVFRSSVLHSTQDLFLPFFSNVTWFHAIHVSGTNGTKRFDNPVLPFNDGVYFASTEKSNIIRGWIFGTTLDSKTQSLLIVNNATNVVIKVCEFQFCNDPFLGVYYHKNNKSWMESEFRVYSSANNCTFEYVSQPFLMDLEGKQGNFKNLREFVFKNIDGYFKIYSKHTPINLVRDLPQGFSALEPLVDLPIGINITRFQTLLALHRSYLTPGDSSSGWTAGAAAYYVGYLQPRTFLLKYNENGTITDAVDCALDPLSETKCTLKSFTVEKGIYQTSNFRVQPTESIVRFPNITNLCPFGEVFNATRFASVYAWNRKRISNCVADYSVLYNSASFSTFKCYGVSPTKLNDLCFTNVYADSFVIRGDEVRQIAPGQTGKIADYNYKLPDDFTGCVIAWNSNNLDSKVGGNYNYLYRLFRKSNLKPFERDISTEIYQAGSTPCNGVEGFNCYFPLQSYGFQPTNGVGYQPYRVVVLSFELLHAPATVCGPKKSTNLVKNKCVNFNFNGLTGTGVLTESNKKFLPFQQFGRDIADTTDAVRDPQTLEILDITPCSFGGVSVITPGTNTSNQVAVLYQDVNCTEVPVAIHADQLTPTWRVYSTGSNVFQTRAGCLIGAEHVNNSYECDIPIGAGICASYQTQTNSPRRARSVASQSIIAYTMSLGAENSVAYSNNSIAIPTNFTISVTTEILPVSMTKTSVDCTMYICGDSTECSNLLLQYGSFCTQLNRALTGIAVEQDKNTQQVFAQVKQIYKTPPIKDFGGFNFSQILPDPSKPSKRSFIEDLLFNKVTLADAGFIKQYGDCLGDIAARDLICAQKFNGLTVLPPLLTDEMIAQYTSALLAGTITSGWTFGAGAALQIPFAMQMAYRFNGIGVTQNVLYENQKLIANQFNSAIGKIQDSLSSTASALGKLQDVVNQNAQALNTLVKCLSSNFGAISSVLNDILSRLDKVEAEVQIDRLITGRLQCLQTYVTQQLIRAAEIRASANLAATKMSECVLGQSKRVDFCGKGYHLMSFPQSAPHGVVFLHVTYVPAQEKNFTTAPAICHDGKAHFPREGVFVSNGTHWFVTQRNFYEPQIITTDNTFVSGNCDVVIGIVNNTVYDPLQPELDSGGSGYIPEAPRDGQAYVRKDGEWVLLSTFL

SEQ ID NO: 10352 - protein, 1177 aa, Artificial Sequence
  SARS-CoV-2/France/HF1805/2020__EPI_ISL_414628 spike protein (1-1147)(Q965C_S1003C) Foldon construct
MFVFLVLLPLVSSQCVNLTTRTQLPPAYTNSFTRGVYYPDKVFRSSVLHSTQDLFLPFFSNVTWFHAIHVSGTNGTKRFDNPVLPFNDGVYFASTEKSNIIRGWIFGTTLDSKTQSLLIVNNATNVVIKVCEFQFCNDPFLGVYYHKNNKSWMESEFRVYSSANNCTFEYVSQPFLMDLEGKQGNFKNLREFVFKNIDGYFKIYSKHTPINLVRDLPQGFSALEPLVDLPIGINITRFQTLLALHRSYLTPGDSSSGWTAGAAAYYVGYLQPRTFLLKYNENGTITDAVDCALDPLSETKCTLKSFTVEKGIYQTSNFRVQPTESIVRFPNITNLCPFGEVFNATRFASVYAWNRKRISNCVADYSVLYNSASFSTFKCYGVSPTKLNDLCFTNVYADSFVIRGDEVRQIAPGQTGKIADYNYKLPDDFTGCVIAWNSNNLDSKVGGNYNYLYRLFRKSNLKPFERDISTEIYQAGSTPCNGVEGFNCYFPLQSYGFQPTNGVGYQPYRVVVLSFELLHAPATVCGPKKSTNLVKNKCVNFNFNGLTGTGVLTESNKKFLPFQQFGRDIADTTDAVRDPQTLEILDITPCSFGGVSVITPGTNTSNQVAVLYQGVNCTEVPVAIHADQLTPTWRVYSTGSNVFQTRAGCLIGAEHVNNSYECDIPIGAGICASYQTQTNSPRRARSVASQSIIAYTMSLGAENSVAYSNNSIAIPTNFTISVTTEILPVSMTKTSVDCTMYICGDSTECSNLLLQYGSFCTQLNRALTGIAVEQDKNTQEVFAQVKQIYKTPPIKDFGGFNFSQILPDPSKPSKRSFIEDLLFNKVTLADAGFIKQYGDCLGDIAARDLICAQKFNGLTVLPPLLTDEMIAQYTSALLAGTITSGWTFGAGAALQIPFAMQMAYRFNGIGVTQNVLYENQKLIANQFNSAIGKIQDSLSSTASALGKLQDVVNQNAQALNTLVKCLSSNFGAISSVLNDILSRLDKVEAEVQIDRLITGRLQCLQTYVTQQLIRAAEIRASANLAATKMSECVLGQSKRVDFCGKGYHLMSFPQSAPHGVVFLHVTYVPAQEKNFTTAPAICHDGKAHFPREGVFVSNGTHWFVTQRNFYEPQIITTDNTFVSGNCDVVIGVVNNTVYDPLQPELDSGGSGYIPEAPRDGQAYVRKDGEWVLLSTFL

SEQ ID NO: 10353 - protein, 1177 aa, Artificial Sequence
  SARS-CoV-2/Netherlands/ZuidHolland_9/2020__EPI_ISL_414445 spike protein (1-1147)(Q965C_S1003C) Foldon construct
MFVFLVLLPLVSSQCVNLTTRTQLPPAYTNSFTRGVYYPDKVFRSSVLHSTQDLFLPFFSNVTWFHAIHVSGTNGTKRFDNPVLPFNDGVYFASTEKSNIIRGWIFGTTLDSKTQSLLIVNNATNVVIKVCEFQFCNDPFLGVYYHKNNKSWMESEFRVYSSANNCTFEYVSQPFLMDLEGKQGNFKNLREFVFKNIDGYFKIYSKHTPINLVRDLPQGFSALEPLVDLPIGINITRFQTLLALHRSYLTPGDSSSGWTAGAAAYYVGYLQPRTFLLKYNENGTITDAVDCALDPLSETKCTLKSFTVEKGIYQTSNFRVQPTESIVRFPNITNLCPFGEVFNATRFASVYAWNRKRISNCVADYSVLYNSASFSTFKCYGVSPTKLNDLCFTNVYADSFVIRGDEVRQIAPGQTGKIADYNYKLPDDFTGCVIAWNSNNLDSKVGGNYNYLYRLFRKSNLKPFERDISTEIYQAGSTPCNGVEGFNCYFPLQSYGFQPTNGVGYQPYRVVVLSFELLHAPATVCGPKKSTNLVKNKCVNFNFNGLTGTGVLTESNKKFLPFQQFGRDIADTTDAVRDPQTLEILDITPCSFGGVSVITPGTNTSNQVAVLYQGVNCTEVPVAIHADQLTPTWRVYSTGSNVFQTRAGCLIGAEHVNNSYECDIPIGAGICASYQTQTNSPRRARSVASQSIIAYTMSLGAENSVAYSNNSIAIPTNFTISVTTEILPVSMTKTSVDCTMYICGDSTECSNLLLQYGSFCTQLNRALTGIAVEQDKNTQEVFAQVKQIYKTPPIKDFGGFNFSQILPDPSKPSKRSFIEDLLFNKVTLADAGFIKQYGDCLGDIAARDLICVQKFNGLTVLPPLLTDEMIAQYTSALLAGTITSGWTFGAGAALQIPFAMQMAYRFNGIGVTQNVLYENQKLIANQFNSAIGKIQDSLSSTASALGKLQDVVNQNAQALNTLVKCLSSNFGAISSVLNDILSRLDKVEAEVQIDRLITGRLQCLQTYVTQQLIRAAEIRASANLAATKMSECVLGQSKRVDFCGKGYHLMSFPQSAPHGVVFLHVTYVPAQEKNFTTAPAICHDGKAHFPREGVFVSNGTHWFVTQRNFYEPQIITTDNTFVSGNCDVVIGIVNNTVYDPLQPELDSGGSGYIPEAPRDGQAYVRKDGEWVLLSTFL

SEQ ID NO: 10354 - protein, 1177 aa, Artificial Sequence
  SARS-CoV-2/Finland/FIN03032020A/2020__EPI_ISL_413602 spike protein (1-1147)(Q965C_S1003C) Foldon construct
MFVFLVLLPLVSSQCVNLTTRTQLPPAYTNSFTRGVYYPDKVFRSSVLHSTQDLFLPFFSNVTWFHAIHVSGTNGTKRFDNPVLPFNDGVYFASTEKSNIIRGWIFGTTLDSKTQSLLIVNNATNVVIKVCEFQFCNDPFLGVYYHKNNKSWMESEFRVYSSANNCTFEYVSQPFLMDLEGKQGNFKNLREFVFKNIDGYFKIYSKHTPINLVRDLPQGFSALEPLVDLPIGINITRFQTLLALHRSYLTPGDSSSGWTAGAAAYYVGYLQPRTFLLKYNENGTITDAVDCALDPLSETKCTLKSFTVEKGIYQTSNFRVQPTESIVRFPNITNLCPFGEVFNATRFASVYAWNRKRISNCVADYSVLYNSASFSTFKCYGVSPTKLNDLCFTNVYADSFVIRGDEVRQIAPGQTGKIADYNYKLPDDFTGCVISWNSNNLDSKVGGNYNYLYRLFRKSNLKPFERDISTEIYQAGSTPCNGVEGFNCYFPLQSYGFQPTNGVGYQPYRVVVLSFELLHAPATVCGPKKSTNLVKNKCVNFNFNGLTGTGVLTESNKKFLPFQQFGRDIADTTDAVRDPQTLEILDITPCSFGGVSVITPGTNTSNQVAVLYQGVNCTEVPVAIHADQLTPTWRVYSTGSNVFQTRAGCLIGAEHVNNSYECDIPIGAGICASYQTQTNSPRRARSVASQSIIAYTMSLGAENSVAYSNNSIAIPTNFTISVTTEILPVSMTKTSVDCTMYICGDSTECSNLLLQYGSFCTQLNRALTGIAVEQDKNTQEVFAQVKQIYKTPPIKDFGGFNFSQILPDPSKPSKRSFIEDLLFNKVTLADAGFIKQYGDCLGDIAARDLICAQKFNGLTVLPPLLTDEMIAQYTSALLAGTITSGWTFGAGAALQIPFAMQMAYRFNGIGVTQNVLYENQKLIANQFNSAIGKIQDSLSSTASALGKLQDVVNQNAQALNTLVKCLSSNFGAISSVLNDILSRLDKVEAEVQIDRLITGRLQCLQTYVTQQLIRAAEIRASANLAATKMSECVLGQSKRVDFCGKGYHLMSFPQSAPHGVVFLHVTYVPAQEKNFTTAPAICHDGKAHFPREGVFVSNGTHWFVTQRNFYEPQIITTDNTFVSGNCDVVIGIVNNTVYDPLQPELDSGGSGYIPEAPRDGQAYVRKDGEWVLLSTFL

SEQ ID NO: 10355 - protein, 1177 aa, Artificial Sequence
  SARS-CoV-2/France/GE1977/2020__EPI_ISL_414632 spike protein (1-1147)(Q965C_S1003C) Foldon construct
MFVFLVLLPLVSSQCVNLTTRTQLPPAYTNSFTRGVYYPDKVFRSSVLHSTQDLFLPFFSNVTWFHAIHVSGTNGTKRFDNPVLPFNDGVYFASTEKSNIIRGWIFGTTLDSKTQSLLIVNNATNVVIKVCEFQFCNDPFLGVYYHKNNKSWMESEFRVYSSANNCTFEYVSQPFLMDLEGKQGNFKNLREFVFKNIDGYFKIYSKHTPINLVRDLPQGFSALEPLVDLPIGINITRFQTLLALHRSYLTPGDSSSGWTAGAAAYYVGYLQPRTFLLKYNENGTITDAVDCALDPLSETKCTLKSFTVEKGIYQTSNFRVQPTESIVRFPNITNLCPFGEVFNATRFASVYAWNRKRISNCVADYSVLYNSASFSTFKCYGVSPTKLNDLCFTNVYADSFVIRGDEVRQIAPGQTGKIADYNYKLPDDFTGCVIAWNSNNLDSKVGGNYNYLYRLFRKSNLKPFERDISTEIYQAGSTPCNGVEGFNCYFPLQSYGFQPTNGVGYQPYRVVVLSFELLHAPATVCGPKKSTNLVKNKCVNFNFNGLTGTGVLTESNKKFLPFQQFGRDIADTTDAVRDPQTLEILDITPCSFGGVSVITPGTNTSNQVAVLYQGVNCTEVPVAIHADQLTPTWRVYSTGSNVFQTRAGCLIGAEHVNNSYECDIPIGAGICASYQTQTNSPRRARSVASQSIIAYTMSLGAENSVAYSNNSIAIPTNFTISVTTEILPVSMTKTSVDCTMYICGDSTECSNLLLQYGSFCTQLNRALTGIAVEQDKNTQEVFAQVKQIYKTPPIKDFGGFNFSQILPDPSKPSKRSFIEDLLFNKVTLADAGFIKQYGDCLGDIAARDLICAQKFNGLTVLPPLLTDEMIAQYTSALLAGTITSGWTFGAGAALQIPFAMQMAYRFNGIGVTQNVLYENQKLIANQFNSAIGKIQDSLFSTASALGKLQDVVNQNAQALNTLVKCLSSNFGAISSVLNDILSRLDKVEAEVQIDRLITGRLQCLQTYVTQQLIRAAEIRASANLAATKMSECVLGQSKRVDFCGKGYHLMSFPQSAPHGVVFLHVTYVPAQEKNFTTAPAICHDGKAHFPREGVFVSNGTHWFVTQRNFYEPQIITTDNTFVSGNCDVVIGIVNNTVYDPLQPELDSGGSGYIPEAPRDGQAYVRKDGEWVLLSTFL

SEQ ID NO: 10356 - protein, 1177 aa, Artificial Sequence
  SARS-CoV-2/Finland/FIN-313/2020__EPI_ISL_414641 spike protein (1-1147)(Q965C_S1003C) Foldon construct
MFVFLVLLPLVSSQCVNLTTRTQLPPAYTNSFTRGVYYPDKVFRSSVLHSTQDLFLPFFSNVTWFHAIHVSGTNGTKRFDNPVLPFNDGVYFASTEKSNIIRGWIFGTTLDSKTQSLLIVNNATNVVIKVCEFQFCNDPFLGVYYHKNNKSWMESEFRVYSSANNCTFEYVSQPFLMDLEGKQGNFKNLREFVFKNIDGYFKIYSKHTPINLVRDLPQGFSALEPLVDLPIGINITRFKTLLALHRSYLTPGDSSSGWTAGAAAYYVGYLQPRTFLLKYNENGTITDAVDCALDPLSETKCTLKSFTVEKGIYQTSNFRVQPTESIVRFPNITNLCPFGEVFNATRFASVYAWNRKRISNCVADYSVLYNSASFSTFKCYGVSPTKLNDLCFTNVYADSFVIRGDEVRQIAPGQTGKIADYNYKLPDDFTGCVIAWNSNNLDSKVGGNYNYLYRLFRKSNLKPFERDISTEIYQAGSTPCNGVEGFNCYFPLQSYGFQPTNGVGYQPYRVVVLSFELLHAPATVCGPKKSTNLVKNKCVNFNFNGLTGTGVLTESNKKFLPFQQFGRDIADTTDAVRDPQTLEILDITPCSFGGVSVITPGTNTSNQVAVLYQGVNCTEVPVAIHADQLTPTWRVYSTGSNVFQTRAGCLIGAEHVNNSYECDIPIGAGICASYQTQTNSPRRARSVASQSIIAYTMSLGAENSVAYSNNSIAIPTNFTISVTTEILPVSMTKTSVDCTMYICGDSTECSNLLLQYGSFCTQLNRALTGIAVEQDKNTQEVFAQVKQIYKTPPIKDFGGFNFSQILPDPSKPSKRSFIEDLLFNKVTLADAGFIKQYGDCLGDIAARDLICAQKFNGLTVLPPLLTDEMIAQYTSALLAGTITSGWTFGAGAALQIPFAMQMAYRFNGIGVTQNVLYENQKLIANQFNSAIGKIQDSLSSTASALGKLQDVVNQNAQALNTLVKCLSSNFGAISSVLNDILSRLDKVEAEVQIDRLITGRLQCLQTYVTQQLIRAAEIRASANLAATKMSECVLGQSKRVDFCGKGYHLMSFPQSAPHGVVFLHVTYVPAQEKNFTTAPAICHDGKAHFPREGVFVSNGTHWFVTQRNFYEPQIITTDNTFVSGNCDVVIGIVNNTVYDPLQPELDSGGSGYIPEAPRDGQAYVRKDGEWVLLSTFL

SEQ ID NO: 10357 - protein, 1177 aa, Artificial Sequence
  SARS-CoV-2/Netherlands/ZuidHolland_2/2020__EPI_ISL_414556 spike protein (1-1147)(Q965C_S1003C) Foldon construct
MFVFLVLLPLVSSQCVNLTTRTQLPPAYTNSFTRGVYYPDKVFRSSVLHSTQDLFLPFFSNVTWFHAIHVSGTNGTKRFDNPVLPFNDGVYFASTEKSNIIRGWIFGTTLDSKTQSLLIVNNATNVVIKVCEFQFCNDPFLGVYYHKNNKSWMESEFRVYSSANNCTFEYVSQPFLMDLEGKQGNFKNLREFVFKNIDGYFKIYSKHTPINLVRDLPQGFSALEPLVDLPIGINITRFQTLLALHRSYLTPGDSSSGWTAGAAAYYVGYLQPRTFLLKYNENGTITDAVDCALDPLSETKCTLKSFTVEKGIYQTSNFRVQPTESIVRFPNITNLCPFGEVFNATRFASVYAWNRKRISNCVADYSVLYNSASFSTFKCYGVSPTKLNDLCFTNVYADSFVIRGDEVRQIAPGQTGKIADYNYKLPDDFTGCVIAWNSNNLDSKVGGNYNYLYRLFRKSNLKPFERDISTEIYQAGSTPCNGVEGFNCYFPLQSYGFQPTNGVGYQPYRVVVLSFELLHAPATVCGPKKSTNLVKNKCVNFNFNGLTGTGVLTESNKKFLPFQQFGRDIADTTDAVRDPQTLEILDITPCSFGGVSVITPGTNTSNQVAVLYQGVNCTEVPVAIHADQLTPTWRVYSTGSNVFQTRAGCLIGAEHVNNSYECDIPIGAGICASYQTQTNSPRRARSVASQSIIAYTMSLGAENSVAYSNNSIAIPTNFTISVTTEILPVSMTKTSVDCTMYICGDSTECSNLLLQYGSFCTQLNRALTGIALEQDKNTQEVFAQVKQIYKTPPIKDFGGFNFSQILPDPSKPSKRSFIEDLLFNKVTLADAGFIKQYGDCLGDIAARDLICAQKFNGLTVLPPLLTDEMIAQYTSALLAGTITSGWTFGAGAALQIPFAMQMAYRFNGIGVTQNVLYENQKLIANQFNSAIGKIQDSLSSTASALGKLQDVVNQNAQALNTLVKCLSSNFGAISSVLNDILSRLDKVEAEVQIDRLITGRLQCLQTYVTQQLIRAAEIRASANLAATKMSECVLGQSKRVDFCGKGYHLMSFPQSAPHGVVFLHVTYVPAQEKNFTTAPAICHDGKAHFPREGVFVSNGTHWFVTQRNFYEPQIITTDNTFVSGNCDVVIGIVNNTVYDPLQPELDSGGSGYIPEAPRDGQAYVRKDGEWVLLSTFL

SEQ ID NO: 10358 - protein, 1177 aa, Artificial Sequence
  SARS-CoV-2/USA/WA-UW31/2020__EPI_ISL_414618 spike protein (1-1147)(Q965C_S1003C) Foldon construct
MFVFLVLLPLVSSQCVNLTTRTQLPPAYTNSFTRGVYYPDKVFRSSVLHSTQDLFLPFFSNVTWFHAIHVSGTNGTKRFDNPVLPFNDGVYFASTEKSNIIRGWIFGTTLDSKTQSLLIVNNATNVVIKVCEFQFCNDPFLGVYYHKNNKSWMESEFRVYSSANNCTFEYVSQPFLMDLEGKQGNFKNLREFVFKNIDGYFKIYSKHTPINLVRDLPQGFSALEPLVDLPIGINITRFQTLLALHRSYLTPGDSSSGWTAGAAAYYVGYLQPRTFLLKYNENGTITDAVDCALDPLSETKCTLKSFTVEKGIYQTSNFRVQPTESIVRFPNITNLCPFGEVFNATRFASVYAWNRKRISNCVADYSVLYNSASFSTFKCYGVSPTKLNDLCFTNVYADSFVIRGDEVRQIAPGQTGKIADYNYKLPDDFTGCVIAWNSNNLDSKVGGNYNYLYRLFRKSNLKPFERDISTEIYQAGSTPCNGAEGFNCYFPLQSYGFQPTNGVGYQPYRVVVLSFELLHAPATVCGPKKSTNLVKNKCVNFNFNGLTGTGVLTESNKKFLPFQQFGRDIADTTDAVRDPQTLEILDITPCSFGGVSVITPGTNTSNQVAVLYQDVNCTEVPVAIHADQLTPTWRVYSTGSNVFQTRAGCLIGAEHVNNSYECDIPIGAGICASYQTQTNSPRRARSVASQSIIAYTMSLGAENSVAYSNNSIAIPTNFTISVTTEILPVSMTKTSVDCTMYICGDSTECSNLLLQYGSFCTQLNRALTGIAVEQDKNTQEVFAQVKQIYKTPPIKDFGGFNFSQILPDPSKPSKRSFIEDLLFNKVTLADAGFIKQYGDCLGDIAARDLICAQKFNGLTVLPPLLTDEMIAQYTSALLAGTITSGWTFGAGAALQIPFAMQMAYRFNGIGVTQNVLYENQKLIANQFNSAIGKIQDSLSSTASALGKLQDVVNQNAQALNTLVKCLSSNFGAISSVLNDILSRLDKVEAEVQIDRLITGRLQCLQTYVTQQLIRAAEIRASANLAATKMSECVLGQSKRVDFCGKGYHLMSFPQSAPHGVVFLHVTYVPAQEKNFTTAPAICHDGKAHFPREGVFVSNGTHWFVTQRNFYEPQIITTDNTFVSGNCDVVIGIVNNTVYDPLQPELDSGGSGYIPEAPRDGQAYVRKDGEWVLLSTFL

SEQ ID NO: 10359 - protein, 1177 aa, Artificial Sequence
  SARS-CoV-2/South Korea/SNU01/2020__EPI_ISL_411929 spike protein (1-1147)(Q965C_S1003C) Foldon construct
MFVFLVLLPLVSSQCVNLTTRTQLPPAYTNSFTRGVYYPDKVFRSSVLHSTQDLFLPFFSNVTWFHAIHVSGTNGTKRFDNPVLPFNDGVYFASTEKSNIIRGWIFGTTLDSKTQSLLIVNNATNVVIKVCEFQFCNDPFLGVYYHKNNKSWMESEFRVYSSANNCTFEYVSQPFLMDLEGKQGNFKNLREFVFKNIDGYFKIYSKHTPINLVRDLPQGFWALEPLVDLPIGINITRFQTLLALHRSYLTPGDSSSGWTAGAAAYYVGYLQPRTFLLKYNENGTITDAVDCALDPLSETKCTLKSFTVEKGIYQTSNFRVQPTESIVRFPNITNLCPFGEVFNATRFASVYAWNRKRISNCVADYSVLYNSASFSTFKCYGVSPTKLNDLCFTNVYADSFVIRGDEVRQIAPGQTGKIADYNYKLPDDFTGCVIAWNSNNLDSKVGGNYNYLYRLFRKSNLKPFERDISTEIYQAGSTPCNGVEGFNCYFPLQSYGFQPTNGVGYQPYRVVVLSFELLHAPATVCGPKKSTNLVKNKCVNFNFNGLTGTGVLTESNKKFLPFQQFGRDIADTTDAVRDPQTLEILDITPCSFGGVSVITPGTNTSNQVAVLYQDVNCTEVPVAIHADQLTPTWRVYSTGSNVFQTRAGCLIGAEHVNNSYECDIPIGAGICASYQTQTNSPRRARSVASQSIIAYTMSLGAENSVAYSNNSIAIPTNFTISVTTEILPVSMTKTSVDCTMYICGDSTECSNLLLQYGSFCTQLNRALTGIAVEQDKNTQEVFAQVKQIYKTPPIKDFGGFNFSQILPDPSKPSKRSFIEDLLFNKVTLADAGFIKQYGDCLGDIAARDLICAQKFNGLTVLPPLLTDEMIAQYTSALLAGTITSGWTFGAGAALQIPFAMQMAYRFNGIGVTQNVLYENQKLIANQFNSAIGKIQDSLSSTASALGKLQDVVNQNAQALNTLVKCLSSNFGAISSVLNDILSRLDKVEAEVQIDRLITGRLQCLQTYVTQQLIRAAEIRASANLAATKMSECVLGQSKRVDFCGKGYHLMSFPQSAPHGVVFLHVTYVPAQEKNFTTAPAICHDGKAHFPREGVFVSNGTHWFVTQRNFYEPQIITTDNTFVSGNCDVVIGIVNNTVYDPLQPELDSGGSGYIPEAPRDGQAYVRKDGEWVLLSTFL

SEQ ID NO: 10360 - protein, 1177 aa, Artificial Sequence
  SARS-CoV-2/China/WF0004/2020__EPI_ISL_413694 spike protein (1-1147)(Q965C_S1003C) Foldon construct
MFVFLVLLPLVSSQCVNLTTRTQLPPAYTNSFTRGVYYPDKVFRSSVLHSTQDLFLPFFSNVTWFHAIHVSGTNGTKRFDNPVLPFNDGVYFASTEKSNIIRGWIFGTTLDSKTQSLLIVNNATNVVIKVCEFQFCNDPFLGVYYHKNNKSWTESEFRVYSSANNCTFEYVSQPFLMDLEGKQGNFKNLREFVFKNIDGYFKIYSKHTPINLVRDLPQGFSALEPLVDLPIGINITRFQTLLALHRSYLTPGDSSSGWTAGAAAYYVGYLQPRTFLLKYNENGTITDAVDCALDPLSETKCTLKSFTVEKGIYQTSNFRVQPTESIVRFPNITNLCPFGEVFNATRFASVYAWNRKRISNCVADYSVLYNSASFSTFKCYGVSPTKLNDLCFTNVYADSFVIRGDEVRQIAPGQTGKIADYNYKLPDDFTGCVIAWNSNNLDSKVGGNYNYLYRLFRKSNLKPFERDISTEIYQAGSTPCNGVEGFNCYFPLQSYGFQPTNGVGYQPYRVVVLSFELLHAPATVCGPKKSTNLVKNKCVNFNFNGLTGTGVLTESNKKFLPFQQFGRDIADTTDAVRDPQTLEILDITPCSFGGVSVITPGTNTSNQVAVLYQDVNCTEVPVAIHADQLTPTWRVYSTGSNVFQTRAGCLIGAEHVNNSYECDIPIGAGICASYQTQTNSPRRARSVASQSIIAYTMSLGAENSVAYSNNSIAIPTNFTISVTTEILPVSMTKTSVDCTMYICGDSTECSNLLLQYGSFCTQLNRALTGIAVEQDKNTQEVFAQVKQIYKTPPIKDFGGFNFSQILPDPSKPSKRSFIEDLLFNKVTLADAGFIKQYGDCLGDIAARDLICAQKFNGLTVLPPLLTDEMIAQYTSALLAGTITSGWTFGAGAALQIPFAMQMAYRFNGIGVTQNVLYENQKLIANQFNSAIGKIQDSLSSTASALGKLQDVVNQNAQALNTLVKCLSSNFGAISSVLNDILSRLDKVEAEVQIDRLITGRLQCLQTYVTQQLIRAAEIRASANLAATKMSECVLGQSKRFDFCGKGYHLMSFPQSAPHGVVFLHVTYVPAQEKNFTTAPAICHDGKAHFPREGVFVSNGTHWFVTQRNFYEPQIITTDNTFVSGNCDVVIGIVNNTVYDPLQPELDSGGSGYIPEAPRDGQAYVRKDGEWVLLSTFL

SEQ ID NO: 10361 - protein, 1177 aa, Artificial Sequence
  SARS-CoV-2/China/WF0028/2020__EPI_ISL_413791 spike protein (1-1147)(Q965C_S1003C) Foldon construct
MFVFLVLLPLVSSQCVNLTTRTQLPPAYTNSFTRGVYYPDKVFRSSVLHSTQDLFLPFFSNVTWFHAIHVSGTNGTKRFDNPVLPFNDGVYFASTEKSNIIRGWIFGTTLDSKTQSLLIVNNATNVVIKVCEFQFCNDPFLGVYYHKNNKSWMESEFRVYSSANNCTFEYVSQPFLMDLEGKQGNFKNLREFVFKNIDGYFKIYSKHTPINLVRDLPQGFSALEPLVDLPIGINITRFQTLLALHRSYLTPGDSSSGWTAGAAAYYVGYLQPRTFLLKYNENGTITDAVDCALDPLSETKCTLKSFTVEKGIYQTSNFRVQPTESIVRFPNITNLCPFGEVFNATRFASVYAWNRKRISNCVADYSVLYNSASFSTFKCYGVSPTKLNDLCFTNVYADSFVIRGDEVRQIAPGQTGKIADYNYKLPDDFTGCVIAWNSNNLDSKVGGNYNYLYRLFRKSNLKPFERDISTEIYQAGSTPCNGVEGFNCYFPLQSYGFQPTNGVGYQPYRVVVLSFELLHAPATVCGPKKSTNLVKNKCVNFNFNGLTGTGVLTESNKKFLPFQQFGRDIADTTDAVRDPQTLEILDITPCSFGGVSVITPGTNTSNQVAVLYQDVNCTEVPVAIHADQLTPTWRVYSTGSNVFQTRAGCLIGAEHVNNSYECDIPIGAGICASYQTQTNSPRRARSVASQSIIAYTMSLGAENSVAYSNNSIAIPTNFTISVTTEILPVSMTKTSVDCTMYICGDSTECSNLLLQYGSFCTQLNRALTGIAVEQDKNTQEVFAQVKQIYKTPPIKDFGGFNFSQILPDPSKPSKRSFIEDLLFNKVTLADAGFIKQYGDCLGDIAARDLICAQKFNGLTVLPPLLTDEMIAQYTSALLAGTITSGWTFGAGAALQIPFAMQMAYRFNGIGVTQNVLYENQKLIANQFNSAIGKIQDSLSSTASALGKLQDVVNQNAQALNTLVKCLSSNFGAISSVLNDILSRLDKVEAEVQIDRLITGRLQCLQTYVTQQLIRAAEIRASANLAATKMSECVLGQSKRVDFCGKGYHLMSFPQSAPHGVVFLHVTYVPAQEKNFTTAPAICHDGKAHFPREGVFVSNGTHWFVTQRNFYEPQIITTDNTFVSGNCDVVIGIVNNTVYDPLQPELESGGSGYIPEAPRDGQAYVRKDGEWVLLSTFL

SEQ ID NO: 10362 - protein, 1177 aa, Artificial Sequence
  SARS-CoV-2/2019-nCoV/USA-CruiseA-18/2020__MT159716.1 spike protein (1-1147)(Q965C_S1003C) Foldon construct
MFVFLVLLPLVSSQCVNLTTRTQLPPAYTNSFTRGVYYPDKVFRSSVLHSTQDLFLPFFSNVTWFHAIHVSGTNGTKRFDNPVLPFNDGVYFASTEKSNIIRGWIFGTTLDSKTQSLLIVNNATNVVIKVCEFQFCNDPFLGVYYHKNNKSWMESELRVYSSANNCTFEYVSQPFLMDLEGKQGNFKNLREFVFKNIDGYFKIYSKHTPINLVRDLPQGFSALEPLVDLPIGINITRFQTLLALHRSYLTPGDSSSGWTAGAAAYYVGYLQPRTFLLKYNENGTITDAVDCALDPLSETKCTLKSFTVEKGIYQTSNFRVQPTESIVRFPNITNLCPFGEVFNATRFASVYAWNRKRISNCVADYSVLYNSASFSTFKCYGVSPTKLNDLCFTNVYADSFVIRGDEVRQIAPGQTGKIADYNYKLPDDFTGCVIAWNSNNLDSKVGGNYNYLYRLFRKSNLKPFERDISTEIYQAGSTPCNGVEGFNCYFPLQSYGFQPTNGVGYQPYRVVVLSFELLHAPATVCGPKKSTNLVKNKCVNFNFNGLTGTGVLTESNKKFLPFQQFGRDIADTTDAVRDPQTLEILDITPCSFGGVSVITPGTNTSNQVAVLYQDVNCTEVPVAIHADQLTPTWRVYSTGSNVFQTRAGCLIGAEHVNNSYECDIPIGAGICASYQTQTNSPRRARSVASQSIIAYTMSLGAENSVAYSNNSIAIPTNFTISVTTEILPVSMTKTSVDCTMYICGDSTECSNLLLQYGSFCTQLNRALTGIAVEQDKNTQEVFAQVKQIYKTPPIKDFGGFNFSQILPDPSKPSKRSFIEDLLFNKVTLADAGFIKQYGDCLGDIAARDLICAQKFNGLTVLPPLLTDEMIAQYTSALLAGTITSGWTFGAGAALQIPFAMQMAYRFNGIGVTQNVLYENQKLIANQFNSAIGKIQDSLSSTASALGKLQDVVNQNAQALNTLVKCLSSNFGAISSVLNDILSRLDKVEAEVQIDRLITGRLQCLQTYVTQQLIRAAEIRASANLAATKMSECVLGQSKRVDFCGKGYHLMSFPQSAPHGVVFLHVTYVPAQEKNFTTAPAICHDGKAHFPREGVFVSNGTHWFVTQRNFYEPQIITTDNTFVSGNCDVVIGIVNNTVYDPLQPELDSGGSGYIPEAPRDGQAYVRKDGEWVLLSTFL

SEQ ID NO: 10363 - protein, 1177 aa, Artificial Sequence
  SARS-CoV-2/SARS-CoV-2/Yunnan-01/human/2020/CHN__MT049951.1 spike protein (1-1147)(Q965C_S1003C) Foldon construct
MFVFLVLLPLVSSQCVNLTTRTQLPPANTNSFTRGVYYPDKVFRSSVLHSTQDLFLPFFSNVTWFHAIHVSGTNGTKRFDNPVLPFNDGVYFASTEKSNIIRGWIFGTTLDSKTQSLLIVNNATNVVIKVCEFQFCNDPFLGVYYHKNNKSWMESEFRVYSSANNCTFEYVSQPFLMDLEGKQGNFKNLREFVFKNIDGYFKIYSKHTPINLVRDLPQGFSALEPLVDLPIGINITRFQTLLALHRSYLTPGDSSSGWTAGAAAYYVGYLQPRTFLLKYNENGTITDAVDCALDPLSETKCTLKSFTVEKGIYQTSNFRVQPTESIVRFPNITNLCPFGEVFNATRFASVYAWNRKRISNCVADYSVLYNSASFSTFKCYGVSPTKLNDLCFTNVYADSFVIRGDEVRQIAPGQTGKIADYNYKLPDDFTGCVIAWNSNNLDSKVGGNYNYLYRLFRKSNLKPFERDISTEIYQAGSTPCNGVEGFNCYFPLQSYGFQPTNGVGYQPYRVVVLSFELLHAPATVCGPKKSTNLVKNKCVNFNFNGLTGTGVLTESNKKFLPFQQFGRDIADTTDAVRDPQTLEILDITPCSFGGVSVITPGTNTSNQVAVLYQDVNCTEVPVAIHADQLTPTWRVYSTGSNVFQTRAGCLIGAEHVNNSYECDIPIGAGICASYQTQTNSPRRARSVASQSIIAYTMSLGAENSVAYSNNSIAIPTNFTISVTTEILPVSMTKTSVDCTMYICGDSTECSNLLLQYGSFCTQLNRALTGIAVEQDKNTQEVFAQVKQIYKTPPIKDFGGFNFSQILPDPSKPSKRSFIEDLLFNKVTLADAGFIKQYGDCLGDIAARDLICAQKFNGLTVLPPLLTDEMIAQYTSALLAGTITSGWTFGAGAALQIPFAMQMAYRFNGIGVTQNVLYENQKLIANQFNSAIGKIQDSLSSTASALGKLQDVVNQNAQALNTLVKCLSSNFGAISSVLNDILSRLDKVEAEVQIDRLITGRLQCLQTYVTQQLIRAAEIRASANLAATKMSECVLGQSKRVDFCGKGYHLMSFPQSAPHGVVFLHVTYVPAQEKNFTTAPAICHDGKAHFPREGVFVSNGTHWFVTQRNFYEPQIITTDNTFVSGNCDVVIGIVNNTVYDPLQPELDSGGSGYIPEAPRDGQAYVRKDGEWVLLSTFL

SEQ ID NO: 10364 - protein, 1177 aa, Artificial Sequence
  SARS-CoV-2/USA/WA-UW292/2020__EPI_ISL_418077 spike protein (1-1147)(Q965C_S1003C) Foldon construct
MFVFLVLLPLVSSQCVNLTTRTQLPPAYTNSFTRGVYYPDKVFRSSVLHSTQDLFLPFFSNVTWFHAIHVSGTNGTKRFDNPVLPFNDGVYFASTEKSNIIRGWIFGTTLDSKTQSLLIVNNATNVVIKVCEFQFCNDPFLGVYYHKNNKSWMESEFRVYSSANNCTFEYVSQPFLMDLEGKQGNFKNLREFVFKNIDGYFKIYSKHTPINLVRDLPQGFSALEPLVDLPIGINITRFQTLLALHRSYLTPGDSSSGWTAGAAAYYVGYLQPRTFLLKYNENGTITDAVDCALDPLSETKCTLKSFTVEKGIYQTSNFRVQPTESIVRFPNITNLCPFGEVFNATRFASVYAWNRKRISNCVADYSVLYNSASFSTFKCYGVSPTKLNDLCFTNVYADSFVIRGDEVRQIAPGQTGKIADYNYKLPDDFTGCVIAWNSNNLDSKVGGNYNYLYRLFRKSNLKPFERDISTEIYQASSTPCNGVEGFNCYFPLQSYGFQPTNGVGYQPYRVVVLSFELLHAPATVCGPKKSTNLVKNKCVNFNFNGLTGTGVLTESNKKFLPFQQFGRDIADTTDAVRDPQTLEILDITPCSFGGVSVITPGTNTSNQVAVLYQDVNCTEVPVAIHADQLTPTWRVYSTGSNVFQTRAGCLIGAEHVNNSYECDIPIGAGICASYQTQTNSPRRARSVASQSIIAYTMSLGAENSVAYSNNSIAIPTNFTISVTTEILPVSMTKTSVDCTMYICGDSTECSNLLLQYGSFCTQLNRALTGIAVEQDKNTQEVFAQVKQIYKTPPIKDFGGFNFSQILPDPSKPSKRSFIEDLLFNKVTLADAGFIKQYGDCLGDIAARDLICAQKFNGLTVLPPLLTDEMIAQYTSALLAGTITSGWTFGAGAALQIPFAMQMAYRFNGIGVTQNVLYENQKLIANQFNSAIGKIQDSLSSTASALGKLQDVVNQNAQALNTLVKCLSSNFGAISSVLNDILSRLDKVEAEVQIDRLITGRLQCLQTYVTQQLIRAAEIRASANLAATKMSECVLGQSKRVDFCGKGYHLMSFPQSAPHGVVFLHVTYVPAQEKNFTTAPAICHDGKAHFPREGVFVSNGTHWFVTQRNFYEPQIITTDNTFVSGNCDVVIGIVNNTVYDPLQPELDSGGSGYIPEAPRDGQAYVRKDGEWVLLSTFL

SEQ ID NO: 10365 - protein, 1177 aa, Artificial Sequence
  SARS-CoV-2/Iceland/192/2020__EPI_ISL_417819 spike protein (1-1147)(Q965C_S1003C) Foldon construct
MFVFFVLLPLVSSQCVNLTTRTQLPPAYTNSFTRGVYYPDKVFRSSVLHSTQDLFLPFFSNVTWFHAIHVSGTNGTKRFDNPVLPFNDGVYFASTEKSNIIRGWIFGTTLDSKTQSLLIVNNATNVVIKVCEFQFCNDPFLGVYYHKNNKSWMESEFRVYSSANNCTFEYVSQPFLMDLEGKQGNFKNLREFVFKNIDGYFKIYSKHTPINLVRDLPQGFSALEPLVDLPIGINITRFQTLLALHRSYLTPGDSSSGWTAGAAAYYVGYLQPRTFLLKYNENGTITDAVDCALDPLSETKCTLKSFTVEKGIYQTSNFRVQPTESIVRFPNITNLCPFGEVFNATRFASVYAWNRKRISNCVADYSVLYNSASFSTFKCYGVSPTKLNDLCFTNVYADSFVIRGDEVRQIAPGQTGKIADYNYKLPDDFTGCVIAWNSNNLDSKVGGNYNYLYRLFRKSNLKPFERDISTEIYQAGSTPCNGVEGFNCYFPLQSYGFQPTNGVGYQPYRVVVLSFELLHAPATVCGPKKSTNLVKNKCVNFNFNGLTGTGVLTESNKKFLPFQQFGRDIADTTDAVRDPQTLEILDITPCSFGGVSVITPGTNTSNQVAVLYQGVNCTEVPVAIHADQLTPTWRVYSTGSNVFQTRAGCLIGAEHVNNSYECDIPIGAGICASYQTQTNSPRRARSVASQSIIAYTMSLGAENSVAYSNNSIAIPTNFTISVTTEILPVSMTKTSVDCTMYICGDSTECSNLLLQYGSFCTQLNRALTGIAVEQDKNTQEVFAQVKQIYKTPPIKDFGGFNFSQILPDPSKPSKRSFIEDLLFNKVTLADAGFIKQYGDCLGDIAARDLICAQKFNGLTVLPPLLTDEMIAQYTSALLAGTITSGWTFGAGAALQIPFAMQMAYRFNGIGVTQNVLYENQKLIANQFNSAIGKIQDSLSSTASALGKLQDVVNQNAQALNTLVKCLSSNFGAISSVLNDILSRLDKVEAEVQIDRLITGRLQCLQTYVTQQLIRAAEIRASANLAATKMSECVLGQSKRVDFCGKGYHLMSFPQSAPHGVVFLHVTYVPAQEKNFTTAPAICHDGKAHFPREGVFVSNGTHWFVTQRNFYEPQIITTDNTFVSGNCDVVIGIVNNTVYDPLQPELDSGGSGYIPEAPRDGQAYVRKDGEWVLLSTFL

SEQ ID NO: 10366 - protein, 1177 aa, Artificial Sequence
  SARS-CoV-2/Belgium/ULG-6939/2020__EPI_ISL_417020 spike protein (1-1147)(Q965C_S1003C) Foldon construct
MFVFLVLLPLVSSQCVNLTTRTQLPPAYTNSFTRGVYYPDKVFRSSVLHSTQDLFLPFFSNVTWFHAIHVSGTNGTKRFDNPVLPFNDGVYFASTEKSNIIRGWIFGTTLDSKTQSLLIVNNATNVVIKVCEFQFCNDPFLGVYYHKNNKSWMESEFRVYSSANNCTFEYVSQPFLMDLEGKQGNFKNLREFVFKNIDGYFKIYSKHTPINLVRDLPQGFSALEPLVDLPIGINITRFQTLLALHRSYLTPGDSSSGWTAGAAAYYVGYLQPRTFLLKYNENGTITDAVDCALDPLSETKCTLKSFTVEKGIYQTSNFRVQPTESIVRFPNITNLCPFGEVFNATRFASVYAWNRKRISNCVADYSVLYNSASFSTFKCYGVSPTKLNDLCFTNVYADSFVIRGDEVRQIAPGQTGKIADYNYKLPDDFTGCVIAWNSNNLDSKVGGNYNYLYRLFRKSNLKPFERDISTEIYQAGSTPCNGVEGFNCYFPLQSYGFQPTNGVGYQPYRVVVLSFELLHAPATVCGPKKSTNLVKNKCVNFNFNGLTGTGVLTESNKKFLPFQQFGRDIADTTDAVRDPQTLEILDITPCSFGGVSVITPGTNTSNQVAVLYQGVNCTEVPVAIHADQLTPTWRVYSTGSNVFQTRAGCLIGAEHVNNSYECDIPIGAGICASYQTQTNSPRRARSVASQSIIAYTMSLGAENSVVYSNNSIAIPTNFTISVTTEILPVSMTKTSVDCTMYICGDSTECSNLLLQYGSFCTQLNRALTGIAVEQDKNTQEVFAQVKQIYKTPPIKDFGGFNFSQILPDPSKPSKRSFIEDLLFNKVTLADAGFIKQYGDCLGDIAARDLICAQKFNGLTVLPPLLTDEMIAQYTSALLAGTITSGWTFGAGAALQIPFAMQMAYRFNGIGVTQNVLYENQKLIANQFNSAIGKIQDSLSSTASALGKLQDVVNQNAQALNTLVKCLSSNFGAISSVLNDILSRLDKVEAEVQIDRLITGRLQCLQTYVTQQLIRAAEIRASANLAATKMSECVLGQSKRVDFCGKGYHLMSFPQSAPHGVVFLHVTYVPAQEKNFTTAPAICHDGKAHFPREGVFVSNGTHWFVTQRNFYEPQIITTDNTFVSGNCDVVIGIVNNTVYDPLQPELDSGGSGYIPEAPRDGQAYVRKDGEWVLLSTFL

SEQ ID NO: 10367 - protein, 1177 aa, Artificial Sequence
  SARS-CoV-2/France/HF2496/2020__EPI_ISL_418231 spike protein (1-1147)(Q965C_S1003C) Foldon construct
MFVFLVLLPLVSSQCVNLTTRTQLPPAYTNSFTRGVYYPDKVFRSSVLHSTQDLFLPFFSNVTWFHAIHVSGTNGTKRFDNPVLPFNDGVYFASTEKSNIIRGWIFGTTLDSKTQSLLIVNNATNVVIKVCEFQFCNDPFLGVYYHKNNKSWMESEFRVYSSANNCTFEYVSQPFLMDLEGKQGNFKNLREFVFKNIDGYFKIYSKHTPINLVRDLPQGFSALEPLVDLPIGINITRFQTLLALHRSYLTPGDSSSGWTAGAAAYYVGYLQPRTFLLKYNENGTITDAVDCALDPLSETKCTLKSFTVEKGIYQTSNFRVQPTESIVRFPNITNLCPFGEVFNATRFASVYAWNRKRISNCVADYSVLYNSASFSTFKCYGVSPTKLNDLCFTNVYADSFVIRGDEVRQIAPGQTGKIADYNYKLPDDFTGCVIAWNSNNLDSKVGGNYNYLYRLFRKSNLKPFERDISTEIYQAGSTPCNGVEGFNCYFPLQSYGFQPTNGVGYQPYRVVVLSFELLHAPATVCGPKKSTNLVKNKCVNFNFNGLTGTGVLTESNKKFLPFQQFGRDIADTTDAVRDPQTLEILDITPCSFGGVSVITPGTNTSNQVAVLYQGVNCTEVPVAIHADQLTPTWRVYSTGSNVFQTRAGCLIGAEHVNNSYECDIPIGAGICASYQTQTNSPRRARSVASQSIIAYTMSLGAENSVAYSNNSIAIPTNFTISVTTEILPVSMTKTSVDCTMYICGDSTECSNLLLQYGSFCTQLNRALTGIAVEQDKNTQEVFAQVKQIYKTPPIKDFGGFNFSQILPDPSKPSKRSFIEDLLFNKVTLADAGFIKQYGDCLGDIVARDLICAQKFNGLTVLPPLLTDEMIAQYTSALLAGTITSGWTFGAGAALQIPFAMQMAYRFNGIGVTQNVLYENQKLIANQFNSAIGKIQDSLSSTASALGKLQDVVNQNAQALNTLVKCLSSNFGAISSVLNDILSRLDKVEAEVQIDRLITGRLQCLQTYVTQQLIRAAEIRASANLAATKMSECVLGQSKRVDFCGKGYHLMSFPQSAPHGVVFLHVTYVPAQEKNFTTAPAICHDGKAHFPREGVFVSNGTHWFVTQRNFYEPQIITTDNTFVSGNCDVVIGIVNNTVYDPLQPELDSGGSGYIPEAPRDGQAYVRKDGEWVLLSTFL

SEQ ID NO: 10368 - protein, 1177 aa, Artificial Sequence
  SARS-CoV-2/USA/WA-UW291/2020__EPI_ISL_418076 spike protein (1-1147)(Q965C_S1003C) Foldon construct
MFVFLVLLPLVSSQCVNLTTRTQLPPAYTNSFTRGVYYPDKVFRSSVLHSTQDLFLPFFSNVTWFHAIHVSGTNGTKRFDNPVLPFNDGVYFASTEKSNIIRGWIFGTTLDSKTQSLLIVNNATNVVIKVCEFQFCNDPFLGVYYHKNNKSWMESEFRVYSSANNCTFEYVSQPFLMDLEGKQGNFKNLREFVFKNIDGYFKIYSKHTPINLVRDLPQGFSALEPLVDLPIGINITRFQTLLALHRSYLTPGDSSSGWTAGAAAYYVGYLQPRTFLLKYNENGTITDAVDCALDPLSETKCTLKSFTVEKGIYQTSNFRVQPTESIVRFPNITNLCPFGEVFNATRFASVYAWNRKRISNCVADYSVLYNSASFSTFKCYGVSPTKLNDLCFTNVYADSFVIRGDEVRQIAPGQTGKIADYNYKLPDDFTGCVIAWNSNNLDSKVGGNYNYLYRLFRKSNLKPFERDISTEIYQAGSTPCNGVEGFNCYFPLQSYGFQPTNGVGYQPYRVVVLSFELLHAPATVCGPKKSTNLVKNKCVNFNFNGLTGTGVLTESNKKFLPFQQFGRDIADTTDAVRDPQTLEILDITPCSFGGVSVITPGTNTSNQVAVLYQGVNCTEVPVAIHADQLTPTWRVYSTGSNVFQTRAGCLIGAEHVNNSYECDIPIGAGICASYQTQTNSPRRARSVASQSIIAYTMSLGAENSVAYSNNSIAIPTNFTISVTTEILPVSMTKTSVDCTMYICGDSTECSNLLLQYGSFCTQLNRALTGIAVEQDKNTQEVFAQVKQIYKTPPIKDFGGFNFSQILPDPSKPSKRSFIEDLLFNKVTLADAGFIKQYGDCLGDIAARDLICAQKFNGLTVLPPLLTDEMIAQYTSALLAGTITSGWTFGAGAALQIPFAMQMAYRFNGIGVTQNVLYENQKLIANQFNSAIGKIQYSLSSTASALGKLQDVVNQNAQALNTLVKCLSSNFGAISSVLNDILSRLDKVEAEVQIDRLITGRLQCLQTYVTQQLIRAAEIRASANLAATKMSECVLGQSKRVDFCGKGYHLMSFPQSAPHGVVFLHVTYVPAQEKNFTTAPAICHDGKAHFPREGVFVSNGTHWFVTQRNFYEPQIITTDNTFVSGNCDVVIGIVNNTVYDPLQPELDSGGSGYIPEAPRDGQAYVRKDGEWVLLSTFL

SEQ ID NO: 10369 - protein, 1177 aa, Artificial Sequence; identical to SEQ ID NO: 10332
  SARS-CoV-2/Portugal/PT0034/2020__EPI_ISL_418019 spike protein (1-1147)(Q965C_S1003C) Foldon construct

SEQ ID NO: 10370 - protein, 1177 aa, Artificial Sequence; identical to SEQ ID NO: 10324
  SARS-CoV-2/Iceland/202/2020__EPI_ISL_417750 spike protein (1-1147)(Q965C_S1003C) Foldon construct

SEQ ID NO: 10371 - protein, 1177 aa, Artificial Sequence
  SARS-CoV-2/USA/WA-UW261/2020__EPI_ISL_418046 spike protein (1-1147)(Q965C_S1003C) Foldon construct
MFVFLVLLPLVSSQCVNLTTRTQLPPAYTNSFTRGVYYPDKVFRSSVLHSTQDLFLPFFSNVTWFHAIHVSGTNGTKRFDNPVLPFNDGVYFASTEKSNIIRGWIFGTTLDSKTQSLLIVNNATNVVIKVCEFQFCNDPFLGVYYHKNNKSWMESEFRVYSSANNCTFEYVSQPFLMDLEGKQGNFKNLREFVFKNIDGYFKIYSKHTPINLVRDLPQGFSALEPLVDLPIGINITRFQTLLALHRSYLTPGDSSSGWTAGAAAYYVGYLQPRTFLLKYNENGTITDAVDCALDPLSETKCTLKSFTVEKGIYQTSNFRVQPTESIVRFPNITNLCPFGEVFNATRFTSVYAWNRKRISNCVADYSVLYNSASFSTFKCYGVSPTKLNDLCFTNVYADSFVIRGDEVRQIAPGQTGKIADYNYKLPDDFTGCVIAWNSNNLDSKVGGNYNYLYRLFRKSNLKPFERDISTEIYQAGSTPCNGVEGFNCYFPLQSYGFQPTNGVGYQPYRVVVLSFELLHAPATVCGPKKSTNLVKNKCVNFNFNGLTGTGVLTESNKKFLPFQQFGRDIADTTDAVRDPQTLEILDITPCSFGGVSVITPGTNTSNQVAVLYQDVNCTEVPVAIHADQLTPTWRVYSTGSNVFQTRAGCLIGAEHVNNSYECDIPIGAGICASYQTQTNSPRRARSVASQSIIAYTMSLGAENSVAYSNNSIAIPTNFTISVTTEILPVSMTKTSVDCTMYICGDSTECSNLLLQYGSFCTQLNRALTGIAVEQDKNTQEVFAQVKQIYKTPPIKDFGGFNFSQILPDPSKPSKRSFIEDLLFNKVTLADAGFIKQYGDCLGDIAARDLICAQKFNGLTVLPPLLTDEMIAQYTSALLAGTITSGWTFGAGAALQIPFAMQMAYRFNGIGVTQNVLYENQKLIANQFNSAIGKIQDSLSSTASALGKLQDVVNQNAQALNTLVKCLSSNFGAISSVLNDILSRLDKVEAEVQIDRLITGRLQCLQTYVTQQLIRAAEIRASANLAATKMSECVLGQSKRVDFCGKGYHLMSFPQSAPHGVVFLHVTYVPAQEKNFTTAPAICHDGKAHFPREGVFVSNGTHWFVTQRNFYEPQIITTDNTFVSGNCDVVIGIVNNTVYDPLQPELDSGGSGYIPEAPRDGQAYVRKDGEWVLLSTFL

SEQ ID NO: 10372 - protein, 1177 aa, Artificial Sequence
  SARS-CoV-2/Portugal/PT0035/2020__EPI_ISL_418020 spike protein (1-1147)(Q965C_S1003C) Foldon construct
MFVFLVLLPLVSSQCVNLTTRTQLPPAYTNSFTRGVYYPDKVFRSSVLHSTQDLFLPFFSNVTWFHAIHVSGTNGTKRFDNPVLPFNDGVYFASTEKSNIIRGWIFGTTLDSKTQSLLIVNNATNVVIKVCEFQFCNDPFLGVYYHKNNKSWMESEFRVYSSANNCTFEYVSQPFLMDLEGKQGNFKNLREFVFKNIDGYFKIYSKHTPINLVRDLPQGFSALEPLVDLPIGINITRFQTLLALHRSYLTPGDSSSGWTAGAAAYYVGYLQPRTFLLKYNENGTITDAVDCALDPLSETKCTLKSFTVEKGIYQTSNFRVQPTESIVRFPNITNLCPFGEVFNATRFASVYAWNRKRISNCVADYSVLYNSASFSTFKCYGVSPTKLNDLCFTNVYADSFVIRGDEVRQIAPGQTGKIADYNYKLPDDFTGCVIAWNSNNLDSKVGGNYNYLYRLFRKSNLKPFERDISTEIYQAGSTPCNGVEGFNCYFPLQSYGFQPTNGVGYQPYRVVVLSFELLHAPATVCGPKKSTNLVKNKCVNFNFNGLTGTGVLTESNKKFLPFQQFGRDIADTTDAVRDPQTLEILDITPCSFGGVSVITPGTNTSNQVAVLYQDVNCTEVPVAIHADQLTPTWRVYSTGSNVFQTRAGCLIGAEHVNNSYECDIPIGAGICASYQTQTNSPRRARSVASQSIIAYTMSLGAENSVAYSNNSIAIPTNFTISVTTEILPVSMTKTSVDCTMYICGDSTECSNLLLQYGSFCTQLNRALTGIAVEQDKNTQEVFAQVKQIYKTPPIKDFGGFNFSQILPDPSKPSKRSFIEDLLFNKVTLADAGFIKQYGDCLGDISARDLICAQKFNGLTVLPPLLTDEMIAQYTSALLAGTITSGWTFGAGAALQIPFAMQMAYRFNGIGVTQNVLYENQKLIANQFNSAIGKIQDSLSSTASALGKLQDVVNQNAQALNTLVKCLSSNFGAISSVLNDILSRLDKVEAEVQIDRLITGRLQCLQTYVTQQLIRAAEIRASANLAATKMSECVLGQSKRVDFCGKGYHLMSFPQSAPHGVVFLHVTYVPAQEKNFTTAPAICHDGKAHFPREGVFVSNGTHWFVTQRNFYEPQIITTDNTFVSGNCDVVIGIVNNTVYDPLQPELDSGGSGYIPEAPRDGQAYVRKDGEWVLLSTFL

SEQ ID NO: 10373 - protein, 1177 aa, Artificial Sequence
  SARS-CoV-2/USA/NY-NYUMC7/2020__EPI_ISL_418192 spike protein (1-1147)(Q965C_S1003C) Foldon construct
MFVFLVLLPLVSSQCVNLTTRTQLPPAYTNSFTRGVYYPDKVFRSSVLHSTQDLFLPFFSNVTWFHAIHVSGTNGTKRFDNPVLPFNDGVYFASTEKSNIIRGWIFGTTLDSKTQSLLIVNNATNVVIKVCEFQFCNDPFLGVYHHKNNKSWMESEFRVYSSANNCTFEYVSQPFLMDLEGKQGNFKNLREFVFKNIDGYFKIYSKHTPINLVRDLPQGFSALEPLVDLPIGINITRFQTLLALHRSYLTPGDSSSGWTAGAAAYYVGYLQPRTFLLKYNENGTITDAVDCALDPLSETKCTLKSFTVEKGIYQTSNFRVQPTESIVRFPNITNLCPFGEVFNATRFASVYAWNRKRISNCVADYSVLYNSASFSTFKCYGVSPTKLNDLCFTNVYADSFVIRGDEVRQIAPGQTGKIADYNYKLPDDFTGCVIAWNSNNLDSKVGGNYNYLYRLFRKSNLKPFERDISTEIYQAGSTPCNGVEGFNCYFPLQSYGFQPTNGVGYQPYRVVVLSFELLHAPATVCGPKKSTNLVKNKCVNFNFNGLTGTGVLTESNKKFLPFQQFGRDIADTTDAVRDPQTLEILDITPCSFGGVSVITPGTNTSNQVAVLYQGVNCTEVPVAIHADQLTPTWRVYSTGSNVFQTRAGCLIGAEHVNNSYECDIPIGAGICASYQTQTNSPRRARSVASQSIIAYTMSLGAENSVAYSNNSIAIPTNFTISVTTEILPVSMTKTSVDCTMYICGDSTECSNLLLQYGSFCTQLNRALTGIAVEQDKNTQEVFAQVKQIYKTPPIKDFGGFNFSQILPDPSKPSKRSFIEDLLFNKVTLADAGFIKQYGDCLGDIAARDLICAQKFNGLTVLPPLLTDEMIAQYTSALLAGTITSGWTFGAGAALQIPFAMQMAYRFNGIGVTQNVLYENQKLIANQFNSAIGKIQDSLSSTASALGKLQDVVNQNAQALNTLVKCLSSNFGAISSVLNDILSRLDKVEAEVQIDRLITGRLQCLQTYVTQQLIRAAEIRASANLAATKMSECVLGQSKRVDFCGKGYHLMSFPQSAPHGVVFLHVTYVPAQEKNFTTAPAICHDGKAHFPREGVFVSNGTHWFVTQRNFYEPQIITTDNTFVSGNCDVVIGIVNNTVYDPLQPELDSGGSGYIPEAPRDGQAYVRKDGEWVLLSTFL

SEQ ID NO: 10374 - protein, 1177 aa, Artificial Sequence
  SARS-CoV-2/Iceland/189/2020__EPI_ISL_417709 spike protein (1-1147)(Q965C_S1003C) Foldon construct
MFVFLVLLPLVSSQCVNLTTRTQLPPAYTNSFTRGVYYPDKVFRSSVLHSTQDLFLPFFSNVTWFHAIHVSGTNGTKRFDNPVLPFNDGVYFASTEKSNIIRGWIFGTTLDSKTQSLLIVNNATNVVIKVCEFQFCNDPFLGVYYHKNNKSWMESEFRVYSSANNCTFEYVSQPFLMDLEGKQGNFKNLREFVFKNIDGYFKIYSKHTPINLVRDLPQGFSALEPLVDLPIGINITRFQTLLALHRSYLTPGDSSSGWTAGAAAYYVGYLQPRTFLLKYNENGTITDAVDCALDPLSETKCTLKSFTVEKGIYQTSNFRVQPTESIVRFPNITNLCPFGEVFNATRFASVYAWNRKRISNCVADYSVLYNSASFSTFKCYGVSPTKLNDLCFTNVYADSFVIRGDEVRQIAPGQTGKIADYNYKLPDDFTGCVIAWNSNNLDSKVGGNYNYLYRLFRKSNLKPFERDISTEIYQAGSTPCNGVEGFNCYFPLQSYGFQPTNGVGYQPYRVVVLSFELLHAPATVCGPKKSTNLVKNKCVNFNFNGLTGTGVLTESNKKFLPFQQFGRDIADTTDAVRDPQTLEILDITPCSFGGVSVITPGTNTSNQVAVLYQGVNCTEVPVAIHADQLTPTWRVYSTGSNVFQTRAGCLIGAEHVNNSYECDIPIGAGICASYQTQTNSPRRARSVASQSIIAYTMSLGAENSVAYSNNSIAIPTNFTISVTTEILPVSMTKTSVDCTMYICGDSTECSNLLLQYGSFCTQLNRALTGIAVEQDKNTQEVFAQVKQIYKTPPIKDFGGFNFSQILPDPSKPSKRSFIEDLLFNKVTLADAGFTKQYGDCLGDIAARDLICAQKFNGLTVLPPLLTDEMIAQYTSALLAGTITSGWTFGAGAALQIPFAMQMAYRFNGIGVTQNVLYENQKLIANQFNSAIGKIQDSLSSTASALGKLQDVVNQNAQALNTLVKCLSSNFGAISSVLNDILSRLDKVEAEVQIDRLITGRLQCLQTYVTQQLIRAAEIRASANLAATKMSECVLGQSKRVDFCGKGYHLMSFPQSAPHGVVFLHVTYVPAQEKNFTTAPAICHDGKAHFPREGVFVSNGTHWFVTQRNFYEPQIITTDNTFVSGNCDVVIGIVNNTVYDPLQPELDSGGSGYIPEAPRDGQAYVRKDGEWVLLSTFL

SEQ ID NO: 10375 - protein, 1177 aa, Artificial Sequence
  SARS-CoV-2/Australia/NSW56/2020__EPI_ISL_417408 spike protein (1-1147)(Q965C_S1003C) Foldon construct
MFVFLVLLPLVSSQCVNLTTRTQLPPAYTNSFTRGVYYPDKVFRSSVLHSTQDLFLPFFSNVTWFHAIHVSGTNGTKRFDNPVLPFNDGVYFASTEKSNIIRGWIFGTTLDSKTQSLLIVNNATNVVIKVCEFQFCNDPFLGVYYHKNNKSWMESEFRVYSSANNCTFEYVSQPFLMDLEGKQGNFKNLREFVFKNIDGYFKIYSKHTPINLVRDLPQGFSALEPLVDLPIGINITRFQTLLALHRSYLTPGDSSSGWTAGAAAYYVGYLQPRTFLLKYNENGTITDAVDCALDPLSETKCTLKSFTVEKGIYQTSNFRVQPTESIVRFPNITNLCPFGEVFNATRFASVYAWNRKRISNCVADYSVLYNSASFSTFKCYGVSPTKLNDLCFTNVYADSFVIRGDEVRQIAPGQTGKIADYNYKLPDDFTGCVIAWNSNNLDSKVGGNYNYLYRLFRKSNLKPFERDISTEIYQAGSTPCNGVEGFNCYFPLQSYGFQPTNGVGYQPYRVVVLSFELLHAPATVCGPKKSTNLVKNKCVNFNFNGLTGTGVLTESNKKFLPFQQFGRDIADTTDAVRDPQTLEILDITPCSFGGVSVITPGTNTSNQVAVLYQDVNCTEVPVAIHADQLTPTWRVYSTGSNVFQTRAGCLIGAEHVNNSYECDIPIGAGICASYQTQTNSPRRARSVASQSIIAYTMSLGAENSVAYSNNSIAIPTNFTISVTTEILPVSMTKTSVDCTMYICGDSTECSNLLLQYGSFCTQLNRALTGIAVEQDKNTQEVFAQVKQIYKTPPIKDFGGFNFSQILPDSSKPSKRSFIEDLLFNKVTLADAGFIKQYGDCLGDIAARDLICAQKFNGLTVLPPLLTDEMIAQYTSALLAGTITSGWTFGAGAALQIPFAMQMAYRFNGIGVTQNVLYENQKLIANQFNSAIGKIQDSLSSTASALGKLQDVVNQNAQALNTLVKCLSSNFGAISSVLNDILSRLDKVEAEVQIDRLITGRLQCLQTYVTQQLIRAAEIRASANLAATKMSECVLGQSKRVDFCGKGYHLMSFPQSAPHGVVFLHVTYVPAQEKNFTTAPAICHDGKAHFPREGVFVSNGTHWFVTQRNFYEPQIITTDNTFVSGNCDVVIGIVNNTVYDPLQPELDSGGSGYIPEAPRDGQAYVRKDGEWVLLSTFL

SEQ ID NO: 10376 - protein, 1177 aa, Artificial Sequence
  SARS-CoV-2/Iceland/280/2020__EPI_ISL_417608 spike protein (1-1147)(Q965C_S1003C) Foldon construct
MFVFLVLLPLVSSQCVNLTTRTQLPPAYTNSFTRGVYYPDKVFRSSVLHSTQDLFLPFFSNVTWFHAIHVSGTNGTKRFDNPVLPFNDGVYFASTEKSNIIRGWIFGTTLDSKTQSLLIVNNATNVVIKVCEFQFCNDPFLGVYYHKNNKSWMESEFRVYSSANNCTFEYVSQPFLMDLEGKQGNFKNLREFVFKNIDGYFKIYSKHTPINLVRDLPQGFSALEPLVDLPIGINITRFQTLLALHRSYLTPGDSSSGWTAGAAAYYVGYLQPRTFLLKYNENGTITDAVDCALDPLSETKCTLKSFTVEKGIYQTSNFRVQPTESIVRFPNITNLCPFGEVFNATRFASVYAWNRKRISNCVADYSVLYNSASFSTFKCYGVSPTKLNDLCFTNVYADSFVIRGDEVRQIAPGQTGKIADYNYKLPDDFTGCVIAWNSNNLDSKVGGNYNYLYRLFRKSNLKPFERDISTEIYQAGSTPCNGVEGFNCYFPLQSYGFQPTNGVGYQPYRVVVLSFELLHAPATVCGPKKSTNLVKNKCVNFNFNGLTGTGVLTESNKKFLPFQQFGRDIADTTDAVRDPQTLEILDITPCSFGGVSVITPGTNTSNQVAVLYQGVNCTEVPVAIHADQLTPTWRVYSTGSNVFQTRAGCLIGAEHVNNSYECDIPIGAGICASYHTQTNSPRRARSVASQSIIAYTMSLGAENSVAYSNNSIAIPTNFTISVTTEILPVSMTKTSVDCTMYICGDSTECSNLLLQYGSFCTQLNRALTGIAVEQDKNTQEVFAQVKQIYKTPPIKDFGGFNFSQILPDPSKPSKRSFIEDLLFNKVTLADAGFIKQYGDCLGDIAARDLICAQKFNGLTVLPPLLTDEMIAQYTSALLAGTITSGWTFGAGAALQIPFAMQMAYRFNGIGVTQNVLYENQKLIANQFNSAIGKIQDSLSSTASALGKLQDVVNQNAQALNTLVKCLSSNFGAISSVLNDILSRLDKVEAEVQIDRLITGRLQCLQTYVTQQLIRAAEIRASANLAATKMSECVLGQSKRVDFCGKGYHLMSFPQSAPHGVVFLHVTYVPAQEKNFTTAPAICHDGKAHFPREGVFVSNGTHWFVTQRNFYEPQIITTDNTFVSGNCDVVIGIVNNTVYDPLQPELDSGGSGYIPEAPRDGQAYVRKDGEWVLLSTFL

SEQ ID NO: 10377 - protein, 1177 aa, Artificial Sequence; identical to SEQ ID NO: 10332
  SARS-CoV-2/Iceland/247/2020__EPI_ISL_417575 spike protein (1-1147)(Q965C_S1003C) Foldon construct

SEQ ID NO: 10378 - protein, 1177 aa, Artificial Sequence
  SARS-CoV-2/Iceland/238/2020__EPI_ISL_417566 spike protein (1-1147)(Q965C_S1003C) Foldon construct
MFVFLVLLPLVSSQCVNLTTRTQLPPAYTNSFTRGVYYPDKVFRSSVLHSTQDLFLPFFSNVTWFHAIHVSGTNGTKRFDNPVLPFNDGVYFASTEKSNIIRGWIFGTTLDSKTQSLLIVNNATNVVIKVCEFQFCNDPFLGVYYHKNNKSWMESEFRVYSSANNCTFEYVSQPFLMDLEGKQGNFKNLREFVFKNIDGYFKIYSKHTPINLVRDLPQGFSALEPLVDLPIGINITRFQTLLALHRSYLTPGDSSSGWTAGAAAYYVGYLQPRTFLLKYNENGTITDAVDCALDPLSETKCTLKSFTVEKGIYQTSNFRVQPTESIVRFPNITNLCPFGEVFNATRFASVYAWNRKRISNCVADYSVLYNSASFSTFKCYGVSPTKLNDLCFTNVYADSFVIRGDEVRQIAPGQTGKIADYNYKLPDDFTGCVIAWNSNNLDSKVGGNYNYLYRLFRKSNLKPFERDISTEIYQAGSTPCNGVEGFNCYFPLQSYGFQPTNGVGYQPYRVVVLSFELLHAPATVCGPKKSTNLVKNKCVNFNFNGLTGTGVLTESNKKFLPFQQFGRDIADTTDAVRDPQTLEILDITPCSFGGVSVITPGTNTSNQVAVLYQGVNCTEVPVAIHADQLTPTWRVYSTGSNVFQTRAGCLIGAEHVNNSYECDIPIGAGICASYQTQTNSPRRARSVASQSIIAYTMSLGAENSVAYSNNSIAIPTNFTISVTTEILPVSMTKTSVDCTMYICGDSTECSNLLLQYGSFCTQLNRALTGIAVEQDKNTQEVFAQVKQIYKTPPIKDFGGFNFSQILPDPSKPSKRSFIEDLLFNKVTLADVGFIKQYGDCLGDIAARDLICAQKFNGLTVLPPLLTDEMIAQYTSALLAGTITSGWTFGAGAALQIPFAMQMAYRFNGIGVTQNVLYENQKLIANQFNSAIGKIQDSLSSTASALGKLQDVVNQNAQALNTLVKCLSSNFGAISSVLNDILSRLDKVEAEVQIDRLITGRLQCLQTYVTQQLIRAAEIRASANLAATKMSECVLGQSKRVDFCGKGYHLMSFPQSAPHGVVFLHVTYVPAQEKNFTTAPAICHDGKAHFPREGVFVSNGTHWFVTQRNFYEPQIITTDNTFVSGNCDVVIGIVNNTVYDPLQPELDSGGSGYIPEAPRDGQAYVRKDGEWVLLSTFL

SEQ ID NO: 10379 - protein, 1177 aa, Artificial Sequence
  SARS-CoV-2/Greece/16/2020__EPI_ISL_418265 spike protein (1-1147)(Q965C_S1003C) Foldon construct
MFVFLVLLPLVSSQCVNLTTRTQLPPAYTNSFTRGVYYPDKVFRSSVLHSTQDLFLPFFSNVTWFHAIHVSGTNGTKRFDNPVLPFNDGVYFASTEKSNIIRGWIFGTTLDSKTQSLLIVNNATNVVIKVCEFQFCNDPFLGVYYHKNNKSWMESEFRVYSSANNCTFEYVSQPFLMDLEGKQGNFKNLREFVFKNVDGYFKIYSKHTPINLVRDLPQGFSALEPLVDLPIGINITRFQTLLALHRSYLTPGDSSSGWTAGAAAYYVGYLQPRTFLLKYNENGTITDAVDCALDPLSETKCTLKSFTVEKGIYQTSNFRVQPTESIVRFPNITNLCPFGEVFNATRFASVYAWNRKRISNCVADYSVLYNSASFSTFKCYGVSPTKLNDLCFTNVYADSFVIRGDEVRQIAPGQTGKIADYNYKLPDDFTGCVIAWNSNNLDSKVGGNYNYLYRLFRKSNLKPFERDISTEIYQAGSTPCNGVEGFNCYFPLQSYGFQPTNGVGYQPYRVVVLSFELLHAPATVCGPKKSTNLVKNKCVNFNFNGLTGTGVLTESNKKFLPFQQFGRDIADTTDAVRDPQTLEILDITPCSFGGVSVITPGTNTSNQVAVLYQDVNCTEVPVAIHADQLTPTWRVYSTGSNVFQTRAGCLIGAEHVNNSYECDIPIGAGICASYQTQTNSPRRARSVASQSIIAYTMSLGAENSVAYSNNSIAIPTNFTISVTTEILPVSMTKTSVDCTMYICGDSTECSNLLLQYGSFCTQLNRALTGIAVEQDKNTQEVFAQVKQIYKTPPIKDFGGFNFSQILPDPSKPSKRSFIEDLLFNKVTLADAGFIKQYGDCLGDIAARDLICAQKFNGLTVLPPLLTDEMIAQYTSALLAGTITSGWTFGAGAALQIPFAMQMAYRFNGIGVTQNVLYENQKLIANQFNSAIGKIQDSLSSTASALGKLQDVVNQNAQALNTLVKCLSSNFGAISSVLNDILSRLDKVEAEVQIDRLITGRLQCLQTYVTQQLIRAAEIRASANLAATKMSECVLGQSKRVDFCGKGYHLMSFPQSAPHGVVFLHVTYVPAQEKNFTTAPAICHDGKAHFPREGVFVSNGTHWFVTQRNFYEPQIITTDNTFVSGNCDVVIGIVNNTVYDPLQPELDSGGSGYIPEAPRDGQAYVRKDGEWVLLSTFL

SEQ ID NO: 10380 - protein, 1177 aa, Artificial Sequence
  SARS-CoV-2/Iceland/319/2020__EPI_ISL_417648 spike protein (1-1147)(Q965C_S1003C) Foldon construct
MFVFLVLLPLVSSQCVNLTTRTQLPPAYTNSFTRGVYYPDKVFRSSVLHSTQDLFLPFFSNVTWFHAIHVSGTNGTKRFDNPVLPFNDGVYFASTEKSNIIRGWIFGTTLDSKTQSLLIVNNATNVVIKVCEFQFCNDPFLGVYYHKNNKSWMESEFRVYSSANNCTFEYVSQPFLIDLEGKQGNFKNLREFVFKNIDGYFKIYSKHTPINLVRDLPQGFSALEPLVDLPIGINITRFQTLLALHRSYLTPGDSSSGWTAGAAAYYVGYLQPRTFLLKYNENGTITDAVDCALDPLSETKCTLKSFTVEKGIYQTSNFRVQPTESIVRFPNITNLCPFGEVFNATRFASVYAWNRKRISNCVADYSVLYNSASFSTFKCYGVSPTKLNDLCFTNVYADSFVIRGDEVRQIAPGQTGKIADYNYKLPDDFTGCVIAWNSNNLDSKVGGNYNYLYRLFRKSNLKPFERDISTEIYQAGSTPCNGVEGFNCYFPLQSYGFQPTNGVGYQPYRVVVLSFELLHAPATVCGPKKSTNLVKNKCVNFNFNGLTGTGVLTESNKKFLPFQQFGRDIADTTDAVRDPQTLEILDITPCSFGGVSVITPGTNTSNQVAVLYQGVNCTEVPVAIHADQLTPTWRVYSTGSNVFQTRAGCLIGAEHVNNSYECDIPIGAGICASYQTQTNSPRRARSVASQSIIAYTMSLGAENSVAYSNNSIAIPTNFTISVTTEILPVSMTKTSVDCTMYICGDSTECSNLLLQYGSFCTQLNRALTGIAVEQDKNTQEVFAQVKQIYKTPPIKDFGGFNFSQILPDPSKPSKRSFIEDLLFNKVTLADAGFIKQYGDCLGDIAARDLICAQKFNGLTVLPPLLTDEMIAQYTSALLAGTITSGWTFGAGAALQIPFAMQMAYRFNGIGVTQNVLYENQKLIANQFNSAIGKIQDSLSSTASALGKLQDVVNQNAQALNTLVKCLSSNFGAISSVLNDILSRLDKVEAEVQIDRLITGRLQCLQTYVTQQLIRAAEIRASANLAATKMSECVLGQSKRVDFCGKGYHLMSFPQSAPHGVVFLHVTYVPAQEKNFTTAPAICHDGKAHFPREGVFVSNGTHWFVTQRNFYEPQIITTDNTFVSGNCDVVIGIVNNTVYDPLQPELDSGGSGYIPEAPRDGQAYVRKDGEWVLLSTFL

SEQ ID NO: 10381 - protein, 1177 aa, Artificial Sequence
  SARS-CoV-2/Congo/94/2020__EPI_ISL_417947 spike protein (1-1147)(Q965C_S1003C) Foldon construct
MFVFLVLLPLVSSQCVNLTTRTQLPPAYTNSFTRGVYYPDKVFRSSVLHSTQDLFLPFFSNVTWFHAIHVSGTNGTKRFDNPVLPFNDGVYFASTEKSNIIRGWIFGTTLDSKTQSLLIVNNATNVVIKVCEFQFCNDPFLGVYYHKNNKSWMESEFRVYSSANNCTFEYVSQPFLMDLEGKQGNFKNLREFVFKNIDGYFKIYSKHTPINLVRDLPQGFSALEPLVDLPIGINITRFQTLLALHRSYLTPGDSSSGWTAGAAAYYVGYLQPRTFLLKYNENGTITDAVDCALDPLSETKCTLKSFTVEKGIYQTSNFRVQPTESIVRFPNITNLCPFGEVFNATRFASVYAWNRKRISNCVADYSVLYNSASFSTFKCYGVSPTKLNDLCFTNVYADSFVIRGDEVRQIAPGQTGKIADYNYKLPDDFTGCVIAWNSNNLDSKVGGNYNYLYRLFRKSNLKPFERDISTEIYQAGSTPCNGVEGFNCYFPLQSYGFQPTNGVGYQPYRVVVLSFELLHAPATVCGPKKSTNLVKNKCVNFNFNGLTGTGVLTESNKKFLPFQQFGRDIADTTDAVRDPQTLEILDITPCSFGGVSVITPGTNTSNQVAVLYQGVNCTEVPVAIHADQLTPTWRVYSTGSNVFQTRAGCLIGAEHVNNSYECDIPIGAGICASYQTQTNSPRRARSVASQSIIAYTMSLGAENSVAYSNNSIAIPTNFTISVTTEILPVSMTKTSVDCTMYICGDSTECSNLLLQYGSFCTQLNRALTGIAVEQDKNTQEVFAQVKQIYKTPPIKDFGGFNFSQILPDPSKPSKRSFIEDILFNKVTLADAGFIKQYGDCLGDIAARDLICAQKFNGLTVLPPLLTDEMIAQYTSALLAGTITSGWTFGAGAALQIPFAMQMAYRFNGIGVTQNVLYENQKLIANQFNSAIGKIQDSLSSTASALGKLQDVVNQNAQALNTLVKCLSSNFGAISSVLNDILSRLDKVEAEVQIDRLITGRLQCLQTYVTQQLIRAAEIRASANLAATKMSECVLGQSKRVDFCGKGYHLMSFPQSAPHGVVFLHVTYVPAQEKNFTTAPAICHDGKAHFPREGVFVSNGTHWFVTQRNFYEPQIITTDNTFVSGNCDVVIGIVNNTVYDPLQPELDSGGSGYIPEAPRDGQAYVRKDGEWVLLSTFL

SEQ ID NO: 10382 - protein, 1177 aa, Artificial Sequence
  SARS-CoV-2/Congo/158/2020__EPI_ISL_417950 spike protein (1-1147)(Q965C_S1003C) Foldon construct
MFVFLVLLPLVSSQCVNLTTRTQLPPAYTNSFTRGVYYPDKVFRSSVLHSTQDLFLPFFSNVTWFHAIHVSGTNGTKRFDNPVLPFNDGVYFASTEKSNIIRGWIFGTTLDSKTQSLLIVNNATNVVIKVCEFQFCNDPFLGVYYHKNNKSWMESEFRVYSSANNCTFEYVSQPFLMDLEGKQGNFKNLREFVFKNIDGYFKIYSKHTPINLVRDLPQGFSALEPLVDLPIGINITRFQTLLALHRSYLTPGDSSSGWTAGAAAYYVGYLQPRTFLLKYNENGTITDAVDCALDPLSETKCTLKSFTVEKGIYQTSNFRVQPTESIVRFPNITNLCPFGEVFNATRFASVYAWNRKRISNCVADYSVLYNSASFSTFKCYGVSPTKLNDLCFTNVYADSFVIRGDEVRQIAPGQTGKIADYNYKLPDDFTGCVIAWNSNNLDSKVGGNYNYLYRLFRKSNLKPFERDISTEIYQAGSTPCNGVEGFNCYFPLQSYGFQPTNGVGYQPYRVVVLSFELLHAPATVCGPKKSTNLVKNKCVNFNFNGLTGTGVLTESNKKFLPFQQFGRDIADTTDAVRDPQTLEILDITPCSFGGVSVITPGTNTSNQVAVLYQDVNCTEVPVAIHADQLTPTWRVYSTGSNVFQTRAGCLIGAEHVNNSYECDIPIGAGICASYQTQTNSPRRARSVASQSIIAYTMSLGAENSVAYSNNSIAIPTNFTISVTTEILPVSMTKTSVDCTMYICGDSTECSNLLLQYGSFCTQLNRALTGIAVEQDKNTQEVFAQVKQIYKTPPIKDFGGFNFSQILPDPSKPSKRSFIEDLLFNKVTLADAGFIKQYGDCLGDIAARDLICAQKFNGLTVLPPLLTDEMIAQYTSALLAGTITSGWTFGAGAALQIPFAMQMAYRFNGIGVTQNVLYENQKLIANQFNSAIGKIQDSLSSTASALGKLQDVVNQNAQALNTLVKCLSSNFGAISSVLNDILSRLDKVEAEVQIDRLITGRLQCLQTYVTQQLIRAAEIRASANLAATKMSECVLGQSKRVDFCGKGYHLMSFPQSAPHGVVFLHVTYVPAQEKNFTTAPAICHDGKAHFPREGVFVSNGTHWFVTQRNFYEPQIITTDNTFLSGNCDVVIGIVNNTVYDPLQPELDSGGSGYIPEAPRDGQAYVRKDGEWVLLSTFL

SEQ ID NO: 10383 - protein, 1177 aa, Artificial Sequence
  SARS-CoV-2/USA/UT-00034/2020__EPI_ISL_417977 spike protein (1-1147)(Q965C_S1003C) Foldon construct
MFVFLVLLPLVSSQCVNLTTRTQLPPAYTNSFTRGVYYPDKVFRSSVLHSTQDLFLPFFSNVTWFHAIHVSGTNGTKRFDNPVLPFNDGVYFASTEKSNIIRGWIFGTTLDSKTQSLLIVNNATNVVIKVCEFQFCNDPFLGVYYYKNNKSWMESEFRVYSSANNCTFEYVSQPFLMDLEGKQGNFKNLREFVFKNIDGYFKIYSKHTPINLVRDLPQGFSALEPLVDLPIGINITRFQTLLALHRSYLTPGDSSSGWTAGAAAYYVGYLQPRTFLLKYNENGTITDAVDCALDPLSETKCTLKSFTVEKGIYQTSNFRVQPTESIVRFPNITNLCPFGEVFNATRFASVYAWNRKRISNCVADYSVLYNSASFSTFKCYGVSPTKLNDLCFTNVYADSFVIRGDEVRQIAPGQTGKIADYNYKLPDDFTGCVIAWNSNNLDSKVGGNYNYLYRLFRKSNLKPFERDISTEIYQAGSTPCNGVEGFNCYFPLQSYGFQPTNGVGYQPYRVVVLSFELLHAPATVCGPKKSTNLVKNKCVNFNFNGLTGTGVLTESNKKFLPFQQFGRDIADTTDAVRDPQTLEILDITPCSFGGVSVITPGTNTSNQVAVLYQGVNCTEVPVAIHADQLTPTWRVYSTGSNVFQTRAGCLIGAEHVNNSYECDIPIGAGICASYQTQTNSPRRARSVASQSIIAYTMSLGAENSVAYSNNSIAIPTNFTISVTTEILPVSMTKTSVDCTMYICGDSTECSNLLLQYGSFCTQLNRALTGIAVEQDKNTQEVFAQVKQIYKTPPIKDFGGFNFSQILPDPSKPSKRSFIEDLLFNKVTLADAGFIKQYGDCLGDIAARDLICAQKFNGLTVLPPLLTDEMIAQYTSALLAGTITSGWTFGAGAALQIPFAMQMAYRFNGIGVTQNVLYENQKLIANQFNSAIGKIQDSLSSTASALGKLQDVVNQNAQALNTLVKCLSSNFGAISSVLNDILSRLDKVEAEVQIDRLITGRLQCLQTYVTQQLIRAAEIRASANLAATKMSECVLGQSKRVDFCGKGYHLMSFPQSAPHGVVFLHVTYVPAQEKNFTTAPAICHDGKAHFPREGVFVSNGTHWFVTQRNFYEPQIITTDNTFVSGNCDVVIGIVNNTVYDPLQPELDSGGSGYIPEAPRDGQAYVRKDGEWVLLSTFL

SEQ ID NO: 10384 - protein, 1177 aa, Artificial Sequence
  SARS-CoV-2/USA/UT-00033/2020__EPI_ISL_417976 spike protein (1-1147)(Q965C_S1003C) Foldon construct
MFVFLVLLPLVSSQCVNLTTRTQLPPAYTNSFTRGVYYPDKVFRSSVLHSTQDLFLPFFSNVTWFHAIHVSGTNGTKRFDNPVLPFNDGVYFASTEKSNIIRGWIFGTTLDSKTQSLLIVNNATNVVIKVCEFQFCNDPFLGVYYHKNNKSWMESEFRVYSSANNCTFEYVSQPFLMDLEGKQGNFKNLREFVFKNIDGYFKIYSKHTPINLVRDLPQGFSALEPLVDLPIGINITRFQTLLALHRSYLTPGDSSSGLTAGAAAYYVGYLQPRTFLLKYNENGTITDAVDCALDPLSETKCTLKSFTVEKGIYQTSNFRVQPTESIVRFPNITNLCPFGEVFNATRFASVYAWNRKRISNCVADYSVLYNSASFSTFKCYGVSPTKLNDLCFTNVYADSFVIRGDEVRQIAPGQTGKIADYNYKLPDDFTGCVIAWNSNNLDSKVGGNYNYLYRLFRKSNLKPFERDISTEIYQAGSTPCNGVEGFNCYFPLQSYGFQPTNGVGYQPYRVVVLSFELLHAPATVCGPKKSTNLVKNKCVNFNFNGLTGTGVLTESNKKFLPFQQFGRDIADTTDAVRDPQTLEILDITPCSFGGVSVITPGTNTSNQVAVLYQGVNCTEVPVAIHADQLTPTWRVYSTGSNVFQTRAGCLIGAEHVNNSYECDIPIGAGICASYQTQTNSPRRARSVASQSIIAYTMSLGAENSVAYSNNSIAIPTNFTISVTTEILPVSMTKTSVDCTMYICGDSTECSNLLLQYGSFCTQLNRALTGIAVEQDKNTQEVFAQVKQIYKTPPIKDFGGFNFSQILPDPSKPSKRSFIEDLLFNKVTLADAGFIKQYGDCLGDIAARDLICAQKFNGLTVLPPLLTDEMIAQYTSALLAGTITSGWTFGAGAALQIPFAMQMAYRFNGIGVTQNVLYENQKLIANQFNSAIGKIQDSLSSTASALGKLQDVVNQNAQALNTLVKCLSSNFGAISSVLNDILSRLDKVEAEVQIDRLITGRLQCLQTYVTQQLIRAAEIRASANLAATKMSECVLGQSKRVDFCGKGYHLMSFPQSAPHGVVFLHVTYVPAQEKNFTTAPAICHDGKAHFPREGVFVSNGTHWFVTQRNFYEPQIITTDNTFVSGNCDVVIGIVNNTVYDPLQPELDSGGSGYIPEAPRDGQAYVRKDGEWVLLSTFL

SEQ ID NO: 10385 - protein, 1177 aa, Artificial Sequence
  SARS-CoV-2/USA/WI-13/2020__EPI_ISL_417516 spike protein (1-1147)(Q965C_S1003C) Foldon construct
MFVFLVLLPLVSSQCVNLTTRTQLPPAYTNSFTRGVYYPDKVFRSSVLHSTQDLFLPFFSNVTWFHAIHVSGTNGTKRFDNPVLPFNDGVYFASTEKSNIIRGWIFGTTLDSKTQSLLIVNNATNVVIKVCEFQFCNDPFLGVYYHKNNKSWMESEFRVYSSANNCTFEYVSQPFLMDLEGKQGNFKNLREFVFKNIDGYFKIYSKHTPINLVRDLPQGFSALEPLVDLPIGINITRFQTLLALHRSYLTPGDSSSGWTAGAAAYYVGYLQPRTFLLKYNENGTITDAVDCALDPLSETKCTLKSFTVEKGIYQTSNFRVLPTESIVRFPNITNLCPFGEVFNATRFASVYAWNRKRISNCVADYSVLYNSASFSTFKCYGVSPTKLNDLCFTNVYADSFVIRGDEVRQIAPGQTGKIADYNYKLPDDFTGCVIAWNSNNLDSKVGGNYNYLYRLFRKSNLKPFERDISTEIYQAGSTPCNGVEGFNCYFPLQSYGFQPTNGVGYQPYRVVVLSFELLHAPATVCGPKKSTNLVKNKCVNFNFNGLTGTGVLTESNKKFLPFQQFGRDIADTTDAVRDPQTLEILDITPCSFGGVSVITPGTNTSNQVAVLYQGVNCTEVPVAIHADQLTPTWRVYSTGSNVFQTRAGCLIGAEHVNNSYECDIPIGAGICASYQTQTNSPRRARSVASQSIIAYTMSLGAENSVAYSNNSIAIPTNFTISVTTEILPVSMTKTSVDCTMYICGDSTECSNLLLQYGSFCTQLNRALTGIAVEQDKNTQEVFAQVKQIYKTPPIKDFGGFNFSQILPDPSKPSKRSFIEDLLFNKVTLADAGFIKQYGDCLGDIAARDLICAQKFNGLTVLPPLLTDEMIAQYTSALLAGTITSGWTFGAGAALQIPFAMQMAYRFNGIGVTQNVLYENQKLIANQFNSAIGKIQDSLSSTASALGKLQDVVNQNAQALNTLVKCLSSNFGAISSVLNDILSRLDKVEAEVQIDRLITGRLQCLQTYVTQQLIRAAEIRASANLAATKMSECVLGQSKRVDFCGKGYHLMSFPQSAPHGVVFLHVTYVPAQEKNFTTAPAICHDGKAHFPREGVFVSNGTHWFVTQRNFYEPQIITTDNTFVSGNCDVVIGIVNNTVYDPLQPELDSGGSGYIPEAPRDGQAYVRKDGEWVLLSTFL

SEQ ID NO: 10386 - protein, 1176 aa, Artificial Sequence
  SARS-CoV-2/India/1-27/2020__EPI_ISL_413522 spike protein (1-1146)(Q964C_S1002C) Foldon construct
MFVFLVLLPLVSSQCVNLTTRTQLPPAYTNSFTRGVYYPDKVFRSSVLHSTQDLFLPFFSNVTWFHAIHVSGTNGTKRFDNPVLPFNDGVYFASTEKSNIIRGWIFGTTLDSKTQSLLIVNNATNVVIKVCEFQFCNDPFLGVYHKNNKSWMESEFRVYSSANNCTFEYVSQPFLMDLEGKQGNFKNLREFVFKNIDGYFKIYSKHTPINLVRDLPQGFSALEPLVDLPIGINITRFQTLLALHRSYLTPGDSSSGWTAGAAAYYVGYLQPRTFLLKYNENGTITDAVDCALDPLSETKCTLKSFTVEKGIYQTSNFRVQPTESIVRFPNITNLCPFGEVFNATRFASVYAWNRKRISNCVADYSVLYNSASFSTFKCYGVSPTKLNDLCFTNVYADSFVIRGDEVIQIAPGQTGKIADYNYKLPDDFTGCVIAWNSNNLDSKVGGNYNYLYRLFRKSNLKPFERDISTEIYQAGSTPCNGVEGFNCYFPLQSYGFQPTNGVGYQPYRVVVLSFELLHAPATVCGPKKSTNLVKNKCVNFNFNGLTGTGVLTESNKKFLPFQQFGRDIADTTDAVRDPQTLEILDITPCSFGGVSVITPGTNTSNQVAVLYQDVNCTEVPVAIHADQLTPTWRVYSTGSNVFQTRAGCLIGAEHVNNSYECDIPIGAGICASYQTQTNSPRRARSVASQSIIAYTMSLGAENSVAYSNNSIAIPTNFTISVTTEILPVSMTKTSVDCTMYICGDSTECSNLLLQYGSFCTQLNRALTGIAVEQDKNTQEVFAQVKQIYKTPPIKDFGGFNFSQILPDPSKPSKRSFIEDLLFNKVTLADAGFIKQYGDCLGDIAARDLICAQKFNGLTVLPPLLTDEMIAQYTSALLAGTITSGWTFGAGAALQIPFAMQMAYRFNGIGVTQNVLYENQKLIANQFNSAIGKIQDSLSSTASALGKLQDVVNQNAQALNTLVKCLSSNFGAISSVLNDILSRLDKVEAEVQIDRLITGRLQCLQTYVTQQLIRAAEIRASANLAATKMSECVLGQSKRVDFCGKGYHLMSFPQSAPHGVVFLHVTYVPAQEKNFTTAPAICHDGKAHFPREGVFVSNGTHWFVTQRNFYEPQIITTDNTFVSGNCDVVIGIVNNTVYDPLQPELDSGGSGYIPEAPRDGQAYVRKDGEWVLLSTFL

SEQ ID NO: 10387 - protein, 1171 aa, Artificial Sequence
  SARS-CoV-2/pangolin/Guangxi/P4L/2017__EPI_ISL_410538 spike protein (1-1141)(Q959C_S997C) Foldon construct
MFVFLFVLPLVSSQCVNLTTRTGIPPGYTNSSTRGVYYPDKVFRSSILHLTQDLFLPFFSNVTWFNTINYQGGFKKFDNPVLPFNDGVYFASTEKSNIIRGWIFGTTLDARTQSLLIVNNATNVVIKVCEFQFCTDPFLGVYYHNNNKTWVENEFRVYSSANNCTFEYISQPFLMDLEGKQGNFKNLREFVFKNVDGYFKIYSKHTPIDLVRDLPRGFAALEPLVDLPIGINITRFQTLLALHRSYLTPGNLESGWTTGAAAYYVGYLQQRTFLLSYNQNGTITDAVDCSLDPLSETKCTLKSLTVEKGIYQTSNFRVQPTISIVRFPNITNLCPFGEVFNASKFASVYAWNRKRISNCVADYSVLYNSTSFSTFKCYGVSPTKLNDLCFTNVYADSFVVKGDEVRQIAPGQTGVIADYNYKLPDDFTGCVIAWNSVKQDALTGGNYGYLYRLFRKSKLKPFERDISTEIYQAGSTPCNGQVGLNCYYPLERYGFHPTTGVNYQPFRVVVLSFELLNGPATVCGPKLSTTLVKDKCVNFNFNGLTGTGVLTTSKKQFLPFQQFGRDISDTTDAVRDPQTLEILDITPCSFGGVSVITPGTNTSNQVAVLYQDVNCTEVPMAIHAEQLTPAWRVYSAGANVFQTRAGCLVGAEHVNNSYECDIPVGAGICASYHSMSSLRSVNQRSIIAYTMSLGAENSVAYSNNSIAIPTNFTISVTTEILPVSMTKTSVDCTMYICGDSIECSNLLLQYGSFCTQLNRALTGIAVEQDKNTQEVFAQVKQIYKTPPIKDFGGFNFSQILPDPSKPSKRSFIEDLLFNKVTLADAGFIKQYGDCLGDIAARDLICAQKFNGLTVLPPLLTDEMIAQYTSALLAGTITSGWTFGAGAALQIPFAMQMAYRFNGIGVTQNVLYENQKLIANQFNSAIGKIQDSLSSTASALGKLQDVVNQNAQALNTLVKCLSSNFGAISSVLNDILSRLDKVEAEVQIDRLITGRLQCLQTYVTQQLIRAAEIRASANLAATKMSECVLGQSKRVDFCGKGYHLMSFPQSAPHGVVFLHVTYVPAQEKNFTTAPAICHEGKAHFPREGVFVSNGTHWFITQRNFYEPQIITTDNTFVSGSCDVVIGIVNNTVYDPLQPELDSGGSGYIPEAPRDGQAYVRKDGEWVLLSTFL

SEQ ID NO: 10388 - protein, 1171 aa, Artificial Sequence
  SARS-CoV-2/pangolin/Guangxi/P5L/2017__EPI_ISL_410540 spike protein (1-1141)(Q959C_S997C) Foldon construct
MFVFLFVLPLVSSQCVNLTTRTGIPPGYTNSSTRGVYYPDKVFRSSILHLTQDLFLPFFSNVTWFNTINYQGGFKKFDNPVLPFNDGVYFASTEKSNIIRGWIFGTTLDARTQSLLIVNNATNVVIKVCEFQFCTDPFLGVYYHNNNKTWVENEFRVYSSANNCTFEYISQPFLMDLEGKQGNFKNLREFVFKNVDGYFKIYSKHTPIDLVRDLPRGFAALEPLVDLPIGINITRFQTLLALHRSYLTPGKLESGWTTGAAAYYVGYLQQRTFLLSYNQNGTITDAVDCSLDPLSETKCTLKSLTVEKGIYQTSNFRVQPTISIVRFPNITNLCPFGEVFNASKFASVYAWNRKRISNCVADYSVLYNSTSFSTFKCYGVSPTKLNDLCFTNVYADSFVVKGDEVRQIAPGQTGVIADYNYKLPDDFTGCVIAWNSVKQDALTGGNYGYLYRLFRKSKLKPFERDISTEIYQAGSTPCNGQVGLNCYYPLERYGFHPTTGVNYQPFRVVVLSFELLNGPATVCGPKLSTTLVKDKCVNFNFNGLTGTGVLTTSKKQFLPFQQFGRDISDTTDAVRDPQTLEILDITPCSFGGVSVITPGTNTSNQVAVLYQDVNCTEVPMAIHAEQLTPAWRVYSAGANVFQTRAGCLVGAEHVNNSYECDIPVGAGICASYHSMSSFRSVNQRSIIAYTMSLGAENSVAYSNNSIAIPTNFTISVTTEILPVSMTKTSVDCTMYICGDSIECSNLLLQYGSFCTQLNRALTGIAVEQDKNTQEVFAQVKQIYKTPPIKDFGGFNFSQILPDPSKPSKRSFIEDLLFNKVTLADAGFIKQYGDCLGDIAARDLICAQKFNGLTVLPPLLTDEMIAQYTSALLAGTITSGWTFGAGAALQIPFAMQMAYRFNGIGVTQNVLYENQKLIANQFNSAIGKIQDSLSSTASALGKLQDVVNQNAQALNTLVKCLSSNFGAISSVLNDILSRLDKVEAEVQIDRLITGRLQCLQTYVTQQLIRAAEIRASANLAATKMSECVLGQSKRVDFCGKGYHLMSFPQSAPHGVVFLHVTYVPAQEKNFTTAPAICHEGKAHFPREGVFVSNGTHWFITQRNFYEPQIITTDNTFVSGSCDVVIGIVNNTVYDPLQPELDSGGSGYIPEAPRDGQAYVRKDGEWVLLSTFL

SEQ ID NO: 10389 - protein, 1171 aa, Artificial Sequence
  SARS-CoV-2/pangolin/Guangxi/P5E/2017__EPI_ISL_410541 spike protein (1-1141)(Q959C_S997C) Foldon construct
MFVFLFVLPLVSSQCVNLTTRTGIPPGYTNSSTRGVYYPDKVFRSSILHLTQDLFLPFFSNVTWFNTITYQGGSKKFDNPVLPFNDGVYFASTEKSNIIRGWIFGTTLDARTQSLLIVNNATNVVIKVCEFQFCTDPFLGVYYHNNNKTWVENEFRVYSSANNCTFEYISQPFLMDLEGKQGNFKNLREFVFKNVDGYFKIYSKHTPIDLVRDLPRGFAALEPLVDLPIGINITRFQTLLALHRSYLTPGKLESGWTTGAAAYYVGYLQQRTFLLSYNQNGTITDAVDCSLDPLSETKCTLKSLTVEKGIYQTSNFRVQPTISIVRFPNITNLCPFGEVFNASKFASVYAWNRKRISNCVADYSVLYNSTSFSTFKCYGVSPTKLNDLCFTNVYADSFVVKGDEVRQIAPGQTGVIADYNYKLPDDFTGCVIAWNSVKQDALTGDNYGYLYRLFRKSKLKPFERDISTEIYQAGSTPCNGQVGLNCYYPLERYGFHPTTGVNYQPFRVVVLSFELLNGPATVCGPKLSTTLVKDKCVNFNFNGLTGTGVLTTSKKQFLPFQQFGRDISDTTDAVRDPQTLEILDITPCSFGGVSVITPGTNTSNQVAVLYQDVNCTEVPMAIHAEQLTPAWRVYSAGANVFQTRAGCLVGAEHVNNSYECDIPVGAGICASYHSMSSFRSVNQRSIIAYTMSLGAENSVAYSNNSIAIPTNFTISVTTEILPVSMTKTSVDCTMYICGDSIECSNLLLQYGSFCTQLNRALTGIAVEQDKNTQEVFAQVKQIYKTPPIKDFGGFNFSQILPDPSKPSKRSFIEDLLFNKVTLADAGFIKQYGDCLGDIAARDLICAQKFNGLTVLPPLLTDEMIAQYTSALLAGTITSGWTFGAGAALQIPFAMQMAYRFNGIGVTQNVLYENQKLIANQFNSAIGKIQDSLSSTASALGKLQDVVNQNAQALNTLVKCLSSNFGAISSVLNDILSRLDKVEAEVQIDRLITGRLQCLQTYVTQQLIRAAEIRASANLAATKMSECVLGQSKRVDFCGKGYHLMSFPQSAPHGVVFLHVTYVPAQEKNFTTAPAICHEGKAHFPREGVFVSNGTHWFITQRNFYEPQIITTDNTFVSGSCDVVIGIVNNTVYDPLQPELDSGGSGYIPEAPRDGQAYVRKDGEWVLLSTFL

SEQ ID NO: 10390 - protein, 1169 aa, Artificial Sequence
  SARS-CoV-2/pangolin/Guangxi/P1E/2017__EPI_ISL_410539 spike protein (1-1139)(Q957C_S995C) Foldon construct
MFVFLFVLPLVSSQCVNLTTRTGIQPGYTNSSTRGVYYPDKVFRSSILHLTQDLFLPFFSNVTWFNTINYQGGFKKFDNPVLPFNDGVYFASTEKSNIIRGWIFGTTLDARTQSLLIVNNATNVVIKVCEFQFCTDPFLGVYYHNNNKTWVENEFRVYSSANNCTFEYISQPFLMDLEGKQGNFKNLREFVFKNVDGYFKIYSKHTPIDLVRDLPRGFAALEPLVDLPIGINITRFQTLLALHRSYLTPGKLESGWTTGAAAYYVGYLQQRTFLLSYNQNGTITDAVDCSLDPLSETKCTLKSLTVEKGIYQTSNFRVQPTISIVRFPNITNLCPFGEVFNASKFASVYAWNRKRISNCVADYSVLYNSTSFSTFKCYGVSPTKLNDLCFTNVYADSFVVKGDEVRQIAPGQTGVIADYNYKLPDDFTGCVIAWNSVKQDALTGGNYLYRLFRKSKLKPFERDISTEIYQAGSTPCNGQVGLNCYYPLERYGFHPTTGVNYQPFRVVVLSFELLNGPATVCGPKLSTTLVKDKCVNFNFNGLTGTGVLTTSKKQFLPFQQFGRDISDTTDAVRDPQTLEILDITPCSFGGVSVITPGTNTSNQVAVLYQDVNCTEVPMAIHAEQLTPAWRVYSAGANVFQTRAGCLVGAEHVNNSYECDIPVGAGICASYHSMSSLRSVNQRSIIAYTMSLGAENSVAYSNNSIAIPTNFTISVTTEILPVSMTKTSVDCTMYICGDSIECSNLLLQYGSFCTQLNRALTGIAVEQDKNTQEVFAQVKQIYKTPPIKDFGGFNFSQILPDPSKPSKRSFIEDLLFNKVTLADAGFIKQYGDCLGDIAARDLICAQKFNGLTVLPPLLTDEMIAQYTSALLAGTITSGWTFGAGAALQIPFAMQMAYRFNGIGVTQNVLYENQKLIANQFNSAIGKIQDSLSSTASALGKLQDVVNQNAQALNTLVKCLSSNFGAISSVLNDILSRLDKVEAEVQIDRLITGRLQCLQTYVTQQLIRAAEIRASANLAATKMSECVLGQSKRVDFCGKGYHLMSFPQSAPHGVVFLHVTYVPAQEKNFTTAPAICHEGKAHFPREGVFVSNGTHWFITQRNFYEPQIITTDNTFVSGSCDVVIGIVNNTVYDPLQPELDSGGSGYIPEAPRDGQAYVRKDGEWVLLSTFL

SEQ ID NO: 10391 - protein, 1177 aa, Artificial Sequence
  SARS-CoV-2/Wuhan/WIV05/2019__EPI_ISL_402128 spike protein (1-1147)(F970C_G999C) Foldon construct
MFVFLVLLPLVSSQCVNLTTRTQLPPAYTNSFTRGVYYPDKVFRSSVLHSTQDLFLPFFSNVTWFHAIHVSGTNGTKRFDNPVLPFNDGVYFASTEKSNIIRGWIFGTTLDSKTQSLLIVNNATNVVIKVCEFQFCNDPFLGVYYHKNNKSWMESEFRVYSSANNCTFEYVSQPFLMDLEGKQGNFKNLREFVFKNIDGYFKIYSKHTPINLVRDLPQGFSALEPLVDLPIGINITRFQTLLALHRSYLTPGDSSSGWTAGAAAYYVGYLQPRTFLLKYNENGTITDAVDCALDPLSETKCTLKSFTVEKGIYQTSNFRVQPTESIVRFPNITNLCPFGEVFNATRFASVYAWNRKRISNCVADYSVLYNSASFSTFKCYGVSPTKLNDLCFTNVYADSFVIRGDEVRQIAPGQTGKIADYNYKLPDDFTGCVIAWNSNNLDSKVGGNYNYLYRLFRKSNLKPFERDISTEIYQAGSTPCNGVEGFNCYFPLQSYGFQPTNGVGYQPYRVVVLSFELLHAPATVCGPKKSTNLVKNKCVNFNFNGLTGTGVLTESNKKFLPFQQFGRDIADTTDAVRDPQTLEILDITPCSFGGVSVITPGTNTSNQVAVLYQDVNCTEVPVAIHADQLTPTWRVYSTGSNVFQTRAGCLIGAEHVNNSYECDIPIGAGICASYQTQTNSPRRARSVASQSIIAYTMSLGAENSVAYSNNSIAIPTNFTISVTTEILPVSMTKTSVDCTMYICGDSTECSNLLLQYGSFCTQLNRALTGIAVEQDKNTQEVFAQVKQIYKTPPIKDFGGFNFSQILPDPSKPSKRSFIEDLLFNKVTLADAGFIKQYGDCLGDIAARDLICAQKFNGLTVLPPLLTDEMIAQYTSALLAGTITSGWTFGAGAALQIPFAMQMAYRFNGIGVTQNVLYENQKLIANQFNSAIGKIQDSLSSTASALGKLQDVVNQNAQALNTLVKQLSSNCGAISSVLNDILSRLDKVEAEVQIDRLITCRLQSLQTYVTQQLIRAAEIRASANLAATKMSECVLGQSKRVDFCGKGYHLMSFPQSAPHGVVFLHVTYVPAQEKNFTTAPAICHDGKAHFPREGVFVSNGTHWFVTQRNFYEPQIITTDNTFVSGNCDVVIGIVNNTVYDPLQPELDSGGSGYIPEAPRDGQAYVRKDGEWVLLSTFL

SEQ ID NO: 10392 - protein, 1173 aa, Artificial Sequence
  SARS-CoV-2/bat/Yunnan/RaTG13/2013__EPI_ISL_402131 spike protein (1-1143)(F966C_G995C) Foldon construct
MFVFLVLLPLVSSQCVNLTTRTQLPPAYTNSSTRGVYYPDKVFRSSVLHLTQDLFLPFFSNVTWFHAIHVSGTNGIKRFDNPVLPFNDGVYFASTEKSNIIRGWIFGTTLDSKTQSLLIVNNATNVVIKVCEFQFCNDPFLGVYYHKNNKSWMESEFRVYSSANNCTFEYVSQPFLMDLEGKQGNFKNLREFVFKNIDGYFKIYSKHTPINLVRDLPPGFSALEPLVDLPIGINITRFQTLLALHRSYLTPGDSSSGWTAGAAAYYVGYLQPRTFLLKYNENGTITDAVDCALDPLSETKCTLKSFTVEKGIYQTSNFRVQPTDSIVRFPNITNLCPFGEVFNATTFASVYAWNRKRISNCVADYSVLYNSTSFSTFKCYGVSPTKLNDLCFTNVYADSFVITGDEVRQIAPGQTGKIADYNYKLPDDFTGCVIAWNSKHIDAKEGGNFNYLYRLFRKANLKPFERDISTEIYQAGSKPCNGQTGLNCYYPLYRYGFYPTDGVGHQPYRVVVLSFELLNAPATVCGPKKSTNLVKNKCVNFNFNGLTGTGVLTESNKKFLPFQQFGRDIADTTDAVRDPQTLEILDITPCSFGGVSVITPGTNASNQVAVLYQDVNCTEVPVAIHADQLTPTWRVYSTGSNVFQTRAGCLIGAEHVNNSYECDIPIGAGICASYQTQTNSRSVASQSIIAYTMSLGAENSVAYSNNSIAIPTNFTISVTTEILPVSMTKTSVDCTMYICGDSTECSNLLLQYGSFCTQLNRALTGIAVEQDKNTQEVFAQVKQIYKTPPIKDFGGFNFSQILPDPSKPSKRSFIEDLLFNKVTLADAGFIKQYGDCLGDIAARDLICAQKFNGLTVLPPLLTDEMIAQYTSALLAGTITSGWTFGAGAALQIPFAMQMAYRFNGIGVTQNVLYENQKLIANQFNSAIGKIQDSLSSTASALGKLQDVVNQNAQALNTLVKQLSSNCGAISSVLNDILSRLDKVEAEVQIDRLITCRLQSLQTYVTQQLIRAAEIRASANLAATKMSECVLGQSKRVDFCGKGYHLMSFPQSAPHGVVFLHVTYVPAQEKNFTTAPAICHDGKAHFPREGVFVSNGTHWFVTQRNFYEPQIITTDNTFVSGSCDVVIGIVNNTVYDPLQPELDSGGSGYIPEAPRDGQAYVRKDGEWVLLSTFL

SEQ ID NO: 10393 - protein, 1177 aa, Artificial Sequence
  SARS-CoV-2/Wuhan/HBCDC-HB-01/2019__EPI_ISL_402132 spike protein (1-1147)(F970C_G999C) Foldon construct
MFVFLVLLPLVSSQCVNLTTRTQLPPAYTNSITRGVYYPDKVFRSSVLHSTQDLFLPFFSNVTWFHAIHVSGTNGTKRFDNPVLPFNDGVYFASTEKSNIIRGWIFGTTLDSKTQSLLIVNNATNVVIKVCEFQFCNDPFLGVYYHKNNKSWMESEFRVYSSANNCTFEYVSQPFLMDLEGKQGNFKNLREFVFKNIDGYFKIYSKHTPINLVRDLPQGFSALEPLVDLPIGINITRFQTLLALHRSYLTPGDSSSGWTAGAAAYYVGYLQPRTFLLKYNENGTITDAVDCALDPLSETKCTLKSFTVEKGIYQTSNFRVQPTESIVRFPNITNLCPFGEVFNATRFASVYAWNRKRISNCVADYSVLYNSASFSTFKCYGVSPTKLNDLCFTNVYADSFVIRGDEVRQIAPGQTGKIADYNYKLPDDFTGCVIAWNSNNLDSKVGGNYNYLYRLFRKSNLKPFERDISTEIYQAGSTPCNGVEGFNCYFPLQSYGFQPTNGVGYQPYRVVVLSFELLHAPATVCGPKKSTNLVKNKCVNFNFNGLTGTGVLTESNKKFLPFQQFGRDIADTTDAVRDPQTLEILDITPCSFGGVSVITPGTNTSNQVAVLYQDVNCTEVPVAIHADQLTPTWRVYSTGSNVFQTRAGCLIGAEHVNNSYECDIPIGAGICASYQTQTNSPRRARSVASQSIIAYTMSLGAENSVAYSNNSIAIPTNFTISVTTEILPVSMTKTSVDCTMYICGDSTECSNLLLQYGSFCTQLNRALTGIAVEQDKNTQEVFAQVKQIYKTPPIKDFGGFNFSQILPDPSKPSKRSFIEDLLFNKVTLADAGFIKQYGDCLGDIAARDLICAQKFNGLTVLPPLLTDEMIAQYTSALLAGTITSGWTFGAGAALQIPFAMQMAYRFNGIGVTQNVLYENQKLIANQFNSAIGKIQDSLSSTASALGKLQDVVNQNAQALNTLVKQLSSNCGAISSVLNDILSRLDKVEAEVQIDRLITCRLQSLQTYVTQQLIRAAEIRASANLAATKMSECVLGQSKRVDFCGKGYHLMSFPQSAPHGVVFLHVTYVPAQEKNFTTAPAICHDGKAHFPREGVFVSNGTHWFVTQRNFYEPQIITTDNTFVSGNCDVVIGIVNNTVYDPLQPELDSGGSGYIPEAPRDGQAYVRKDGEWVLLSTFL

SEQ ID NO: 10394 - protein, 1177 aa, Artificial Sequence
  SARS-CoV-2/Guangdong/20SF028/2020__EPI_ISL_403936 spike protein (1-1147)(F970C_G999C) Foldon construct
MFVFLVLLPLVSSQCVNLTTRTQLPPAYTNSFTRGVYYPDKVFRSSVLYSTQDLFLPFFSNVTWFHAIHVSGTNGTKRFDNPVLPFNDGVYFASTEKSNIIRGWIFGTTLDSKTQSLLIVNNATNVVIKVCEFQFCNDPFLGVYYHKNNKSWMESEFRVYSSANNCTFEYVSQPFLMDLEGKQGNFKNLREFVFKNIDGYFKIYSKHTPINLVRDLPQGFSALEPLVDLPIGINITRFQTLLALHRSYLTPGDSSSGWTAGAAAYYVGYLQPRTFLLKYNENGTITDAVDCALDPLSETKCTLKSFTVEKGIYQTSNFRVQPTESIVRFPNITNLCPFGEVFNATRFASVYAWNRKRISNCVADYSVLYNSASFSTFKCYGVSPTKLNDLCFTNVYADSFVIRGDEVRQIAPGQTGKIADYNYKLPDDFTGCVIAWNSNNLDSKVGGNYNYLYRLFRKSNLKPFERDISTEIYQAGSTPCNGVEGFNCYFPLQSYGFQPTNGVGYQPYRVVVLSFELLHAPATVCGPKKSTNLVKNKCVNFNFNGLTGTGVLTESNKKFLPFQQFGRDIADTTDAVRDPQTLEILDITPCSFGGVSVITPGTNTSNQVAVLYQDVNCTEVPVAIHADQLTPTWRVYSTGSNVFQTRAGCLIGAEHVNNSYECDIPIGAGICASYQTQTNSPRRARSVASQSIIAYTMSLGAENSVAYSNNSIAIPTNFTISVTTEILPVSMTKTSVDCTMYICGDSTECSNLLLQYGSFCTQLNRALTGIAVEQDKNTQEVFAQVKQIYKTPPIKDFGGFNFSQILPDPSKPSKRSFIEDLLFNKVTLADAGFIKQYGDCLGDIAARDLICAQKFNGLTVLPPLLTDEMIAQYTSALLAGTITSGWTFGAGAALQIPFAMQMAYRFNGIGVTQNVLYENQKLIANQFNSAIGKIQDSLSSTASALGKLQDVVNQNAQALNTLVKQLSSNCGAISSVLNDILSRLDKVEAEVQIDRLITCRLQSLQTYVTQQLIRAAEIRASANLAATKMSECVLGQSKRVDFCGKGYHLMSFPQSAPHGVVFLHVTYVPAQEKNFTTAPAICHDGKAHFPREGVFVSNGTHWFVTQRNFYEPQIITTDNTFVSGNCDVVIGIVNNTVYDPLQPELDSGGSGYIPEAPRDGQAYVRKDGEWVLLSTFL

SEQ ID NO: 10395 - protein, 1177 aa, Artificial Sequence
  SARS-CoV-2/Shenzhen/SZTH-001/2020__EPI_ISL_406592 spike protein (1-1147)(F970C_G999C) Foldon construct
MFVFLVLLPLVSSQCVNLTTRTQLPPAYTNSFTRGVYYPDKVFRSSVLHSTQDLFLPFFSNVTWFHAIHVSGTNGTKRFDNPVLPFNDGVYFASTEKSNIIRGWIFGTTLDSKTQSLLIVNNATNVVIKVCEFQFCNDPFLGVYYHKNNKSWMESEFRVYSSANNCTFEYVSQPFLMDLEGKQGNFKNLREFVFKNIDGYFKIYSKHTPINLVRDLPQGFSALEPLVDLPIGINITRFQTLLALHRSYLTPGDSSSGWTAGAAAYYVGYLQPRTFLLKYNENGTITDAVDCALDPLSETKCTLKSFTVEKGIYQTSNFRVQPTESIVRFPNITNLCPFGEVFNATRFASVYAWNRKRISNCVADYSVLYNSASFSTFKCYGVSPTKLNDLCFTNVYADSFVIRGDEVRQIAPGQTGKIADYNYKLPDDFTGCVIAWNSNNLDSKVGGNYNYLYRLFRKSNLKPFERDISTEIYQAGSTPCNGVEGFNCYFPLQSYGFQPTNGVGYQPYRVVVLSFELLHAPATVCGPKKSTNLVKNKCVNFNFNGLTGTGVLTESNKKFLPFQQFGRDIADTTDAVRDPQTLEILDITPCSFGGVSVITPGTNTSNQVAVLYQDVNCTEVPVAIHADQLTPTWRVYSTGSNVFQTRAGCLIGAEHVNNSYECDIPIGAGICASYQTQTNSPRRARSVASQSIIAYTMSLGAENSVAYSNNSIAIPTNFTISVTTEILPVSMTKTSVDCTMYICGDSTECSNLLLQYGSFCTQLNRALTGIAVEQDKNTQEVFAQVKQIYKTPPIKDFGGFNFSQILPDPSKPSKRSFIEDLLFNKVTLADAGFIKQYGDCLGDIAARDLICAQKFNGLTVLPPLLTDEMIAQYTSALLAGTITSGWTFGAGAALQIPFAMQMAYRFNGIGVTQNVLYENQKLIANQFNSAIGKIQDSLSSTASALGKLQDVVNQNAQALNTLVKQLSSNCGAISSVLNDILSRLDKVEAEVQIDRLITCRLQSLQTYVTQQLIRAAEIRASANLAATKMSECVLGQSKRVDFCGKGYHLMSFPQSAPHGVVFLHVTYVPAQEKNFTTAPAICHDGKAHFPREGVFVSNGTHWFVTQRNFYEPQIITTDNTFVSGNCDVLIGIVNNTVYDPLQPELDSGGSGYIPEAPRDGQAYVRKDGEWVLLSTFL

SEQ ID NO: 10396 - protein, 1177 aa, Artificial Sequence
  SARS-CoV-2/Shenzhen/SZTH-004/2020__EPI_ISL_406595 spike protein (1-1147)(F970C_G999C) Foldon construct
MFVFLVLLPLVSSQCVNLTTRTQLPPAYTNSFTRGVYYPDKVFRSSVLHSTQDLFLPFFSNVTWFHAIHVSGTNGTKRFDNPVLPFNDGVYFASTEKSNIIRGWIFGTTLDSKTQSLLIVNNATNVVIKVCEFQFCNDPFLGVYYHKNNKSWMESEFRVYSSANNCTFEYVSQPFLMDLEGKQGNFKNLREFVFKNIDGYFKIYSKHTPINLVRDLPQGFSALEPLVDLPIGINITRFQTLLALHRSYLTPGDSSSGWTAGAAAYYVGYLQPRTFLLKYNENGTITDAVDCALDPLSETKCTLKSFTVEKGIYQTSNFRVQPTESIVRFPNITNLCPFGEVFNATRFASVYAWDRKRISNCVAYYSVLYNSASFSTFKCYGVSPTKLNDLCFTNVYADSFVIRGDEVRQIAPGQTGKIADYNYKLPDDFTGCVIAWNSNNLDSKVGGNYNYLYRLFRKSNLKPFERDISTEIYQAGSTPCNGVEGFNCYFPLQSYGFQPTNGVGYQPYRVVVLSFELLHAPATVCGPKKSTNLVKNKCVNFNFNGLTGTGVLTESNKKFLPFQQFGRDIADTTDAVRDPQTLEILDITPCSFGGVSVITPGTNTSNQVAVLYQDVNCTEVPVAIHADQLTPTWRVYSTGSNVFQTRAGCLIGAEHVNNSYECDIPIGAGICASYQTQTNSPRRARSVASQSIIAYTMSLGAENSVAYSNNSIAIPTNFTISVTTEILPVSMTKTSVDCTMYICGDSTECSNLLLQYGSFCTQLNRALTGIAVEQDKNTQEVFAQVKQIYKTPPIKDFGGFNFSQILPDPSKPSKRSFIEDLLFNKVTLADAGFIKQYGDCLGDIAARDLICAQKFNGLTVLPPLLTDEMIAQYTSALLAGTITSGWTFGAGAALQIPFAMQMAYRFNGIGVTQNVLYENQKLIANQFNSAIGKIQDSLSSTASALGKLQDVVNQNAQALNTLVKQLSSNCGAISSVLNDILSRLDKVEAEVQIDRLITCRLQSLQTYVTQQLIRAAEIRASANLAATKMSECVLGQSKRVDFCGKGYHLMSFPQSAPHGVVFLHVTYVPAQEKNFTTAPAICHDGKAHFPREGVFVSNGTHWFVTQRNFYEPQIITTDNTFVSGNCDVVIGIVNNTVYDPLQPELDSGGSGYIPEAPRDGQAYVRKDGEWVLLSTFL

SEQ ID NO: 10397 - protein, 1177 aa, Artificial Sequence
  SARS-CoV-2/France/IDF0372/2020__EPI_ISL_406596 spike protein (1-1147)(F970C_G999C) Foldon construct
MFVFLVLLPLVSSQCVNLTTRTQLPPAYTNSFTRGVYYPDKVFRSSVLHSTQDLFLPFFSNVTWFHAIHVSGTNGTKRFDNPVLPFNDGVYFASTEKSNIIRGWIFGTTLDSKTQSLLIVNNATNVVIKVCEFQFCNDPFLGVYYHKNNKSWMESEFRVYSSANNCTFEYVSQPFLMDLEGKQGNFKNLREFVFKNIDGYFKIYSKHTPINLVRDLPQGFSALEPLVDLPIGINITRFQTLLALHRSYLTPGDSSSGWTAGAAAYYVGYLQPRTFLLKYNENGTITDAVDCALDPLSETKCTLKSFTVEKGIYQTSNFRVQPTESIVRFPNITNLCPFGEVFNATRFASVYAWNRKRISNCVADYSFLYNSASFSTFKCYGVSPTKLNDLCFTNVYADSFVIRGDEVRQIAPGQTGKIADYNYKLPDDFTGCVIAWNSNNLDSKVGGNYNYLYRLFRKSNLKPFERDISTEIYQAGSTPCNGVEGFNCYFPLQSYGFQPTNGVGYQPYRVVVLSFELLHAPATVCGPKKSTNLVKNKCVNFNFNGLTGTGVLTESNKKFLPFQQFGRDIADTTDAVRDPQTLEILDITPCSFGGVSVITPGTNTSNQVAVLYQDVNCTEVPVAIHADQLTPTWRVYSTGSNVFQTRAGCLIGAEHVNNSYECDIPIGAGICASYQTQTNSPRRARSVASQSIIAYTMSLGAENSVAYSNNSIAIPTNFTISVTTEILPVSMTKTSVDCTMYICGDSTECSNLLLQYGSFCTQLNRALTGIAVEQDKNTQEVFAQVKQIYKTPPIKDFGGFNFSQILPDPSKPSKRSFIEDLLFNKVTLADAGFIKQYGDCLGDIAARDLICAQKFNGLTVLPPLLTDEMIAQYTSALLAGTITSGWTFGAGAALQIPFAMQMAYRFNGIGVTQNVLYENQKLIANQFNSAIGKIQDSLSSTASALGKLQDVVNQNAQALNTLVKQLSSNCGAISSVLNDILSRLDKVEAEVQIDRLITCRLQSLQTYVTQQLIRAAEIRASANLAATKMSECVLGQSKRVDFCGKGYHLMSFPQSAPHGVVFLHVTYVPAQEKNFTTAPAICHDGKAHFPREGVFVSNGTHWFVTQRNFYEPQIITTDNTFVSGNCDVVIGIVNNTVYDPLQPELDSGGSGYIPEAPRDGQAYVRKDGEWVLLSTFL

SEQ ID NO: 10398 - protein, 1177 aa, Artificial Sequence
  SARS-CoV-2/Australia/VIC01/2020__EPI_ISL_406844 spike protein (1-1147)(F970C_G999C) Foldon construct
MFVFLVLLPLVSSQCVNLTTRTQLPPAYTNSFTRGVYYPDKVFRSSVLHSTQDLFLPFFSNVTWFHAIHVSGTNGTKRFDNPVLPFNDGVYFASTEKSNIIRGWIFGTTLDSKTQSLLIVNNATNVVIKVCEFQFCNDPFLGVYYHKNNKSWMESEFRVYSSANNCTFEYVSQPFLMDLEGKQGNFKNLREFVFKNIDGYFKIYSKHTPINLVRDLPQGFSALEPLVDLPIGINITRFQTLLALHRRYLTPGDSSSGWTAGAAAYYVGYLQPRTFLLKYNENGTITDAVDCALDPLSETKCTLKSFTVEKGIYQTSNFRVQPTESIVRFPNITNLCPFGEVFNATRFASVYAWNRKRISNCVADYSVLYNSASFSTFKCYGVSPTKLNDLCFTNVYADSFVIRGDEVRQIAPGQTGKIADYNYKLPDDFTGCVIAWNSNNLDSKVGGNYNYLYRLFRKSNLKPFERDISTEIYQAGSTPCNGVEGFNCYFPLQSYGFQPTNGVGYQPYRVVVLSFELLHAPATVCGPKKSTNLVKNKCVNFNFNGLTGTGVLTESNKKFLPFQQFGRDIADTTDAVRDPQTLEILDITPCSFGGVSVITPGTNTSNQVAVLYQDVNCTEVPVAIHADQLTPTWRVYSTGSNVFQTRAGCLIGAEHVNNSYECDIPIGAGICASYQTQTNSPRRARSVASQSIIAYTMSLGAENSVAYSNNSIAIPTNFTISVTTEILPVSMTKTSVDCTMYICGDSTECSNLLLQYGSFCTQLNRALTGIAVEQDKNTQEVFAQVKQIYKTPPIKDFGGFNFSQILPDPSKPSKRSFIEDLLFNKVTLADAGFIKQYGDCLGDIAARDLICAQKFNGLTVLPPLLTDEMIAQYTSALLAGTITSGWTFGAGAALQIPFAMQMAYRFNGIGVTQNVLYENQKLIANQFNSAIGKIQDSLSSTASALGKLQDVVNQNAQALNTLVKQLSSNCGAISSVLNDILSRLDKVEAEVQIDRLITCRLQSLQTYVTQQLIRAAEIRASANLAATKMSECVLGQSKRVDFCGKGYHLMSFPQSAPHGVVFLHVTYVPAQEKNFTTAPAICHDGKAHFPREGVFVSNGTHWFVTQRNFYEPQIITTDNTFVSGNCDVVIGIVNNTVYDPLQPELDSGGSGYIPEAPRDGQAYVRKDGEWVLLSTFL

SEQ ID NO: 10399 - protein, 1177 aa, Artificial Sequence
  SARS-CoV-2/Germany/BavPat1/2020__EPI_ISL_406862 spike protein (1-1147)(F970C_G999C) Foldon construct
MFVFLVLLPLVSSQCVNLTTRTQLPPAYTNSFTRGVYYPDKVFRSSVLHSTQDLFLPFFSNVTWFHAIHVSGTNGTKRFDNPVLPFNDGVYFASTEKSNIIRGWIFGTTLDSKTQSLLIVNNATNVVIKVCEFQFCNDPFLGVYYHKNNKSWMESEFRVYSSANNCTFEYVSQPFLMDLEGKQGNFKNLREFVFKNIDGYFKIYSKHTPINLVRDLPQGFSALEPLVDLPIGINITRFQTLLALHRSYLTPGDSSSGWTAGAAAYYVGYLQPRTFLLKYNENGTITDAVDCALDPLSETKCTLKSFTVEKGIYQTSNFRVQPTESIVRFPNITNLCPFGEVFNATRFASVYAWNRKRISNCVADYSVLYNSASFSTFKCYGVSPTKLNDLCFTNVYADSFVIRGDEVRQIAPGQTGKIADYNYKLPDDFTGCVIAWNSNNLDSKVGGNYNYLYRLFRKSNLKPFERDISTEIYQAGSTPCNGVEGFNCYFPLQSYGFQPTNGVGYQPYRVVVLSFELLHAPATVCGPKKSTNLVKNKCVNFNFNGLTGTGVLTESNKKFLPFQQFGRDIADTTDAVRDPQTLEILDITPCSFGGVSVITPGTNTSNQVAVLYQGVNCTEVPVAIHADQLTPTWRVYSTGSNVFQTRAGCLIGAEHVNNSYECDIPIGAGICASYQTQTNSPRRARSVASQSIIAYTMSLGAENSVAYSNNSIAIPTNFTISVTTEILPVSMTKTSVDCTMYICGDSTECSNLLLQYGSFCTQLNRALTGIAVEQDKNTQEVFAQVKQIYKTPPIKDFGGFNFSQILPDPSKPSKRSFIEDLLFNKVTLADAGFIKQYGDCLGDIAARDLICAQKFNGLTVLPPLLTDEMIAQYTSALLAGTITSGWTFGAGAALQIPFAMQMAYRFNGIGVTQNVLYENQKLIANQFNSAIGKIQDSLSSTASALGKLQDVVNQNAQALNTLVKQLSSNCGAISSVLNDILSRLDKVEAEVQIDRLITCRLQSLQTYVTQQLIRAAEIRASANLAATKMSECVLGQSKRVDFCGKGYHLMSFPQSAPHGVVFLHVTYVPAQEKNFTTAPAICHDGKAHFPREGVFVSNGTHWFVTQRNFYEPQIITTDNTFVSGNCDVVIGIVNNTVYDPLQPELDSGGSGYIPEAPRDGQAYVRKDGEWVLLSTFL

SEQ ID NO: 10400 - protein, 1177 aa, Artificial Sequence
  SARS-CoV-2/Wuhan/HBCDC-HB-02/2020__EPI_ISL_412978 spike protein (1-1147)(F970C_G999C) Foldon construct
MFVFLVLLPLVSSQCVNLTTRTQLPPAYTNSFTRGVYYPDKVFRSSVLHSTQDLFLPFFSNVTWFHAIHVSGTNGTKRFDNPVLPFNDGVYFASTEKSNIIRGWIFGTTLDSKTQSLLIVNNATNVVIKVCEFQFCNDPFLGVYYHKNNKSWMESEFRVYSSANNCTFEYVSQPFLMDLEGKQGNFKNLREFVFKNIDGYFKIYSKHTPINLVRDLPQGFSALEPLVDLPIGINITRFQTLLALHRSYLTPGDSSSGWTAGAAAYYVGYLQPRTFLLKYNENGTITDAVDCALDPLSETKCTLKSFTVEKGIYQTSNFRVQPTESIVRFPNITNLCPFGEVFNATRFASVYAWNRKRISNCVADYSVLYNSASFSTFKCYGVSPTKLNDLCFTNVYADSFVIRGDEVRQIAPGQTGKIADYNYKLPDDFTGCVIAWNSNNLDSKVGGNYNYLYRLFRKSNLKPFERDISTEIYQAGSTPCNGVEGFNCYFPLQSYGFQPTNGVGYQPYRVVVLSFELLHAPATVCGPKKSTNLVKNKCVNFNFNGLTGTGVLTESNKKFLPFQQFGRDIADTTDAVRDPQTLEILDITPCSFGGVSVITPGTNTSNQVAVLYQDVNCTEVPVAIHADQLTPTWRVYSTGSNVFQTRAGCLIGAEHVNNSYECDIPIGAGICASYQTQTNSPRRARSVASQSIIAYTMSLGAENSVAYSNNSIAIPTNFTISVTTEILPVSMTKTSVDCTMYICGDSTECSNFLLQYGSFCTQLNRALTGIAVEQDKNTQEVFAQVKQIYKTPPIKDFGGFNFSQILPDPSKPSKRSFIEDLLFNKVTLADAGFIKQYGDCLGDIAARDLICAQKFNGLTVLPPLLTDEMIAQYTSALLAGTITSGWTFGAGAALQIPFAMQMAYRFNGIGVTQNVLYENQKLIANQFNSAIGKIQDSLSSTASALGKLQDVVNQNAQALNTLVKQLSSNCGAISSVLNDILSRLDKVEAEVQIDRLITCRLQSLQTYVTQQLIRAAEIRASANLAATKMSECVLGQSKRVDFCGKGYHLMSFPQSAPHGVVFLHVTYVPAQEKNFTTAPAICHDGKAHFPREGVFVSNGTHWFVTQRNFYEPQIITTDNTFVSGNCDVVIGIVNNTVYDPLQPELDSGGSGYIPEAPRDGQAYVRKDGEWVLLSTFL

SEQ ID NO: 10401 - protein, 1177 aa, Artificial Sequence
  SARS-CoV-2/Australia/QLD02/2020__EPI_ISL_407896 spike protein (1-1147)(F970C_G999C) Foldon construct
MFVFLVLLPLVSSQCVNLTTRTQLPPAYTNSFTRGVYYPDKVFRSSVLHSTQDLFLPFFSNVTWFHAIHVSGTNGTKRFDNPVLPFNDGVYFASTEKSNIIRGWIFGTTLDSKTQSLLIVNNATNVVIKVCEFQFCNDPFLGVYYHKNNKSWMESEFRVYSSANNCTFEYVSQPFLMDLEGKQGNFKNLREFVFKNIDGYFKIYSKHTPINLVRDLPQGFSALEPLVDLPIGINITRFQTLLALHRSYLTPGDSSSGWTAGAAAYYVGYLQPRTFLLKYNENGTITDAVDCALDPLSETKCTLKSFTVEKGIYQTSNFRVQPTESIVRFPNITNLCPFGEVFNATRFASVYAWNRKRISNCVADYSVLYNSASFSTFKCYGVSPTKLNDLCFTNVYADSFVIRGDEVRQIAPGQTGKIADYNYKLPDDFTGCVIAWNSNNLDSKVGGNYNYLYRLFRKSNLKPFERDISTEIYQAGSTPCNGVEGFNCYFPLQSYGFQPTNGVGYQPYRVVVLSFELLHAPATVCGPKKSTNLVKNKCVNFNFNGLTGTGVLTESNKKFLPFQQFGRDIADTTDAVRDPQTLEILDITPCSFGGVSVITPGTNTSNQVAVLYQDVNCTEVPVAIHADQLTPTWRVYSTGSNVFQTRAGCLIGAEHVNNSYECDIPIGAGICASYQTQTNSPRRARSVASQSIIAYTMSLGAENSVAYSNNSIAIPTNFTISVTTEILPVSMTKTSVDCTMYICGDSTECSNLLLQYGSFCTQLNRALTGIAVEQDKNTQEVFAQVKQIYKTPPIKDFGGFNFSQILPDPSKPSKRSFIEDLLFNKVTLADAGFIKQYGDCLGDIAARDLICAQKFNGLTVLPPLLTDEMIAQYTSALLAGTITSGWTFGAGAALQIPFAMQMAYRFNGIGVTQNVLYENQKLIANQFNSAIGKIQDSLSSTASALGKLQDVVNQNAQALNTLVKQLSSNCGAISSVLNDILSRLDKVEAEVQIDRLITCRLQSLQTYVTQQLIRAAEIRASANLAATKMSECVLGQSKRVDFCGKGYHLMSFPQSAPHGVVFLHVTYVPAQEKNFTTAPAICHDGKAHFPREGVFVSNGTHWFVTQRNFYEPQIITTDNTFVSGNCDVVIGIVNNTVYDPLQLELDSGGSGYIPEAPRDGQAYVRKDGEWVLLSTFL

SEQ ID NO: 10402 - protein, 1177 aa, Artificial Sequence
  SARS-CoV-2/India/1-31/2020__EPI_ISL_413523 spike protein (1-1147)(F970C_G999C) Foldon construct
MFVFLVLLPLVSSQCVNLTTRTQLPPAYTNSFTRGVYYPDKVFRSSVLHSTQDLFLPFFSNVTWFHAIHVSGTNGTKRFDNPVLPFNDGVYFASTEKSNIIRGWIFGTTLDSKTQSLLIVNNATNVVIKVCEFQFCNDPFLGVYYHKNNKSWMESEFRVYSSANNCTFEYVSQPFLMDLEGKQGNFKNLREFVFKNIDGYFKIYSKHTPINLVRDLPQGFSALEPLVDLPIGINITRFQTLLALHRSYLTPGDSSSGWTAGAAAYYVGYLQPRTFLLKYNENGTITDAVDCALDPLSETKCTLKSFTVEKGIYQTSNFRVQPTESIVRFPNITNLCPFGEVFNATRFASVYAWNRKRISNCVADYSVLYNSASFSTFKCYGVSPTKLNDLCFTNVYADSFVIRGDEVRQIAPGQTGKIADYNYKLPDDFTGCVIAWNSNNLDSKVGGNYNYLYRLFRKSNLKPFERDISTEIYQAGSTPCNGVEGFNCYFPLQSYGFQPTNGVGYQPYRVVVLSFELLHAPATVCGPKKSTNLVKNKCVNFNFNGLTGTGVLTESNKKFLPFQQFGRDIADTTDAVRDPQTLEILDITPCSFGGVSVITPGTNTSNQVAVLYQDVNCTEVPVAIHADQLTPTWRVYSTGSNVFQTRAGCLIGAEHVNNSYECDIPIGAGICASYQTQTNSPRRARSVASQSIIAYTMSLGAENSVAYSNNSIAIPTNFTISVTTEILPVSMTKTSVDCTMYICGDSTECSNLLLQYGSFCTQLNRALTGIAVEQDKNTQEVFAQVKQIYKTPPIKDFGGFNFSQILPDPSKPSKRSFIEDLLFNKVTLADAGFIKQYGDCLGDIAARDLICAQKFNGLTVLPPLLTDEMIAQYTSALLAGTITSGWTFGAGAALQIPFAMQMAYRFNGIGVTQNVLYENQKLIANQFNSVIGKIQDSLSSTASALGKLQDVVNQNAQALNTLVKQLSSNCGAISSVLNDILSRLDKVEAEVQIDRLITCRLQSLQTYVTQQLIRAAEIRASANLAATKMSECVLGQSKRVDFCGKGYHLMSFPQSAPHGVVFLHVTYVPAQEKNFTTAPAICHDGKAHFPREGVFVSNGTHWFVTQRNFYEPQIITTDNTFVSGNCDVVIGIVNNTVYDPLQPELDSGGSGYIPEAPRDGQAYVRKDGEWVLLSTFL

SEQ ID NO: 10403 - protein, 1177 aa, Artificial Sequence
  SARS-CoV-2/Guangdong/GD2020087-P0008/2020__EPI_ISL_413863 spike protein (1-1147)(F970C_G999C) Foldon construct
MFVFLVLLPLVSSQCVNLTTRTQLPPAYTNSFTRGVYYPDKVFRSSVLHSTQDLFLPFFSNVTWFHAIHVSGTNGTKRFDNPVLPFNDGVYFASTEKSNIIRGWIFGTTLDSKTQSLLIVNNATNVVIKVCEFQFCNDPFLGVYYHKNNKSWMESEFRVYSSANNCTFEYVSQPFLMDLEGKQGNFKNLREFVFKNIDGYFKIYSKHTPINLVRDLPQGFSALEPLVDLPIGINITRFQTLLALHRSYLTPGDSSSGWTAGAAAYYVGYLQPRTFLLKYNENGTITDAVDCALDPLSETKCTLKSFTVEKGIYQTSNFRVQPTESIVRFPNITNLCPFGEVFNATRFASVYAWNRKRISNCVADYSVLYNSASFSTFKCYGVSPTKLNDLCFTNVYADSFVIRGDEVREIAPGQTGKIADYNYKLPDDFTGCVIAWNSNNLDSKVGGNYNYLYRLFRKSNLKPFERDISTEIYQAGSTPCNGVEGFNCYFPLQSYGFQPTNGVGYQPYRVVVLSFELLHAPATVCGPKKSTNLVKNKCVNFNFNGLTGTGVLTESNKKFLPFQQFGRDIADTTDAVRDPQTLEILDITPCSFGGVSVITPGTNTSNQVAVLYQDVNCTEVPVAIHADQLTPTWRVYSTGSNVFQTRAGCLIGAEHVNNSYECDIPIGAGICASYQTQTNSPRRARSVASQSIIAYTMSLGAENSVAYSNNSIAIPTNFTISVTTEILPVSMTKTSVDCTMYICGDSTECSNLLLQYGSFCTQLNRALTGIAVEQDKNTQEVFAQVKQIYKTPPIKDFGGFNFSQILPDPSKPSKRSFIEDLLFNKVTLADAGFIKQYGDCLGDIAARDLICAQKFNGLTVLPPLLTDEMIAQYTSALLAGTITSGWTFGAGAALQIPFAMQMAYRFNGIGVTQNVLYENQKLIANQFNSAIGKIQDSLSSTASALGKLQDVVNQNAQALNTLVKQLSSNCGAISSVLNDILSRLDKVEAEVQIDRLITCRLQSLQTYVTQQLIRAAEIRASANLAATKMSECVLGQSKRVDFCGKGYHLMSFPQSAPHGVVFLHVTYVPAQEKNFTTAPAICHDGKAHFPREGVFVSNGTHWFVTQRNFYEPQIITTDNTFVSGNCDVVIGIVNNTVYDPLQPELDSGGSGYIPEAPRDGQAYVRKDGEWVLLSTFL

SEQ ID NO: 10404 - protein, 1177 aa, Artificial Sequence
  SARS-CoV-2/Sweden/01/2020__EPI_ISL_411951 spike protein (1-1147)(F970C_G999C) Foldon construct
MFVFLVLLPLVSSQCVNLTTRTQLPPAYTNSFTRGVYYPDKVFRSSVLHSTQDLFLPFFSNVTWFHAIHVSGTNGTKRFDNPVLPFNDGVYFASTEKSNIIRGWIFGTTLDSKTQSLLIVNNATNVVIKVCEFQFCNDPFLGVYYHKNNKSWMESEFRVYSSANNCTFEYVSQPFLMDLEGKQGNFKNLREFVFKNIDGYFKIYSKHTPINLVRDLPQGFSALEPLVDLPIGINITRFQTLLALHRSYLTPGDSSSGWTAGAAAYYVGYLQPRTFLLKYNENGTITDAVDCALDPLSETKCTLKSFTVEKGIYQTSNFRVQPTESIVRFPNITNLCPFGEVFNATRFASVYAWNRKRISNCVADYSVLYNSASFSTFKCYGVSPTKLNDLCFTNVYADSFVIRGDEVRQIAPGQTGKIADYNYKLPDDFTGCVIAWNSNNLDSKVGGNYNYLYRLFRKSNLKPFERDISTEIYQAGSTPCNGVEGFNCYFPLQSYGFQPTNGVGYQPYRVVVLSFELLHAPATVCGPKKSTNLVKNKCVNFNFNGLTGTGVLTESNKKFLPFQQFGRDIADTTDAVRDPQTLEILDITPCSFGGVSVITPGTNTSNQVAVLYQDVNCTEVPVAIHADQLTPTWRVYSTGSNVFQTRAGCLIGAEHVNNSYECDIPIGAGICASYQTQTNSPRRARSVASQSIIAYTMSLGAENSVAYSNNSIAIPTNFTISVTTEILPVSMTKTSVDCTMYICGDSTECSNLLLQYGSFCTQLNRALTGIAVEQDKNTQEVFAQVKQIYKTPPIKDCGGFNFSQILPDPSKPSKRSFIEDLLFNKVTLADAGFIKQYGDCLGDIAARDLICAQKFNGLTVLPPLLTDEMIAQYTSALLAGTITSGWTFGAGAALQIPFAMQMAYRFNGIGVTQNVLYENQKLIANQFNSAIGKIQDSLSSTASALGKLQDVVNQNAQALNTLVKQLSSNCGAISSVLNDILSRLDKVEAEVQIDRLITCRLQSLQTYVTQQLIRAAEIRASANLAATKMSECVLGQSKRVDFCGKGYHLMSFPQSAPHGVVFLHVTYVPAQEKNFTTAPAICHDGKAHFPREGVFVSNGTHWFVTQRNFYEPQIITTDNTFVSGNCDVVIGIVNNTVYDPLQPELDSGGSGYIPEAPRDGQAYVRKDGEWVLLSTFL

SEQ ID NO: 10405 - protein, 1177 aa, Artificial Sequence
  SARS-CoV-2/Tianmen/HBCDC-HB-07/2020__EPI_ISL_412983 spike protein (1-1147)(F970C_G999C) Foldon construct
MFVFLVLLPLVSSQCVNLTTRTQLPPAYTNSFTRGVYYPDKVFRSSVLHSTQDLFLPFFSNVTWFHAIHVSGTNGTKRFDNPVLPFNDGVYFASTEKSNIIRGWIFGTTLDSKTQSLLIVNNATNVVIKVCEFQFCNDPFLGVYYHKNNKSWMESEFRVYSSANNCTFEYVSQPFLMDLEGKQGNFKNLREFVFKNIDGYFKIYSKHTPINLVRDLPQGFSALEPLVDLPIGINITRFQTLLALHRSYLTPGDSSSGWTAGAAAYYVGYLQPRTFLLKYNENGTITDAVDCALDPLSETKCTLKSFTVEKGIYQTSNFRVQPTESIVRFPNITNLCPFGEVFNATRFASVYAWNRKRISNCVADYSVLYNSASFSTFKCYGVSPTKLNDLCFTNVYADSFVIRGDEVRQIAPGQTGKIADYNYKLPDDFTGCVIAWNSNNLDSKVGGNYNYLYRLFRKSNLKPFERDISTEIYQAGSTPCNGVEGFNCYFPLQSYGFQPTNGVGYQPYRVVVLSFELLHAPATVCGPKKSTNLVKNKCVNFNFNGLTGTGVLTESNKKFLPFQQFGRDIADTTDAVRDPQTLEILDITPCSFGGVSVITPGTNTSNQVAVLYQDLNCTEVPVAIHADQLTPTWRVYSTGSNVFQTRAGCLIGAEHVNNSYECDIPIGAGICASYQTQTNSPRRARSVASQSIIAYTMSLGAENSVAYSNNSIAIPTNFTISVTTEILPVSMTKTSVDCTMYICGDSTECSNLLLQYGSFCTQLNRALTGIAVEQDKNTQEVFAQVKQIYKTPPIKDFGGFNFSQILPDPSKPSKRSFIEDLLFNKVTLADAGFIKQYGDCLGDIAARDLICAQKFNGLTVLPPLLTDEMIAQYTSALLAGTITSGWTFGAGAALQIPFAMQMAYRFNGIGVTQNVLYENQKLIANQFNSAIGKIQDSLSSTASALGKLQDVVNQNAQALNTLVKQLSSNCGAISSVLNDILSRLDKVEAEVQIDRLITCRLQSLQTYVTQQLIRAAEIRASANLAATKMSECVLGQSKRVDFCGKGYHLMSFPQSAPHGVVFLHVTYVPAQEKNFTTAPAICHDGKAHFPREGVFVSNGTHWFVTQRNFYEPQIITTDNTFVSGNCDVVIGIVNNTVYDPLQPELDSGGSGYIPEAPRDGQAYVRKDGEWVLLSTFL

SEQ ID NO: 10406 - protein, 1177 aa, Artificial Sequence
  SARS-CoV-2/Hong Kong/case42_VM20002493/2020__EPI_ISL_414527 spike protein (1-1147)(F970C_G999C) Foldon construct
MFVFLVLLPLVSSQCVNLTTRTQLPPAYTNSFTRGVYYPDKVFRSSVLHSTQDLFLPFFSNVTWFHAIHVSGTNGTKRFDNPVLPFNDGVYFASTEKSNIIRGWIFGTTLDSKTQSLLIVNNATNVVIKVCEFQFCNDPFLGVYYHKNNKSWMESEFRVYSSANNCTFEYVSQPFLMDLEGKQGNFKNLREFVFKNIDGYFKIYSKHTPINLVRDLPQGFSALEPLVDLPIGINITRFQTLLALHRSYLTPGDSSSGWTAGAAAYYVGYLQPRTFLLKYNENGTITDAVDCALDPLSETKCTLKSFTVEKGIYQTSNFRVQPTESIVRFPNITNLCPFGEVFNATRFASVYAWNRKRISNCVADYSVLYNSASFSTFKCYGVSPTKLNDLCFTNVYADSFVIRGDEVRQIAPGQTGKIADYNYKLPDDFTGCVIAWNSNNLDSKVGGNYNYLYRLFRKSNLKPFERDISTEIYQAGSTPCNGVEGFNCYFPLQSYGFQPTNGVGYQPYRVVVLSFELLHAPATVCGPKKSTNLVKNKCVNFNFNGLTGTGVLTESNKKFLPFQQFGRDIADTTDAVRDPQTLEILDITPCSFGGVSVITPGTNTSNQVAVLYQDVNCTEVPVAIHADQLTPTWRVYSTGSNVFQTRAGCLIGAEHVNNSYECDIPIGAGICASYQTQTNSPRRARSVASQSIIAYTMSLGAENSVAYSNNSIAIPTNFAISVTTEILPVSMTKTSVDCTMYICGDSTECSNLLLQYGSFCTQLNRALTGIAVEQDKNTQEVFAQVKQIYKTPPIKDFGGFNFSQILPDPSKPSKRSFIEDLLFNKVTLADAGFIKQYGDCLGDIAARDLICAQKFNGLTVLPPLLTDEMIAQYTSALLAGTITSGWTFGAGAALQIPFAMQMAYRFNGIGVTQNVLYENQKLIANQFNSAIGKIQDSLSSTASALGKLQDVVNQNAQALNTLVKQLSSNCGAISSVLNDILSRLDKVEAEVQIDRLITCRLQSLQTYVTQQLIRAAEIRASANLAATKMSECVLGQSKRVDFCGKGYHLMSFPQSAPHGVVFLHVTYVPAQEKNFTTAPAICHDGKAHFPREGVFVSNGTHWFVTQRNFYEPQIITTDNTFVSGNCDVVIGIVNNTVYDPLQPELDSGGSGYIPEAPRDGQAYVRKDGEWVLLSTFL

SEQ ID NO: 10407 - protein, 1177 aa, Artificial Sequence
  SARS-CoV-2/USA/CruiseA-23/2020__EPI_ISL_414482 spike protein (1-1147)(F970C_G999C) Foldon construct
MFVFLVLLPLVSSQCVNLTTRTQLPPAYTNSFTRGVYYPDKVFRSSVLHSTQDLFLPFFSNVTWFHAIHVSGTNGTKRFDNPVLPFNDGVYFASTEKSNIIRGWIFGTTLDSKTQSLLIVNNATNVVIKVCEFQFCNDPFLGVYYHKNNKSWMESEFRVYSSANNCTFEYVSQPFLMDLEVKQGNFKNLREFVFKNIDGYFKIYSKHTPINLVRDLPQGFSALEPLVDLPIGINITRFQTLLALHRSYLTPGDSSSGWTAGAAAYYVGYLQPRTFLLKYNENGTITDAVDCALDPLSETKCTLKSFTVEKGIYQTSNFRVQPTESIVRFPNITNLCPFGEVFNATRFASVYAWNRKRISNCVADYSVLYNSASFSTFKCYGVSPTKLNDLCFTNVYADSFVIRGDEVRQIAPGQTGKIADYNYKLPDDFTGCVIAWNSNNLDSKVGGNYNYLYRLFRKSNLKPFERDISTEIYQAGSTPCNGVEGFNCYFPLQSYGFQPTNGVGYQPYRVVVLSFELLHAPATVCGPKKSTNLVKNKCVNFNFNGLTGTGVLTESNKKFLPFQQFGRDIADTTDAVRDPQTLEILDITPCSFGGVSVITPGTNTSNQVAVLYQDVNCTEVPVAIHADQLTPTWRVYSTGSNVFQTRAGCLIGAEHVNNSYECDIPIGAGICASYQTQTNSPRRARSVASQSIIAYTMSLGAENSVAYSNNSIAIPTNFTISVTTEILPVSMTKTSVDCTMYICGDSTECSNLLLQYGSFCTQLNRALTGIAVEQDKNTQEVFAQVKQIYKTPPIKDFGGFNFSQILPDPSKPSKRSFIEDLLFNKVTLADAGFIKQYGDCLGDIAARDLICAQKFNGLTVLPPLLTDEMIAQYTSALLAGTITSGWTFGAGAALQIPFAMQMAYRFNGIGVTQNVLYENQKLIANQFNSAIGKIQDSLSSTASALGKLQDVVNQNAQALNTLVKQLSSNCGAISSVLNDILSRLDKVEAEVQIDRLITCRLQSLQTYVTQQLIRAAEIRASANLAATKMSECVLGQSKRVDFCGKGYHLMSFPQSAPHGVVFLHVTYVPAQEKNFTTAPAICHDGKAHFPREGVFVSNGTHWFVTQRNFYEPQIITTDNTFVSGNCDVVIGIVNNTVYDPLQPELDSGGSGYIPEAPRDGQAYVRKDGEWVLLSTFL

SEQ ID NO: 10408 - protein, 1177 aa, Artificial Sequence
  SARS-CoV-2/Hong Kong/case85_VM20002868/2020__EPI_ISL_414519 spike protein (1-1147)(F970C_G999C) Foldon construct
MFVFLVLVPLVSSQCVNLTTRTQLPPAYTNSFTRGVYYPDKVFRSSVLHSTQDLFLPFFSNVTWFHAIHVSGTNGTKRFDNPVLPFNDGVYFASTEKSNIIRGWIFGTTLDSKTQSLLIVNNATNVVIKVCEFQFCNDPFLGVYYHKNNKSWMESEFRVYSSANNCTFEYVSQPFLMDLEGKQGNFKNLREFVFKNIDGYFKIYSKHTPINLVRDLPQGFSALEPLVDLPIGINITRFQTLLALHRSYLTPGDSSSGWTAGAAAYYVGYLQPRTFLLKYNENGTITDAVDCALDPLSETKCTLKSFTVEKGIYQTSNFRVQPTESIVRFPNITNLCPFGEVFNATRFASVYAWNRKRISNCVADYSVLYNSASFSTFKCYGVSPTKLNDLCFTNVYADSFVIRGDEVRQIAPGQTGKIADYNYKLPDDFTGCVIAWNSNNLDSKVGGNYNYLYRLFRKSNLKPFERDISTEIYQAGSTPCNGVEGFNCYFPLQSYGFQPTNGVGYQPYRVVVLSFELLHAPATVCGPKKSTNLVKNKCVNFNFNGLTGTGVLTESNKKFLPFQQFGRDIADTTDAVRDPQTLEILDITPCSFGGVSVITPGTNTSNQVAVLYQDVNCTEVPVAIHADQLTPTWRVYSTGSNVFQTRAGCLIGAEHVNNSYECDIPIGAGICASYQTQTNSPRRARSVASQSIIAYTMSLGAENSVAYSNNSIAIPTNFTISVTTEILPVSMTKTSVDCTMYICGDSTECSNLLLQYGSFCTQLNRALTGIAVEQDKNTQEVFAQVKQIYKTPPIKDFGGFNFSQILPDPSKPSKRSFIEDLLFNKVTLADAGFIKQYGDCLGDIAARDLICAQKFNGLTVLPPLLTDEMIAQYTSALLAGTITSGWTFGAGAALQIPFAMQMAYRFNGIGVTQNVLYENQKLIANQFNSAIGKIQDSLSSTASALGKLQDVVNQNAQALNTLVKQLSSNCGAISSVLNDILSRLDKVEAEVQIDRLITCRLQSLQTYVTQQLIRAAEIRASANLAATKMSECVLGQSKRVDFCGKGYHLMSFPQSAPHGVVFLHVTYVPAQEKNFTTAPAICHDGKAHFPREGVFVSNGTHWFVTQRNFYEPQIITTDNTFVSGNCDVVIGIVNNTVYDPLQPELDSGGSGYIPEAPRDGQAYVRKDGEWVLLSTFL

SEQ ID NO: 10409 - protein, 1177 aa, Artificial Sequence; identical to SEQ ID NO: 10399
  SARS-CoV-2/England/200990660/2020__EPI_ISL_414523 spike protein (1-1147)(F970C_G999C) Foldon construct

SEQ ID NO: 10410 - protein, 1177 aa, Artificial Sequence
  SARS-CoV-2/Australia/NSW09/2020__EPI_ISL_413595 spike protein (1-1147)(F970C_G999C) Foldon construct
MFVFLVLLPLVSSQCVNLTTRTQLPPAYTNSFTRGVYYPDKVFRSSVLHSTQDLFLPFFSNVTWFHAIHVSGTNGTKRFDNPVLPFNDGVYFASTEKSNIIRGWIFGTTLDSKTQSLLIVNNATNVVIKVCEFQFCNDPFLGVYYHKNNKSWMESEFRVYSSANNCTFEYVSQPFLMDLEGKQGNFKNLREFVFKNIDGYFKIYSKHTPINLVRDLPQGFSALEPLVDLPIGINITRFQTLLALHRSYLTPGDSSSGWTAGAAAYYVGYLQPRTFLLKYNENGTITDAVDCALDPLSETKCTLKSFTVEKGIYQTSNFRVQPTESIVRFPNITNLCPFGEVFNATRFASVYAWNRKRISNCVADYSVLYNSASFSTFKCYGVSPTKLNDLCFTNVYADSFVIRGDEVRQIAPGQTGKIADYNYKLPDDFTGCVIAWNSNNLDSKVGGNYNYLYRLFRKSNLKPFERDISTEIYQAGSTPCNGVEGFNCYFPLQSYGFQPTNGVGYQPYRVVVLSFELLHAPATVCGPKKSTNLVKNKCVNFNFNGLTGTGVLTESNKKFLPFQQFGRDIADTTDAVRDPQTLEILDITPCSFGGVSVITPGTNTSNQVAVLYQDVNCTEVPVAIHADQLTPTWRVYSTGSNVFQTRAGCLIGAEHVNNSYECDIPIGAGICASYQTQTNSPRRARSVASQSIIAYTMSLGAENSVAYSNNSIAIPTNFTISVTTEILPVSMTKTSVDCTMYICGDSTECSNLLLQYGSFCTQLNRALTGIAVEQDKNTQEVFAQVKQIYKTPPIKDFGGFNFSQILPDPSKPSKRSFIEDLLFNKVTLADAGFIKQYGDCLGDIAARDLICAQKFNGLTVLPPLLTDEMIAQYTSALLAGTITSGWTFGAGAALQIPFAMQMAYRFNGIGVTQNVLYENQKLIANQFNSAIGKIQDSLSFTASALGKLQDVVNQNAQALNTLVKQLSSNCGAISSVLNDILSRLDKVEAEVQIDRLITCRLQSLQTYVTQQLIRAAEIRASANLAATKMSECVLGQSKRVDFCGKGYHLMSFPQSAPHGVVFLHVTYVPAQEKNFTTAPAICHDGKAHFPREGVFVSNGTHWFVTQRNFYEPQIITTDNTFVSGNCDVVIGIVNNTVYDPLQPELDSGGSGYIPEAPRDGQAYVRKDGEWVLLSTFL

SEQ ID NO: 10411 - protein, 1177 aa, Artificial Sequence; identical to SEQ ID NO: 10391
  SARS-CoV-2/Australia/NSW10/2020__EPI_ISL_413596 spike protein (1-1147)(F970C_G999C) Foldon construct

SEQ ID NO: 10412 - protein, 1177 aa, Artificial Sequence
  SARS-CoV-2/Switzerland/1000477797/2020__EPI_ISL_413023 spike protein (1-1147)(F970C_G999C) Foldon construct
MFVFLVLLPLVSSQCVNLTTRTQLPPAYTNSFTRGVYYPDKVFRSSVLHSTQDLFLPFFSNVTWFHAIHVSGTNGTKRFDNPVLPFNDGVYFASTEKSNIIRGWIFGTTLDSKTQSLLIVNNATNVVIKVCEFQFCNDPFLGVYYHKNNKSWMESEFRVYSSANNCTFEYVSQPFLMDLEGKQGNFKNLREFVFKNIDGYFNIYSKHTPINLVRDLPQGFSALEPLVDLPIGINITRFQTLLALHRSYLTPGDSSSGWTAGAAAYYVGYLQPRTFLLKYNENGTITDAVDCALDPLSETKCTLKSFTVEKGIYQTSNFRVQPTESIVRFPNITNLCPFGEVFNATRFASVYAWNRKRISNCVADYSVLYNSASFSTFKCYGVSPTKLNDLCFTNVYADSFVIRGDEVRQIAPGQTGKIADYNYKLPDDFTGCVIAWNSNNLDSKVGGNYNYLYRLFRKSNLKPFERDISTEIYQAGSTPCNGVEGFNCYFPLQSYGFQPTNGVGYQPYRVVVLSFELLHAPATVCGPKKSTNLVKNKCVNFNFNGLTGTGVLTESNKKFLPFQQFGRDIADTTDAVRDPQTLEILDITPCSFGGVSVITPGTNTSNQVAVLYQGVNCTEVPVAIHADQLTPTWRVYSTGSNVFQTRAGCLIGAEHVNNSYECDIPIGAGICASYQTQTNSPRRARSVASQSIIAYTMSLGAENSVAYSNNSIAIPTNFTISVTTEILPVSMTKTSVDCTMYICGDSTECSNLLLQYGSFCTQLNRALTGIAVEQDKNTQEVFAQVKQIYKTPPIKDFGGFNFSQILPDPSKPSKRSFIEDLLFNKVTLADAGFIKQYGDCLGDIAARDLICAQKFNGLTVLPPLLTDEMIAQYTSALLAGTITSGWTFGAGAALQIPFAMQMAYRFNGIGVTQNVLYENQKLIANQFNSAIGKIQDSLSSTASALGKLQDVVNQNAQALNTLVKQLSSNCGAISSVLNDILSRLDKVEAEVQIDRLITCRLQSLQTYVTQQLIRAAEIRASANLAATKMSECVLGQSKRVDFCGKGYHLMSFPQSAPHGVVFLHVTYVPAQEKNFTTAPAICHDGKAHFPREGVFVSNGTHWFVTQRNFYEPQIITTDNTFVSGNCDVVIGIVNNTVYDPLQPELDSGGSGYIPEAPRDGQAYVRKDGEWVLLSTFL

SEQ ID NO: 10413 - protein, 1177 aa, Artificial Sequence
  SARS-CoV-2/Belgium/BA-02291/2020__EPI_ISL_415159 spike protein (1-1147)(F970C_G999C) Foldon construct
MFVFLVLLPLVSSQCVNLTTRTQLPPAYTNSFTRGVYYPDKVFRSSVLHSTQDLFLPFFSNVTWFHAIHVSGTNGTKRFDNPVLPFNDGVYFASTEKSNIIRGWIFGTTLDSKTQSLLIVNNATNVVIKVCEFQFCNDPFLGVYYHKNNKSWMESEFRVYSSANNCTFEYVSQPFLMDLEGKQGNFKNLREFVFKNIDGYFKIYSKHTPINLVRDLPQGFSALEPLVDLPIGINITRFQTLLALHRSYLTPGDSSSGWTAGAAAYYVGYLQPRTFLLKYNENGTITDAVDCALDPLSETKCTLKSFTVEKGIYQTSNFRVQPTESIVRFPNITNLCPFGEVFNATRFASVYAWNRKRISNCVADYSVLYNSASFSTFKCYGVSPTKLNDLCFTNVYADSFVIRGDEVRQIAPGQTGKIADYNYKLPDDFTGCVIAWNSNNLDSKVGGNYNYLYRLFRRSNLKPFERDISTEIYQAGSTPCNGVEGFNCYFPLQSYGFQPTNGVGYQPYRVVVLSFELLPAPATVCGPKKSTNLVKNKCVNFNFNGLTGTGVLTESNKKFLPFQQFGRDIADTTDAVRDPQTLEILDITPCSFGGVSVITPGTNTSNQVAVLYQGVNCTEVPVAIHADQLTPTWRVYSTGSNVFQTRAGCLIGAEHVNNSYECDIPIGAGICASYQTQTNSPRRARSVASQSIIAYTMSLGAENSVAYSNNSIAIPTNFTISVTTEILPVSMTKTSVDCTMYICGDSTECSNLLLQYGSFCTQLNRALTGIAVEQDKNTQEVFAQVKQIYKTPPIKDFGGFNFSQILPDPSKPSKRSFIEDLLFNKVTLADAGFIKQYGDCLGDIAARDLICAQKFNGLTVLPPLLTDEMIAQYTSALLAGTITSGWTFGAGAALQIPFAMQMAYRFNGIGVTQNVLYENQKLIANQFNSAIGKIQDSLSSAAPALGKLQDVVNQNAQALNTLVKQLSSNCGAISSVLNDILSRLDKVEAEVQIDRLITCRLQSLQTYVTQQLIRAAEIRASANLAATKMSECVLGQSKRVDFCGKGYHLMSFPQSAPHGVVFLHVTYVPAQEKNFTTAPAICHDGKAHFPREGVFVSNGTHWFVTQRNFYEPQIITTDNTFVSGNCDVVIGIVNNTVYDPLQPELDSGGSGYIPEAPRDGQAYVRKDGEWVLLSTFL

SEQ ID NO: 10414 - protein, 1177 aa, Artificial Sequence
  SARS-CoV-2/USA/WA8-UW5/2020__EPI_ISL_413486 spike protein (1-1147)(F970C_G999C) Foldon construct
MFVFLVLLPLVSSQCVNLTTRTQLPPAYTNSFTRGVYYPDKVFRSSVLHSTQDLFLPFFSNVTWFHAIHVSGTNGTKRFDNPVLPFNDGVYFASTEKSNIIRGWIFGTTLDSKTQSLLIVNNATNVVIKVCEFQFCNDPFLGVYYHKNNKSWMESEFRVYSSANNCTFEYVSQPFLMDLEGKQGNFKNLREFVFKNIDGYFKIYSKHTPINLVRDLPQGFSALEPLVDLPIGINITRFQTLLALHRSYLTPGDSSSGWTAGAAAYYVGYLQPRTFLLKYNENGTITDAVDCALDPLSETKCTLKSFTVEKGIYQTSNFRVQPTESIVRFPNITNLCPFGEVFNATRFASVYAWNRKRISNCVADYSVLYNSASFSTFKCYGVSPTKLNDLCFTNVYADSFVIRGDEVRQIAPGQTGKIADYNYKLPDDFTGCVIAWNSNNLDSKVGGNYNYLYRLFRKSNLKPFERDISTEIYQAGSTPCNGVEGFNCYFPLQSYGFQPTNGVGYQPYRVVVLSFELLHAPATVCGPKKSTNLVKNKCVNFNFNGLTGTGVLTESNKKFLPFQQFGRDIADTTDAVRDPQTLEILDITPCSFGGVSVITPGTNTSNQVAVLYQDVNCTEVPVAIHADQLTPTWRVYSTGSNVFQTRAGCLIGAEYVNNSYECDIPIGAGICASYQTQTNSPRRARSVASQSIIAYTMSLGAENSVAYSNNSIAIPTNFTISVTTEILPVSMTKTSVDCTMYICGDSTECSNLLLQYGSFCTQLNRALTGIAVEQDKNTQEVFAQVKQIYKTPPIKDFGGFNFSQILPDPSKPSKRSFIEDLLFNKVTLADAGFIKQYGDCLGDIAARDLICAQKFNGLTVLPPLLTDEMIAQYTSALLAGTITSGWTFGAGAALQIPFAMQMAYRFNGIGVTQNVLYENQKLIANQFNSAIGKIQDSLSSTASALGKLQDVVNQNAQALNTLVKQLSSNCGAISSVLNDILSRLDKVEAEVQIDRLITCRLQSLQTYVTQQLIRAAEIRASANLAATKMSECVLGQSKRVDFCGKGYHLMSFPQSAPHGVVFLHVTYVPAQEKNFTTAPAICHDGKAHFPREGVFVSNGTHWFVTQRNFYEPQIITTDNTFVSGNCDVVIGIVNNTVYDPLQPELDSGGSGYIPEAPRDGQAYVRKDGEWVLLSTFL

SEQ ID NO: 10415 - protein, 1177 aa, Artificial Sequence
  SARS-CoV-2/England/20102000506/2020__EPI_ISL_415147 spike protein (1-1147)(F970C_G999C) Foldon construct
MFVFLVLLPLVSSQCVNLTTRTQLPPAYTNSFTRGVYYPDKVFRSSVLHSTQDLFLPFFSNVTWFHAIHVSGTNGTKRFDNPVLPFNDGVYFASTEKSNIIRGWIFGTTLDSKTQSLLIVNNATNVVIKVCEFQFCNDPFLGVYYHKNNKSWMESEFRVYSSANNCTFEYVSQPFLMDLEGKQGNFKNLREFVFKNIDGYFKIYSKHTPINLVRDLPQGFSALEPLVDLPIGINITRFQTLLALHRSYLTPGDSSSGWTAGAAAYYVGYLQPRTFLLKYNENGTITDAVDCALDPLSETKCTLKSFTVEKGIYQTSNFRVQPTESIVRFPNITNLCPFGEVFNATRFASVYAWNRKRISNCVADYSVLYNSASFSTFKCYGVSPTKLNDLCFTNVYADSFVIRGDEVRQIAPGQTGKIADYNYKLPDDFTGCVIAWNSNNLDSKVGGNYNYLYRLFRKSNLKPFERDISTEIYQAGSTPCNGVEGFNCYFPLQSYGFQPTNGVGYQPYRVVVLSFELLHAPATVCGPKKSTNLVKNKCVNFNFNGLTGTGVLTESNKKFLPFQQFGRDIADTTDAVRDPQTLEILDITPCSFGGVSVITPGTNTSNQVAVLYQGVNCTEVPVAIHADQLTPTWRVYSTGSNVFQTRAGCLIGAEHVNNSYECDIPIGAGICASYQTQTNSPRRARSVASQSIIAYTMSLGAENSVAYSNNSIAIPTNFTISVTTEILPVSMTKTSVDCTMYICGDSTECSNLLLQYGSFCTQLNRALTGIAVEQDKNTQEVFAQVKQIYKTPPIKDFGGFNFSQILPDPSKPSKRSFIEDLLFNKVTLADAGFIKQYGYCLGDIAARDLICAQKFNGLTVLPPLLTDEMIAQYTSALLAGTITSGWTFGAGAALQIPFAMQMAYRFNGIGVTQNVLYENQKLIANQFNSAIGKIQDSLSSTASALGKLQDVVNQNAQALNTLVKQLSSNCGAISSVLNDILSRLDKVEAEVQIDRLITCRLQSLQTYVTQQLIRAAEIRASANLAATKMSECVLGQSKRVDFCGKGYHLMSFPQSAPHGVVFLHVTYVPAQEKNFTTAPAICHDGKAHFPREGVFVSNGTHWFVTQRNFYEPQIITTDNTFVSGNCDVVIGIVNNTVYDPLQPELDSGGSGYIPEAPRDGQAYVRKDGEWVLLSTFL

SEQ ID NO: 10416 - protein, 1177 aa, Artificial Sequence
  SARS-CoV-2/Belgium/VAG-03013/2020__EPI_ISL_415155 spike protein (1-1147)(F970C_G999C) Foldon construct
MFVFLVLLPLVSSQCVNLTTRTQLPPAYTNSFTRGVYYPDKVFRSSVLHSTQDLFLPFFSNVTWFHAIHVSGTNGTKRFDNPVLPFNDGVYFASTEKSNIIRGWIFGTTLDSKTQSLLIVNNATNVVIKVCEFQFCNDPFLGVYYHKNNKSWMESEFRVYSSANNCTFEYVSQPFLMDLEGKQGNFKNLREFVFKNIDGYFKIYSKHTPINLVRDLPQGFSALEPLVDLPIGINITRFQTLLALHRSYLTPGDSSSGWTAGAAAYYVGYLQPRTFLLKYNENGTITDAVDCALDPLSETKCTLKSFTVEKGIYQTSNFRVQPTESIVRFPNITNLCPFGEVFNATRFASVYAWNRKRISNCVADYSVLYNSASFSTFKCYGVSPTKLNDLCFTNVYADSFVIRGDEVRQIAPGQTGKIADYNYKLPDDFTGCVIAWNSNNLDSKVGGNYNYLYRLFRKSNLKPFERDISTEIYQAGSTPCNGVEGFNCYFPLQSYGFQPTNGVGYQPYRVVVLSFELLHAPATVCGPKKSTNLVKNKCVNFNFNGLTGTGVLTESNKKFLPFQQFGRDIADTTDAVRDPQTLEILDITPCSFGGVSVITPGTNTSNQVAVLYQGVNCTEVPVAIHADQLTPTWRVYSTGSNVFQTRAGCLIGAEHVNNSYECDIPIGAGICASYQTQTNSPRRARSVASQSIIAYTMSLGAENSVAYSNNSIAIPTNFTISVTTEILPVSMTKTSVDCTMYICGDSTECSNLLLQYGSFCTQLNRALTGIAVEQDKNTQEVFAQVKQIYKTPPIKDFGGFNFSQILPDPSKPSKRSFIEDLLFNKVTLADAGFIKQYGDCLGDIAARDLICAQKFNGLTVLPPLLTDEMIAQYTSALLAGTITSGWTFGAGAALQIPFAMQMAYRFNGIGVTQNVLYENQKLIANQFNSAIGKIQDSLSSTATALGKLQDVVNQNAQALNTLVKQLSSNCGAISSVLNDILSRLDKVEAEVQIDRLITCRLQSLQTYVTQQLIRAAEIRASANLAATKMSECVLGQSKRVDFCGKGYHLMSFPQSAPHGVVFLHVTYVPAQEKNFTTAPAICHDGKAHFPREGVFVSNGTHWFVTQRNFYEPQIITTDNTFVSGNCDVVIGIVNNTVYDPLQPELDSGGSGYIPEAPRDGQAYVRKDGEWVLLSTFL

SEQ ID NO: 10417 - protein, 1177 aa, Artificial Sequence
  SARS-CoV-2/Belgium/BC-03016/2020__EPI_ISL_415157 spike protein (1-1147)(F970C_G999C) Foldon construct
MFVFLVLLPLVSSQCVNLTTRTQLPPAYTNSFTRGVYYPDKVFRSSVLHSTQDLFLPFFSNVTWFHAIHVSGTNGTKRFDNPVLPFNDGVYFASTEKSNIIRGWIFGTTLDSKTQSLLIVNNATNVVIKVCEFQFCNDPFLGVYYHKNNKSWMESEFRVYSSANNCTFEYVSQPFLMDLEGKQGNFKNLREFVFKNIDGYFKIYSKHTPINLVRDLPQGFSALEPLVDLPIGINITRFQTLLALHRSYLTPGDSSSGWTAGAAAYYVGYLQPRTFLLKYNENGTITDAVDCALDPLSETKCTLKSFTVEKGIYQTSNFRVQPTESIVRFPNITNLCPFGEVFNATRFASVYAWNRKRISNCVADYSVLYNSASFSTFKCYGVSPTKLNDLCFTNVYADSFVIRGDEVRQIAPGQTGKIADYNYKLPDDFTGCVIAWNSNNLDSKVGGNYNYLYRLFRKSNLKPFERDISTEIYQAGSTPCNGVEGFNCYFPLQSYGFQPTNGVGYQPYRVVVLSFELLHAPATVCGPKKSTNLVKNKCVNFNFNGLTGTGVLTESNKKFLPFQQFGRDIADTTDAVRDPQTLEILDITPCSFGGVSVITPGTNTSNQVAVLYQGVNCTEVPVAIHADQLTPTWRVYSTGSNVFQTRAGCLIGAEHVNNSYECDIPIGAGICASYQTQTNSPRRARSVASQSIIAYTMSLGAENSVAYSNNSIAIPTNFTISVTTEILPVSMTKTSVDCTMYICGDSTECSNLLLQYGSFCTQLNRALTGIAVEQDKNTQEVFAQVKQIYKTPPIKDFGGFNFSQILPDPSKPSKRSFIEDLLFNKVTLADAGFIKQYGDCLGDIAARDLICAQKFNGLTVLPPLLTDEMIAQYTSALLAGTITSGWTFGAGAALQIPFAMQMAYRFNGIGVTQNVLYENQKLIANQFNSAIGKIQDSLSSTAPALGKLQDVVNQNAQALNTLVKQLSSNCGAISSVLNDILSRLDKVEAEVQIDRLITCRLQSLQTYVTQQLIRAAEIRASANLAATKMSECVLGQSKRVDFCGKGYHLMSFPQSAPHGVVFLHVTYVPAQEKNFTTAPAICHDGKAHFPREGVFVSNGTHWFVTQRNFYEPQIITTDNTFVSGNCDVVIGIVNNTVYDPLQPELDSGGSGYIPEAPRDGQAYVRKDGEWVLLSTFL

SEQ ID NO: 10418 - protein, 1177 aa, Artificial Sequence
  SARS-CoV-2/Germany/BavPat3/2020__EPI_ISL_414521 spike protein (1-1147)(F970C_G999C) Foldon construct
MFVFLVLLPLVSSQCVNLTTRTQLPPAYTNSFTRGVYYPDKVFRSSVLHSTQDLFLPFFSNVTWFHAIHVSGTNGTKRFDNPVLPFNDGVYFASTEKSNIIRGWIFGTTLDSKTQSLLIVNNATNVVIKVCEFQFCNDPFLGVYYHKNNKSWMESEFRVYSSANNCTFEYVSQPFLMDLEGKQGNFKNLREFVFKNIDGYFKIYSKHTPINLVRDLPQGFSALEPLVDLPIGINITRFQTLLALHRSYLTPGDSSSGWTAGAAAYYVGYLQPRTFLLKYNENGTITDAVDCALDPLSETKCTLKSFTVEKGIYQTSNFRVQPTESIVRFPNITNLCPFGEVFNATRFASVYAWNRKRISNCVADYSVLYNSASFSTFKCYGVSPTKLNDLCFTNVYADSFVIRGDEVRQIAPGQTGKIADYNYKLPDDFTGCVIAWNSNNLDSKVGGNYNYLYRLFRKSNLKPFERDISTEIYQAGSTPCNGVEGFNCYFPLQSYGFQPTNGVGYQPYRVVVLSFELLHAPATVCGPKKSTNLVKNKCVNFNFNGLTGTGVLTESNKKFLPFQQFGRDIADTTDAVRDPQTLEILDITPCSFGGVSVITPGTNTSNQVAVLYQDVNCTEVPVAIHADQLTPTWRVYSTGSNVFQTRAGCLIGAEHVNNSYECDIPIGAGICASYQTQTNSPRRARSVASQSIIAYTMSLGAENSVAYSNNSIAIPTNFTISVTTEILPVSMTKTSVDCTMYICGDSTECSNLLLQYGSFCTQLNRALTGIAVEQDKNTQQVFAQVKQIYKTPPIKDFGGFNFSQILPDPSKPSKRSFIEDLLFNKVTLADAGFIKQYGDCLGDIAARDLICAQKFNGLTVLPPLLTDEMIAQYTSALLAGTITSGWTFGAGAALQIPFAMQMAYRFNGIGVTQNVLYENQKLIANQFNSAIGKIQDSLSSTASALGKLQDVVNQNAQALNTLVKQLSSNCGAISSVLNDILSRLDKVEAEVQIDRLITCRLQSLQTYVTQQLIRAAEIRASANLAATKMSECVLGQSKRVDFCGKGYHLMSFPQSAPHGVVFLHVTYVPAQEKNFTTAPAICHDGKAHFPREGVFVSNGTHWFVTQRNFYEPQIITTDNTFVSGNCDVVIGIVNNTVYDPLQPELDSGGSGYIPEAPRDGQAYVRKDGEWVLLSTFL

SEQ ID NO: 10419 - protein, 1177 aa, Artificial Sequence
  SARS-CoV-2/France/HF1805/2020__EPI_ISL_414628 spike protein (1-1147)(F970C_G999C) Foldon construct
MFVFLVLLPLVSSQCVNLTTRTQLPPAYTNSFTRGVYYPDKVFRSSVLHSTQDLFLPFFSNVTWFHAIHVSGTNGTKRFDNPVLPFNDGVYFASTEKSNIIRGWIFGTTLDSKTQSLLIVNNATNVVIKVCEFQFCNDPFLGVYYHKNNKSWMESEFRVYSSANNCTFEYVSQPFLMDLEGKQGNFKNLREFVFKNIDGYFKIYSKHTPINLVRDLPQGFSALEPLVDLPIGINITRFQTLLALHRSYLTPGDSSSGWTAGAAAYYVGYLQPRTFLLKYNENGTITDAVDCALDPLSETKCTLKSFTVEKGIYQTSNFRVQPTESIVRFPNITNLCPFGEVFNATRFASVYAWNRKRISNCVADYSVLYNSASFSTFKCYGVSPTKLNDLCFTNVYADSFVIRGDEVRQIAPGQTGKIADYNYKLPDDFTGCVIAWNSNNLDSKVGGNYNYLYRLFRKSNLKPFERDISTEIYQAGSTPCNGVEGFNCYFPLQSYGFQPTNGVGYQPYRVVVLSFELLHAPATVCGPKKSTNLVKNKCVNFNFNGLTGTGVLTESNKKFLPFQQFGRDIADTTDAVRDPQTLEILDITPCSFGGVSVITPGTNTSNQVAVLYQGVNCTEVPVAIHADQLTPTWRVYSTGSNVFQTRAGCLIGAEHVNNSYECDIPIGAGICASYQTQTNSPRRARSVASQSIIAYTMSLGAENSVAYSNNSIAIPTNFTISVTTEILPVSMTKTSVDCTMYICGDSTECSNLLLQYGSFCTQLNRALTGIAVEQDKNTQEVFAQVKQIYKTPPIKDFGGFNFSQILPDPSKPSKRSFIEDLLFNKVTLADAGFIKQYGDCLGDIAARDLICAQKFNGLTVLPPLLTDEMIAQYTSALLAGTITSGWTFGAGAALQIPFAMQMAYRFNGIGVTQNVLYENQKLIANQFNSAIGKIQDSLSSTASALGKLQDVVNQNAQALNTLVKQLSSNCGAISSVLNDILSRLDKVEAEVQIDRLITCRLQSLQTYVTQQLIRAAEIRASANLAATKMSECVLGQSKRVDFCGKGYHLMSFPQSAPHGVVFLHVTYVPAQEKNFTTAPAICHDGKAHFPREGVFVSNGTHWFVTQRNFYEPQIITTDNTFVSGNCDVVIGVVNNTVYDPLQPELDSGGSGYIPEAPRDGQAYVRKDGEWVLLSTFL

SEQ ID NO: 10420 - protein, 1177 aa, Artificial Sequence
  SARS-CoV-2/Netherlands/ZuidHolland_9/2020__EPI_ISL_414445 spike protein (1-1147)(F970C_G999C) Foldon construct
MFVFLVLLPLVSSQCVNLTTRTQLPPAYTNSFTRGVYYPDKVFRSSVLHSTQDLFLPFFSNVTWFHAIHVSGTNGTKRFDNPVLPFNDGVYFASTEKSNIIRGWIFGTTLDSKTQSLLIVNNATNVVIKVCEFQFCNDPFLGVYYHKNNKSWMESEFRVYSSANNCTFEYVSQPFLMDLEGKQGNFKNLREFVFKNIDGYFKIYSKHTPINLVRDLPQGFSALEPLVDLPIGINITRFQTLLALHRSYLTPGDSSSGWTAGAAAYYVGYLQPRTFLLKYNENGTITDAVDCALDPLSETKCTLKSFTVEKGIYQTSNFRVQPTESIVRFPNITNLCPFGEVFNATRFASVYAWNRKRISNCVADYSVLYNSASFSTFKCYGVSPTKLNDLCFTNVYADSFVIRGDEVRQIAPGQTGKIADYNYKLPDDFTGCVIAWNSNNLDSKVGGNYNYLYRLFRKSNLKPFERDISTEIYQAGSTPCNGVEGFNCYFPLQSYGFQPTNGVGYQPYRVVVLSFELLHAPATVCGPKKSTNLVKNKCVNFNFNGLTGTGVLTESNKKFLPFQQFGRDIADTTDAVRDPQTLEILDITPCSFGGVSVITPGTNTSNQVAVLYQGVNCTEVPVAIHADQLTPTWRVYSTGSNVFQTRAGCLIGAEHVNNSYECDIPIGAGICASYQTQTNSPRRARSVASQSIIAYTMSLGAENSVAYSNNSIAIPTNFTISVTTEILPVSMTKTSVDCTMYICGDSTECSNLLLQYGSFCTQLNRALTGIAVEQDKNTQEVFAQVKQIYKTPPIKDFGGFNFSQILPDPSKPSKRSFIEDLLFNKVTLADAGFIKQYGDCLGDIAARDLICVQKFNGLTVLPPLLTDEMIAQYTSALLAGTITSGWTFGAGAALQIPFAMQMAYRFNGIGVTQNVLYENQKLIANQFNSAIGKIQDSLSSTASALGKLQDVVNQNAQALNTLVKQLSSNCGAISSVLNDILSRLDKVEAEVQIDRLITCRLQSLQTYVTQQLIRAAEIRASANLAATKMSECVLGQSKRVDFCGKGYHLMSFPQSAPHGVVFLHVTYVPAQEKNFTTAPAICHDGKAHFPREGVFVSNGTHWFVTQRNFYEPQIITTDNTFVSGNCDVVIGIVNNTVYDPLQPELDSGGSGYIPEAPRDGQAYVRKDGEWVLLSTFL

SEQ ID NO: 10421 - protein, 1177 aa, Artificial Sequence
  SARS-CoV-2/Finland/FIN03032020A/2020__EPI_ISL_413602 spike protein (1-1147)(F970C_G999C) Foldon construct
MFVFLVLLPLVSSQCVNLTTRTQLPPAYTNSFTRGVYYPDKVFRSSVLHSTQDLFLPFFSNVTWFHAIHVSGTNGTKRFDNPVLPFNDGVYFASTEKSNIIRGWIFGTTLDSKTQSLLIVNNATNVVIKVCEFQFCNDPFLGVYYHKNNKSWMESEFRVYSSANNCTFEYVSQPFLMDLEGKQGNFKNLREFVFKNIDGYFKIYSKHTPINLVRDLPQGFSALEPLVDLPIGINITRFQTLLALHRSYLTPGDSSSGWTAGAAAYYVGYLQPRTFLLKYNENGTITDAVDCALDPLSETKCTLKSFTVEKGIYQTSNFRVQPTESIVRFPNITNLCPFGEVFNATRFASVYAWNRKRISNCVADYSVLYNSASFSTFKCYGVSPTKLNDLCFTNVYADSFVIRGDEVRQIAPGQTGKIADYNYKLPDDFTGCVISWNSNNLDSKVGGNYNYLYRLFRKSNLKPFERDISTEIYQAGSTPCNGVEGFNCYFPLQSYGFQPTNGVGYQPYRVVVLSFELLHAPATVCGPKKSTNLVKNKCVNFNFNGLTGTGVLTESNKKFLPFQQFGRDIADTTDAVRDPQTLEILDITPCSFGGVSVITPGTNTSNQVAVLYQGVNCTEVPVAIHADQLTPTWRVYSTGSNVFQTRAGCLIGAEHVNNSYECDIPIGAGICASYQTQTNSPRRARSVASQSIIAYTMSLGAENSVAYSNNSIAIPTNFTISVTTEILPVSMTKTSVDCTMYICGDSTECSNLLLQYGSFCTQLNRALTGIAVEQDKNTQEVFAQVKQIYKTPPIKDFGGFNFSQILPDPSKPSKRSFIEDLLFNKVTLADAGFIKQYGDCLGDIAARDLICAQKFNGLTVLPPLLTDEMIAQYTSALLAGTITSGWTFGAGAALQIPFAMQMAYRFNGIGVTQNVLYENQKLIANQFNSAIGKIQDSLSSTASALGKLQDVVNQNAQALNTLVKQLSSNCGAISSVLNDILSRLDKVEAEVQIDRLITCRLQSLQTYVTQQLIRAAEIRASANLAATKMSECVLGQSKRVDFCGKGYHLMSFPQSAPHGVVFLHVTYVPAQEKNFTTAPAICHDGKAHFPREGVFVSNGTHWFVTQRNFYEPQIITTDNTFVSGNCDVVIGIVNNTVYDPLQPELDSGGSGYIPEAPRDGQAYVRKDGEWVLLSTFL

SEQ ID NO: 10422 - protein, 1177 aa, Artificial Sequence
  SARS-CoV-2/France/GE1977/2020__EPI_ISL_414632 spike protein (1-1147)(F970C_G999C) Foldon construct
MFVFLVLLPLVSSQCVNLTTRTQLPPAYTNSFTRGVYYPDKVFRSSVLHSTQDLFLPFFSNVTWFHAIHVSGTNGTKRFDNPVLPFNDGVYFASTEKSNIIRGWIFGTTLDSKTQSLLIVNNATNVVIKVCEFQFCNDPFLGVYYHKNNKSWMESEFRVYSSANNCTFEYVSQPFLMDLEGKQGNFKNLREFVFKNIDGYFKIYSKHTPINLVRDLPQGFSALEPLVDLPIGINITRFQTLLALHRSYLTPGDSSSGWTAGAAAYYVGYLQPRTFLLKYNENGTITDAVDCALDPLSETKCTLKSFTVEKGIYQTSNFRVQPTESIVRFPNITNLCPFGEVFNATRFASVYAWNRKRISNCVADYSVLYNSASFSTFKCYGVSPTKLNDLCFTNVYADSFVIRGDEVRQIAPGQTGKIADYNYKLPDDFTGCVIAWNSNNLDSKVGGNYNYLYRLFRKSNLKPFERDISTEIYQAGSTPCNGVEGFNCYFPLQSYGFQPTNGVGYQPYRVVVLSFELLHAPATVCGPKKSTNLVKNKCVNFNFNGLTGTGVLTESNKKFLPFQQFGRDIADTTDAVRDPQTLEILDITPCSFGGVSVITPGTNTSNQVAVLYQGVNCTEVPVAIHADQLTPTWRVYSTGSNVFQTRAGCLIGAEHVNNSYECDIPIGAGICASYQTQTNSPRRARSVASQSIIAYTMSLGAENSVAYSNNSIAIPTNFTISVTTEILPVSMTKTSVDCTMYICGDSTECSNLLLQYGSFCTQLNRALTGIAVEQDKNTQEVFAQVKQIYKTPPIKDFGGFNFSQILPDPSKPSKRSFIEDLLFNKVTLADAGFIKQYGDCLGDIAARDLICAQKFNGLTVLPPLLTDEMIAQYTSALLAGTITSGWTFGAGAALQIPFAMQMAYRFNGIGVTQNVLYENQKLIANQFNSAIGKIQDSLFSTASALGKLQDVVNQNAQALNTLVKQLSSNCGAISSVLNDILSRLDKVEAEVQIDRLITCRLQSLQTYVTQQLIRAAEIRASANLAATKMSECVLGQSKRVDFCGKGYHLMSFPQSAPHGVVFLHVTYVPAQEKNFTTAPAICHDGKAHFPREGVFVSNGTHWFVTQRNFYEPQIITTDNTFVSGNCDVVIGIVNNTVYDPLQPELDSGGSGYIPEAPRDGQAYVRKDGEWVLLSTFL

SEQ ID NO: 10423 - protein, 1177 aa, Artificial Sequence
  SARS-CoV-2/Finland/FIN-313/2020__EPI_ISL_414641 spike protein (1-1147)(F970C_G999C) Foldon construct
MFVFLVLLPLVSSQCVNLTTRTQLPPAYTNSFTRGVYYPDKVFRSSVLHSTQDLFLPFFSNVTWFHAIHVSGTNGTKRFDNPVLPFNDGVYFASTEKSNIIRGWIFGTTLDSKTQSLLIVNNATNVVIKVCEFQFCNDPFLGVYYHKNNKSWMESEFRVYSSANNCTFEYVSQPFLMDLEGKQGNFKNLREFVFKNIDGYFKIYSKHTPINLVRDLPQGFSALEPLVDLPIGINITRFKTLLALHRSYLTPGDSSSGWTAGAAAYYVGYLQPRTFLLKYNENGTITDAVDCALDPLSETKCTLKSFTVEKGIYQTSNFRVQPTESIVRFPNITNLCPFGEVFNATRFASVYAWNRKRISNCVADYSVLYNSASFSTFKCYGVSPTKLNDLCFTNVYADSFVIRGDEVRQIAPGQTGKIADYNYKLPDDFTGCVIAWNSNNLDSKVGGNYNYLYRLFRKSNLKPFERDISTEIYQAGSTPCNGVEGFNCYFPLQSYGFQPTNGVGYQPYRVVVLSFELLHAPATVCGPKKSTNLVKNKCVNFNFNGLTGTGVLTESNKKFLPFQQFGRDIADTTDAVRDPQTLEILDITPCSFGGVSVITPGTNTSNQVAVLYQGVNCTEVPVAIHADQLTPTWRVYSTGSNVFQTRAGCLIGAEHVNNSYECDIPIGAGICASYQTQTNSPRRARSVASQSIIAYTMSLGAENSVAYSNNSIAIPTNFTISVTTEILPVSMTKTSVDCTMYICGDSTECSNLLLQYGSFCTQLNRALTGIAVEQDKNTQEVFAQVKQIYKTPPIKDFGGFNFSQILPDPSKPSKRSFIEDLLFNKVTLADAGFIKQYGDCLGDIAARDLICAQKFNGLTVLPPLLTDEMIAQYTSALLAGTITSGWTFGAGAALQIPFAMQMAYRFNGIGVTQNVLYENQKLIANQFNSAIGKIQDSLSSTASALGKLQDVVNQNAQALNTLVKQLSSNCGAISSVLNDILSRLDKVEAEVQIDRLITCRLQSLQTYVTQQLIRAAEIRASANLAATKMSECVLGQSKRVDFCGKGYHLMSFPQSAPHGVVFLHVTYVPAQEKNFTTAPAICHDGKAHFPREGVFVSNGTHWFVTQRNFYEPQIITTDNTFVSGNCDVVIGIVNNTVYDPLQPELDSGGSGYIPEAPRDGQAYVRKDGEWVLLSTFL

SEQ ID NO: 10424 - protein, 1177 aa, Artificial Sequence
  SARS-CoV-2/Netherlands/ZuidHolland_2/2020__EPI_ISL_414556 spike protein (1-1147)(F970C_G999C) Foldon construct
MFVFLVLLPLVSSQCVNLTTRTQLPPAYTNSFTRGVYYPDKVFRSSVLHSTQDLFLPFFSNVTWFHAIHVSGTNGTKRFDNPVLPFNDGVYFASTEKSNIIRGWIFGTTLDSKTQSLLIVNNATNVVIKVCEFQFCNDPFLGVYYHKNNKSWMESEFRVYSSANNCTFEYVSQPFLMDLEGKQGNFKNLREFVFKNIDGYFKIYSKHTPINLVRDLPQGFSALEPLVDLPIGINITRFQTLLALHRSYLTPGDSSSGWTAGAAAYYVGYLQPRTFLLKYNENGTITDAVDCALDPLSETKCTLKSFTVEKGIYQTSNFRVQPTESIVRFPNITNLCPFGEVFNATRFASVYAWNRKRISNCVADYSVLYNSASFSTFKCYGVSPTKLNDLCFTNVYADSFVIRGDEVRQIAPGQTGKIADYNYKLPDDFTGCVIAWNSNNLDSKVGGNYNYLYRLFRKSNLKPFERDISTEIYQAGSTPCNGVEGFNCYFPLQSYGFQPTNGVGYQPYRVVVLSFELLHAPATVCGPKKSTNLVKNKCVNFNFNGLTGTGVLTESNKKFLPFQQFGRDIADTTDAVRDPQTLEILDITPCSFGGVSVITPGTNTSNQVAVLYQGVNCTEVPVAIHADQLTPTWRVYSTGSNVFQTRAGCLIGAEHVNNSYECDIPIGAGICASYQTQTNSPRRARSVASQSIIAYTMSLGAENSVAYSNNSIAIPTNFTISVTTEILPVSMTKTSVDCTMYICGDSTECSNLLLQYGSFCTQLNRALTGIALEQDKNTQEVFAQVKQIYKTPPIKDFGGFNFSQILPDPSKPSKRSFIEDLLFNKVTLADAGFIKQYGDCLGDIAARDLICAQKFNGLTVLPPLLTDEMIAQYTSALLAGTITSGWTFGAGAALQIPFAMQMAYRFNGIGVTQNVLYENQKLIANQFNSAIGKIQDSLSSTASALGKLQDVVNQNAQALNTLVKQLSSNCGAISSVLNDILSRLDKVEAEVQIDRLITCRLQSLQTYVTQQLIRAAEIRASANLAATKMSECVLGQSKRVDFCGKGYHLMSFPQSAPHGVVFLHVTYVPAQEKNFTTAPAICHDGKAHFPREGVFVSNGTHWFVTQRNFYEPQIITTDNTFVSGNCDVVIGIVNNTVYDPLQPELDSGGSGYIPEAPRDGQAYVRKDGEWVLLSTFL

SEQ ID NO: 10425 - protein, 1177 aa, Artificial Sequence
  SARS-CoV-2/USA/WA-UW31/2020__EPI_ISL_414618 spike protein (1-1147)(F970C_G999C) Foldon construct
MFVFLVLLPLVSSQCVNLTTRTQLPPAYTNSFTRGVYYPDKVFRSSVLHSTQDLFLPFFSNVTWFHAIHVSGTNGTKRFDNPVLPFNDGVYFASTEKSNIIRGWIFGTTLDSKTQSLLIVNNATNVVIKVCEFQFCNDPFLGVYYHKNNKSWMESEFRVYSSANNCTFEYVSQPFLMDLEGKQGNFKNLREFVFKNIDGYFKIYSKHTPINLVRDLPQGFSALEPLVDLPIGINITRFQTLLALHRSYLTPGDSSSGWTAGAAAYYVGYLQPRTFLLKYNENGTITDAVDCALDPLSETKCTLKSFTVEKGIYQTSNFRVQPTESIVRFPNITNLCPFGEVFNATRFASVYAWNRKRISNCVADYSVLYNSASFSTFKCYGVSPTKLNDLCFTNVYADSFVIRGDEVRQIAPGQTGKIADYNYKLPDDFTGCVIAWNSNNLDSKVGGNYNYLYRLFRKSNLKPFERDISTEIYQAGSTPCNGAEGFNCYFPLQSYGFQPTNGVGYQPYRVVVLSFELLHAPATVCGPKKSTNLVKNKCVNFNFNGLTGTGVLTESNKKFLPFQQFGRDIADTTDAVRDPQTLEILDITPCSFGGVSVITPGTNTSNQVAVLYQDVNCTEVPVAIHADQLTPTWRVYSTGSNVFQTRAGCLIGAEHVNNSYECDIPIGAGICASYQTQTNSPRRARSVASQSIIAYTMSLGAENSVAYSNNSIAIPTNFTISVTTEILPVSMTKTSVDCTMYICGDSTECSNLLLQYGSFCTQLNRALTGIAVEQDKNTQEVFAQVKQIYKTPPIKDFGGFNFSQILPDPSKPSKRSFIEDLLFNKVTLADAGFIKQYGDCLGDIAARDLICAQKFNGLTVLPPLLTDEMIAQYTSALLAGTITSGWTFGAGAALQIPFAMQMAYRFNGIGVTQNVLYENQKLIANQFNSAIGKIQDSLSSTASALGKLQDVVNQNAQALNTLVKQLSSNCGAISSVLNDILSRLDKVEAEVQIDRLITCRLQSLQTYVTQQLIRAAEIRASANLAATKMSECVLGQSKRVDFCGKGYHLMSFPQSAPHGVVFLHVTYVPAQEKNFTTAPAICHDGKAHFPREGVFVSNGTHWFVTQRNFYEPQIITTDNTFVSGNCDVVIGIVNNTVYDPLQPELDSGGSGYIPEAPRDGQAYVRKDGEWVLLSTFL

SEQ ID NO: 10426 - protein, 1177 aa, Artificial Sequence
  SARS-CoV-2/South Korea/SNU01/2020__EPI_ISL_411929 spike protein (1-1147)(F970C_G999C) Foldon construct
MFVFLVLLPLVSSQCVNLTTRTQLPPAYTNSFTRGVYYPDKVFRSSVLHSTQDLFLPFFSNVTWFHAIHVSGTNGTKRFDNPVLPFNDGVYFASTEKSNIIRGWIFGTTLDSKTQSLLIVNNATNVVIKVCEFQFCNDPFLGVYYHKNNKSWMESEFRVYSSANNCTFEYVSQPFLMDLEGKQGNFKNLREFVFKNIDGYFKIYSKHTPINLVRDLPQGFWALEPLVDLPIGINITRFQTLLALHRSYLTPGDSSSGWTAGAAAYYVGYLQPRTFLLKYNENGTITDAVDCALDPLSETKCTLKSFTVEKGIYQTSNFRVQPTESIVRFPNITNLCPFGEVFNATRFASVYAWNRKRISNCVADYSVLYNSASFSTFKCYGVSPTKLNDLCFTNVYADSFVIRGDEVRQIAPGQTGKIADYNYKLPDDFTGCVIAWNSNNLDSKVGGNYNYLYRLFRKSNLKPFERDISTEIYQAGSTPCNGVEGFNCYFPLQSYGFQPTNGVGYQPYRVVVLSFELLHAPATVCGPKKSTNLVKNKCVNFNFNGLTGTGVLTESNKKFLPFQQFGRDIADTTDAVRDPQTLEILDITPCSFGGVSVITPGTNTSNQVAVLYQDVNCTEVPVAIHADQLTPTWRVYSTGSNVFQTRAGCLIGAEHVNNSYECDIPIGAGICASYQTQTNSPRRARSVASQSIIAYTMSLGAENSVAYSNNSIAIPTNFTISVTTEILPVSMTKTSVDCTMYICGDSTECSNLLLQYGSFCTQLNRALTGIAVEQDKNTQEVFAQVKQIYKTPPIKDFGGFNFSQILPDPSKPSKRSFIEDLLFNKVTLADAGFIKQYGDCLGDIAARDLICAQKFNGLTVLPPLLTDEMIAQYTSALLAGTITSGWTFGAGAALQIPFAMQMAYRFNGIGVTQNVLYENQKLIANQFNSAIGKIQDSLSSTASALGKLQDVVNQNAQALNTLVKQLSSNCGAISSVLNDILSRLDKVEAEVQIDRLITCRLQSLQTYVTQQLIRAAEIRASANLAATKMSECVLGQSKRVDFCGKGYHLMSFPQSAPHGVVFLHVTYVPAQEKNFTTAPAICHDGKAHFPREGVFVSNGTHWFVTQRNFYEPQIITTDNTFVSGNCDVVIGIVNNTVYDPLQPELDSGGSGYIPEAPRDGQAYVRKDGEWVLLSTFL

SEQ ID NO: 10427 - protein, 1177 aa, Artificial Sequence
  SARS-CoV-2/China/WF0004/2020__EPI_ISL_413694 spike protein (1-1147)(F970C_G999C) Foldon construct
MFVFLVLLPLVSSQCVNLTTRTQLPPAYTNSFTRGVYYPDKVFRSSVLHSTQDLFLPFFSNVTWFHAIHVSGTNGTKRFDNPVLPFNDGVYFASTEKSNIIRGWIFGTTLDSKTQSLLIVNNATNVVIKVCEFQFCNDPFLGVYYHKNNKSWTESEFRVYSSANNCTFEYVSQPFLMDLEGKQGNFKNLREFVFKNIDGYFKIYSKHTPINLVRDLPQGFSALEPLVDLPIGINITRFQTLLALHRSYLTPGDSSSGWTAGAAAYYVGYLQPRTFLLKYNENGTITDAVDCALDPLSETKCTLKSFTVEKGIYQTSNFRVQPTESIVRFPNITNLCPFGEVFNATRFASVYAWNRKRISNCVADYSVLYNSASFSTFKCYGVSPTKLNDLCFTNVYADSFVIRGDEVRQIAPGQTGKIADYNYKLPDDFTGCVIAWNSNNLDSKVGGNYNYLYRLFRKSNLKPFERDISTEIYQAGSTPCNGVEGFNCYFPLQSYGFQPTNGVGYQPYRVVVLSFELLHAPATVCGPKKSTNLVKNKCVNFNFNGLTGTGVLTESNKKFLPFQQFGRDIADTTDAVRDPQTLEILDITPCSFGGVSVITPGTNTSNQVAVLYQDVNCTEVPVAIHADQLTPTWRVYSTGSNVFQTRAGCLIGAEHVNNSYECDIPIGAGICASYQTQTNSPRRARSVASQSIIAYTMSLGAENSVAYSNNSIAIPTNFTISVTTEILPVSMTKTSVDCTMYICGDSTECSNLLLQYGSFCTQLNRALTGIAVEQDKNTQEVFAQVKQIYKTPPIKDFGGFNFSQILPDPSKPSKRSFIEDLLFNKVTLADAGFIKQYGDCLGDIAARDLICAQKFNGLTVLPPLLTDEMIAQYTSALLAGTITSGWTFGAGAALQIPFAMQMAYRFNGIGVTQNVLYENQKLIANQFNSAIGKIQDSLSSTASALGKLQDVVNQNAQALNTLVKQLSSNCGAISSVLNDILSRLDKVEAEVQIDRLITCRLQSLQTYVTQQLIRAAEIRASANLAATKMSECVLGQSKRFDFCGKGYHLMSFPQSAPHGVVFLHVTYVPAQEKNFTTAPAICHDGKAHFPREGVFVSNGTHWFVTQRNFYEPQIITTDNTFVSGNCDVVIGIVNNTVYDPLQPELDSGGSGYIPEAPRDGQAYVRKDGEWVLLSTFL

SEQ ID NO: 10428 - protein, 1177 aa, Artificial Sequence
  SARS-CoV-2/China/WF0028/2020__EPI_ISL_413791 spike protein (1-1147)(F970C_G999C) Foldon construct
MFVFLVLLPLVSSQCVNLTTRTQLPPAYTNSFTRGVYYPDKVFRSSVLHSTQDLFLPFFSNVTWFHAIHVSGTNGTKRFDNPVLPFNDGVYFASTEKSNIIRGWIFGTTLDSKTQSLLIVNNATNVVIKVCEFQFCNDPFLGVYYHKNNKSWMESEFRVYSSANNCTFEYVSQPFLMDLEGKQGNFKNLREFVFKNIDGYFKIYSKHTPINLVRDLPQGFSALEPLVDLPIGINITRFQTLLALHRSYLTPGDSSSGWTAGAAAYYVGYLQPRTFLLKYNENGTITDAVDCALDPLSETKCTLKSFTVEKGIYQTSNFRVQPTESIVRFPNITNLCPFGEVFNATRFASVYAWNRKRISNCVADYSVLYNSASFSTFKCYGVSPTKLNDLCFTNVYADSFVIRGDEVRQIAPGQTGKIADYNYKLPDDFTGCVIAWNSNNLDSKVGGNYNYLYRLFRKSNLKPFERDISTEIYQAGSTPCNGVEGFNCYFPLQSYGFQPTNGVGYQPYRVVVLSFELLHAPATVCGPKKSTNLVKNKCVNFNFNGLTGTGVLTESNKKFLPFQQFGRDIADTTDAVRDPQTLEILDITPCSFGGVSVITPGTNTSNQVAVLYQDVNCTEVPVAIHADQLTPTWRVYSTGSNVFQTRAGCLIGAEHVNNSYECDIPIGAGICASYQTQTNSPRRARSVASQSIIAYTMSLGAENSVAYSNNSIAIPTNFTISVTTEILPVSMTKTSVDCTMYICGDSTECSNLLLQYGSFCTQLNRALTGIAVEQDKNTQEVFAQVKQIYKTPPIKDFGGFNFSQILPDPSKPSKRSFIEDLLFNKVTLADAGFIKQYGDCLGDIAARDLICAQKFNGLTVLPPLLTDEMIAQYTSALLAGTITSGWTFGAGAALQIPFAMQMAYRFNGIGVTQNVLYENQKLIANQFNSAIGKIQDSLSSTASALGKLQDVVNQNAQALNTLVKQLSSNCGAISSVLNDILSRLDKVEAEVQIDRLITCRLQSLQTYVTQQLIRAAEIRASANLAATKMSECVLGQSKRVDFCGKGYHLMSFPQSAPHGVVFLHVTYVPAQEKNFTTAPAICHDGKAHFPREGVFVSNGTHWFVTQRNFYEPQIITTDNTFVSGNCDVVIGIVNNTVYDPLQPELESGGSGYIPEAPRDGQAYVRKDGEWVLLSTFL

SEQ ID NO: 10429 - protein, 1177 aa, Artificial Sequence
  SARS-CoV-2/2019-nCoV/USA-CruiseA-18/2020__MT159716.1 spike protein (1-1147)(F970C_G999C) Foldon construct
MFVFLVLLPLVSSQCVNLTTRTQLPPAYTNSFTRGVYYPDKVFRSSVLHSTQDLFLPFFSNVTWFHAIHVSGTNGTKRFDNPVLPFNDGVYFASTEKSNIIRGWIFGTTLDSKTQSLLIVNNATNVVIKVCEFQFCNDPFLGVYYHKNNKSWMESELRVYSSANNCTFEYVSQPFLMDLEGKQGNFKNLREFVFKNIDGYFKIYSKHTPINLVRDLPQGFSALEPLVDLPIGINITRFQTLLALHRSYLTPGDSSSGWTAGAAAYYVGYLQPRTFLLKYNENGTITDAVDCALDPLSETKCTLKSFTVEKGIYQTSNFRVQPTESIVRFPNITNLCPFGEVFNATRFASVYAWNRKRISNCVADYSVLYNSASFSTFKCYGVSPTKLNDLCFTNVYADSFVIRGDEVRQIAPGQTGKIADYNYKLPDDFTGCVIAWNSNNLDSKVGGNYNYLYRLFRKSNLKPFERDISTEIYQAGSTPCNGVEGFNCYFPLQSYGFQPTNGVGYQPYRVVVLSFELLHAPATVCGPKKSTNLVKNKCVNFNFNGLTGTGVLTESNKKFLPFQQFGRDIADTTDAVRDPQTLEILDITPCSFGGVSVITPGTNTSNQVAVLYQDVNCTEVPVAIHADQLTPTWRVYSTGSNVFQTRAGCLIGAEHVNNSYECDIPIGAGICASYQTQTNSPRRARSVASQSIIAYTMSLGAENSVAYSNNSIAIPTNFTISVTTEILPVSMTKTSVDCTMYICGDSTECSNLLLQYGSFCTQLNRALTGIAVEQDKNTQEVFAQVKQIYKTPPIKDFGGFNFSQILPDPSKPSKRSFIEDLLFNKVTLADAGFIKQYGDCLGDIAARDLICAQKFNGLTVLPPLLTDEMIAQYTSALLAGTITSGWTFGAGAALQIPFAMQMAYRFNGIGVTQNVLYENQKLIANQFNSAIGKIQDSLSSTASALGKLQDVVNQNAQALNTLVKQLSSNCGAISSVLNDILSRLDKVEAEVQIDRLITCRLQSLQTYVTQQLIRAAEIRASANLAATKMSECVLGQSKRVDFCGKGYHLMSFPQSAPHGVVFLHVTYVPAQEKNFTTAPAICHDGKAHFPREGVFVSNGTHWFVTQRNFYEPQIITTDNTFVSGNCDVVIGIVNNTVYDPLQPELDSGGSGYIPEAPRDGQAYVRKDGEWVLLSTFL

SEQ ID NO: 10430 - protein, 1177 aa, Artificial Sequence
  SARS-CoV-2/SARS-CoV-2/Yunnan-01/human/2020/CHN__MT049951.1 spike protein (1-1147)(F970C_G999C) Foldon construct
MFVFLVLLPLVSSQCVNLTTRTQLPPANTNSFTRGVYYPDKVFRSSVLHSTQDLFLPFFSNVTWFHAIHVSGTNGTKRFDNPVLPFNDGVYFASTEKSNIIRGWIFGTTLDSKTQSLLIVNNATNVVIKVCEFQFCNDPFLGVYYHKNNKSWMESEFRVYSSANNCTFEYVSQPFLMDLEGKQGNFKNLREFVFKNIDGYFKIYSKHTPINLVRDLPQGFSALEPLVDLPIGINITRFQTLLALHRSYLTPGDSSSGWTAGAAAYYVGYLQPRTFLLKYNENGTITDAVDCALDPLSETKCTLKSFTVEKGIYQTSNFRVQPTESIVRFPNITNLCPFGEVFNATRFASVYAWNRKRISNCVADYSVLYNSASFSTFKCYGVSPTKLNDLCFTNVYADSFVIRGDEVRQIAPGQTGKIADYNYKLPDDFTGCVIAWNSNNLDSKVGGNYNYLYRLFRKSNLKPFERDISTEIYQAGSTPCNGVEGFNCYFPLQSYGFQPTNGVGYQPYRVVVLSFELLHAPATVCGPKKSTNLVKNKCVNFNFNGLTGTGVLTESNKKFLPFQQFGRDIADTTDAVRDPQTLEILDITPCSFGGVSVITPGTNTSNQVAVLYQDVNCTEVPVAIHADQLTPTWRVYSTGSNVFQTRAGCLIGAEHVNNSYECDIPIGAGICASYQTQTNSPRRARSVASQSIIAYTMSLGAENSVAYSNNSIAIPTNFTISVTTEILPVSMTKTSVDCTMYICGDSTECSNLLLQYGSFCTQLNRALTGIAVEQDKNTQEVFAQVKQIYKTPPIKDFGGFNFSQILPDPSKPSKRSFIEDLLFNKVTLADAGFIKQYGDCLGDIAARDLICAQKFNGLTVLPPLLTDEMIAQYTSALLAGTITSGWTFGAGAALQIPFAMQMAYRFNGIGVTQNVLYENQKLIANQFNSAIGKIQDSLSSTASALGKLQDVVNQNAQALNTLVKQLSSNCGAISSVLNDILSRLDKVEAEVQIDRLITCRLQSLQTYVTQQLIRAAEIRASANLAATKMSECVLGQSKRVDFCGKGYHLMSFPQSAPHGVVFLHVTYVPAQEKNFTTAPAICHDGKAHFPREGVFVSNGTHWFVTQRNFYEPQIITTDNTFVSGNCDVVIGIVNNTVYDPLQPELDSGGSGYIPEAPRDGQAYVRKDGEWVLLSTFL

SEQ ID NO: 10431 - protein, 1177 aa, Artificial Sequence
  SARS-CoV-2/USA/WA-UW292/2020__EPI_ISL_418077 spike protein (1-1147)(F970C_G999C) Foldon construct
MFVFLVLLPLVSSQCVNLTTRTQLPPAYTNSFTRGVYYPDKVFRSSVLHSTQDLFLPFFSNVTWFHAIHVSGTNGTKRFDNPVLPFNDGVYFASTEKSNIIRGWIFGTTLDSKTQSLLIVNNATNVVIKVCEFQFCNDPFLGVYYHKNNKSWMESEFRVYSSANNCTFEYVSQPFLMDLEGKQGNFKNLREFVFKNIDGYFKIYSKHTPINLVRDLPQGFSALEPLVDLPIGINITRFQTLLALHRSYLTPGDSSSGWTAGAAAYYVGYLQPRTFLLKYNENGTITDAVDCALDPLSETKCTLKSFTVEKGIYQTSNFRVQPTESIVRFPNITNLCPFGEVFNATRFASVYAWNRKRISNCVADYSVLYNSASFSTFKCYGVSPTKLNDLCFTNVYADSFVIRGDEVRQIAPGQTGKIADYNYKLPDDFTGCVIAWNSNNLDSKVGGNYNYLYRLFRKSNLKPFERDISTEIYQASSTPCNGVEGFNCYFPLQSYGFQPTNGVGYQPYRVVVLSFELLHAPATVCGPKKSTNLVKNKCVNFNFNGLTGTGVLTESNKKFLPFQQFGRDIADTTDAVRDPQTLEILDITPCSFGGVSVITPGTNTSNQVAVLYQDVNCTEVPVAIHADQLTPTWRVYSTGSNVFQTRAGCLIGAEHVNNSYECDIPIGAGICASYQTQTNSPRRARSVASQSIIAYTMSLGAENSVAYSNNSIAIPTNFTISVTTEILPVSMTKTSVDCTMYICGDSTECSNLLLQYGSFCTQLNRALTGIAVEQDKNTQEVFAQVKQIYKTPPIKDFGGFNFSQILPDPSKPSKRSFIEDLLFNKVTLADAGFIKQYGDCLGDIAARDLICAQKFNGLTVLPPLLTDEMIAQYTSALLAGTITSGWTFGAGAALQIPFAMQMAYRFNGIGVTQNVLYENQKLIANQFNSAIGKIQDSLSSTASALGKLQDVVNQNAQALNTLVKQLSSNCGAISSVLNDILSRLDKVEAEVQIDRLITCRLQSLQTYVTQQLIRAAEIRASANLAATKMSECVLGQSKRVDFCGKGYHLMSFPQSAPHGVVFLHVTYVPAQEKNFTTAPAICHDGKAHFPREGVFVSNGTHWFVTQRNFYEPQIITTDNTFVSGNCDVVIGIVNNTVYDPLQPELDSGGSGYIPEAPRDGQAYVRKDGEWVLLSTFL

SEQ ID NO: 10432 - protein, 1177 aa, Artificial Sequence
  SARS-CoV-2/Iceland/192/2020__EPI_ISL_417819 spike protein (1-1147)(F970C_G999C) Foldon construct
MFVFFVLLPLVSSQCVNLTTRTQLPPAYTNSFTRGVYYPDKVFRSSVLHSTQDLFLPFFSNVTWFHAIHVSGTNGTKRFDNPVLPFNDGVYFASTEKSNIIRGWIFGTTLDSKTQSLLIVNNATNVVIKVCEFQFCNDPFLGVYYHKNNKSWMESEFRVYSSANNCTFEYVSQPFLMDLEGKQGNFKNLREFVFKNIDGYFKIYSKHTPINLVRDLPQGFSALEPLVDLPIGINITRFQTLLALHRSYLTPGDSSSGWTAGAAAYYVGYLQPRTFLLKYNENGTITDAVDCALDPLSETKCTLKSFTVEKGIYQTSNFRVQPTESIVRFPNITNLCPFGEVFNATRFASVYAWNRKRISNCVADYSVLYNSASFSTFKCYGVSPTKLNDLCFTNVYADSFVIRGDEVRQIAPGQTGKIADYNYKLPDDFTGCVIAWNSNNLDSKVGGNYNYLYRLFRKSNLKPFERDISTEIYQAGSTPCNGVEGFNCYFPLQSYGFQPTNGVGYQPYRVVVLSFELLHAPATVCGPKKSTNLVKNKCVNFNFNGLTGTGVLTESNKKFLPFQQFGRDIADTTDAVRDPQTLEILDITPCSFGGVSVITPGTNTSNQVAVLYQGVNCTEVPVAIHADQLTPTWRVYSTGSNVFQTRAGCLIGAEHVNNSYECDIPIGAGICASYQTQTNSPRRARSVASQSIIAYTMSLGAENSVAYSNNSIAIPTNFTISVTTEILPVSMTKTSVDCTMYICGDSTECSNLLLQYGSFCTQLNRALTGIAVEQDKNTQEVFAQVKQIYKTPPIKDFGGFNFSQILPDPSKPSKRSFIEDLLFNKVTLADAGFIKQYGDCLGDIAARDLICAQKFNGLTVLPPLLTDEMIAQYTSALLAGTITSGWTFGAGAALQIPFAMQMAYRFNGIGVTQNVLYENQKLIANQFNSAIGKIQDSLSSTASALGKLQDVVNQNAQALNTLVKQLSSNCGAISSVLNDILSRLDKVEAEVQIDRLITCRLQSLQTYVTQQLIRAAEIRASANLAATKMSECVLGQSKRVDFCGKGYHLMSFPQSAPHGVVFLHVTYVPAQEKNFTTAPAICHDGKAHFPREGVFVSNGTHWFVTQRNFYEPQIITTDNTFVSGNCDVVIGIVNNTVYDPLQPELDSGGSGYIPEAPRDGQAYVRKDGEWVLLSTFL

SEQ ID NO: 10433 - protein, 1177 aa, Artificial Sequence
  SARS-CoV-2/Belgium/ULG-6939/2020__EPI_ISL_417020 spike protein (1-1147)(F970C_G999C) Foldon construct
MFVFLVLLPLVSSQCVNLTTRTQLPPAYTNSFTRGVYYPDKVFRSSVLHSTQDLFLPFFSNVTWFHAIHVSGTNGTKRFDNPVLPFNDGVYFASTEKSNIIRGWIFGTTLDSKTQSLLIVNNATNVVIKVCEFQFCNDPFLGVYYHKNNKSWMESEFRVYSSANNCTFEYVSQPFLMDLEGKQGNFKNLREFVFKNIDGYFKIYSKHTPINLVRDLPQGFSALEPLVDLPIGINITRFQTLLALHRSYLTPGDSSSGWTAGAAAYYVGYLQPRTFLLKYNENGTITDAVDCALDPLSETKCTLKSFTVEKGIYQTSNFRVQPTESIVRFPNITNLCPFGEVFNATRFASVYAWNRKRISNCVADYSVLYNSASFSTFKCYGVSPTKLNDLCFTNVYADSFVIRGDEVRQIAPGQTGKIADYNYKLPDDFTGCVIAWNSNNLDSKVGGNYNYLYRLFRKSNLKPFERDISTEIYQAGSTPCNGVEGFNCYFPLQSYGFQPTNGVGYQPYRVVVLSFELLHAPATVCGPKKSTNLVKNKCVNFNFNGLTGTGVLTESNKKFLPFQQFGRDIADTTDAVRDPQTLEILDITPCSFGGVSVITPGTNTSNQVAVLYQGVNCTEVPVAIHADQLTPTWRVYSTGSNVFQTRAGCLIGAEHVNNSYECDIPIGAGICASYQTQTNSPRRARSVASQSIIAYTMSLGAENSVVYSNNSIAIPTNFTISVTTEILPVSMTKTSVDCTMYICGDSTECSNLLLQYGSFCTQLNRALTGIAVEQDKNTQEVFAQVKQIYKTPPIKDFGGFNFSQILPDPSKPSKRSFIEDLLFNKVTLADAGFIKQYGDCLGDIAARDLICAQKFNGLTVLPPLLTDEMIAQYTSALLAGTITSGWTFGAGAALQIPFAMQMAYRFNGIGVTQNVLYENQKLIANQFNSAIGKIQDSLSSTASALGKLQDVVNQNAQALNTLVKQLSSNCGAISSVLNDILSRLDKVEAEVQIDRLITCRLQSLQTYVTQQLIRAAEIRASANLAATKMSECVLGQSKRVDFCGKGYHLMSFPQSAPHGVVFLHVTYVPAQEKNFTTAPAICHDGKAHFPREGVFVSNGTHWFVTQRNFYEPQIITTDNTFVSGNCDVVIGIVNNTVYDPLQPELDSGGSGYIPEAPRDGQAYVRKDGEWVLLSTFL

SEQ ID NO: 10434 - protein, 1177 aa, Artificial Sequence
  SARS-CoV-2/France/HF2496/2020__EPI_ISL_418231 spike protein (1-1147)(F970C_G999C) Foldon construct
MFVFLVLLPLVSSQCVNLTTRTQLPPAYTNSFTRGVYYPDKVFRSSVLHSTQDLFLPFFSNVTWFHAIHVSGTNGTKRFDNPVLPFNDGVYFASTEKSNIIRGWIFGTTLDSKTQSLLIVNNATNVVIKVCEFQFCNDPFLGVYYHKNNKSWMESEFRVYSSANNCTFEYVSQPFLMDLEGKQGNFKNLREFVFKNIDGYFKIYSKHTPINLVRDLPQGFSALEPLVDLPIGINITRFQTLLALHRSYLTPGDSSSGWTAGAAAYYVGYLQPRTFLLKYNENGTITDAVDCALDPLSETKCTLKSFTVEKGIYQTSNFRVQPTESIVRFPNITNLCPFGEVFNATRFASVYAWNRKRISNCVADYSVLYNSASFSTFKCYGVSPTKLNDLCFTNVYADSFVIRGDEVRQIAPGQTGKIADYNYKLPDDFTGCVIAWNSNNLDSKVGGNYNYLYRLFRKSNLKPFERDISTEIYQAGSTPCNGVEGFNCYFPLQSYGFQPTNGVGYQPYRVVVLSFELLHAPATVCGPKKSTNLVKNKCVNFNFNGLTGTGVLTESNKKFLPFQQFGRDIADTTDAVRDPQTLEILDITPCSFGGVSVITPGTNTSNQVAVLYQGVNCTEVPVAIHADQLTPTWRVYSTGSNVFQTRAGCLIGAEHVNNSYECDIPIGAGICASYQTQTNSPRRARSVASQSIIAYTMSLGAENSVAYSNNSIAIPTNFTISVTTEILPVSMTKTSVDCTMYICGDSTECSNLLLQYGSFCTQLNRALTGIAVEQDKNTQEVFAQVKQIYKTPPIKDFGGFNFSQILPDPSKPSKRSFIEDLLFNKVTLADAGFIKQYGDCLGDIVARDLICAQKFNGLTVLPPLLTDEMIAQYTSALLAGTITSGWTFGAGAALQIPFAMQMAYRFNGIGVTQNVLYENQKLIANQFNSAIGKIQDSLSSTASALGKLQDVVNQNAQALNTLVKQLSSNCGAISSVLNDILSRLDKVEAEVQIDRLITCRLQSLQTYVTQQLIRAAEIRASANLAATKMSECVLGQSKRVDFCGKGYHLMSFPQSAPHGVVFLHVTYVPAQEKNFTTAPAICHDGKAHFPREGVFVSNGTHWFVTQRNFYEPQIITTDNTFVSGNCDVVIGIVNNTVYDPLQPELDSGGSGYIPEAPRDGQAYVRKDGEWVLLSTFL

SEQ ID NO: 10435 - protein, 1177 aa, Artificial Sequence
  SARS-CoV-2/USA/WA-UW291/2020__EPI_ISL_418076 spike protein (1-1147)(F970C_G999C) Foldon construct
MFVFLVLLPLVSSQCVNLTTRTQLPPAYTNSFTRGVYYPDKVFRSSVLHSTQDLFLPFFSNVTWFHAIHVSGTNGTKRFDNPVLPFNDGVYFASTEKSNIIRGWIFGTTLDSKTQSLLIVNNATNVVIKVCEFQFCNDPFLGVYYHKNNKSWMESEFRVYSSANNCTFEYVSQPFLMDLEGKQGNFKNLREFVFKNIDGYFKIYSKHTPINLVRDLPQGFSALEPLVDLPIGINITRFQTLLALHRSYLTPGDSSSGWTAGAAAYYVGYLQPRTFLLKYNENGTITDAVDCALDPLSETKCTLKSFTVEKGIYQTSNFRVQPTESIVRFPNITNLCPFGEVFNATRFASVYAWNRKRISNCVADYSVLYNSASFSTFKCYGVSPTKLNDLCFTNVYADSFVIRGDEVRQIAPGQTGKIADYNYKLPDDFTGCVIAWNSNNLDSKVGGNYNYLYRLFRKSNLKPFERDISTEIYQAGSTPCNGVEGFNCYFPLQSYGFQPTNGVGYQPYRVVVLSFELLHAPATVCGPKKSTNLVKNKCVNFNFNGLTGTGVLTESNKKFLPFQQFGRDIADTTDAVRDPQTLEILDITPCSFGGVSVITPGTNTSNQVAVLYQGVNCTEVPVAIHADQLTPTWRVYSTGSNVFQTRAGCLIGAEHVNNSYECDIPIGAGICASYQTQTNSPRRARSVASQSIIAYTMSLGAENSVAYSNNSIAIPTNFTISVTTEILPVSMTKTSVDCTMYICGDSTECSNLLLQYGSFCTQLNRALTGIAVEQDKNTQEVFAQVKQIYKTPPIKDFGGFNFSQILPDPSKPSKRSFIEDLLFNKVTLADAGFIKQYGDCLGDIAARDLICAQKFNGLTVLPPLLTDEMIAQYTSALLAGTITSGWTFGAGAALQIPFAMQMAYRFNGIGVTQNVLYENQKLIANQFNSAIGKIQYSLSSTASALGKLQDVVNQNAQALNTLVKQLSSNCGAISSVLNDILSRLDKVEAEVQIDRLITCRLQSLQTYVTQQLIRAAEIRASANLAATKMSECVLGQSKRVDFCGKGYHLMSFPQSAPHGVVFLHVTYVPAQEKNFTTAPAICHDGKAHFPREGVFVSNGTHWFVTQRNFYEPQIITTDNTFVSGNCDVVIGIVNNTVYDPLQPELDSGGSGYIPEAPRDGQAYVRKDGEWVLLSTFL

SEQ ID NO: 10436 - protein, 1177 aa, Artificial Sequence; identical to SEQ ID NO: 10399
  SARS-CoV-2/Portugal/PT0034/2020__EPI_ISL_418019 spike protein (1-1147)(F970C_G999C) Foldon construct

SEQ ID NO: 10437 - protein, 1177 aa, Artificial Sequence; identical to SEQ ID NO: 10391
  SARS-CoV-2/Iceland/202/2020__EPI_ISL_417750 spike protein (1-1147)(F970C_G999C) Foldon construct

SEQ ID NO: 10438 - protein, 1177 aa, Artificial Sequence
  SARS-CoV-2/USA/WA-UW261/2020__EPI_ISL_418046 spike protein (1-1147)(F970C_G999C) Foldon construct
MFVFLVLLPLVSSQCVNLTTRTQLPPAYTNSFTRGVYYPDKVFRSSVLHSTQDLFLPFFSNVTWFHAIHVSGTNGTKRFDNPVLPFNDGVYFASTEKSNIIRGWIFGTTLDSKTQSLLIVNNATNVVIKVCEFQFCNDPFLGVYYHKNNKSWMESEFRVYSSANNCTFEYVSQPFLMDLEGKQGNFKNLREFVFKNIDGYFKIYSKHTPINLVRDLPQGFSALEPLVDLPIGINITRFQTLLALHRSYLTPGDSSSGWTAGAAAYYVGYLQPRTFLLKYNENGTITDAVDCALDPLSETKCTLKSFTVEKGIYQTSNFRVQPTESIVRFPNITNLCPFGEVFNATRFTSVYAWNRKRISNCVADYSVLYNSASFSTFKCYGVSPTKLNDLCFTNVYADSFVIRGDEVRQIAPGQTGKIADYNYKLPDDFTGCVIAWNSNNLDSKVGGNYNYLYRLFRKSNLKPFERDISTEIYQAGSTPCNGVEGFNCYFPLQSYGFQPTNGVGYQPYRVVVLSFELLHAPATVCGPKKSTNLVKNKCVNFNFNGLTGTGVLTESNKKFLPFQQFGRDIADTTDAVRDPQTLEILDITPCSFGGVSVITPGTNTSNQVAVLYQDVNCTEVPVAIHADQLTPTWRVYSTGSNVFQTRAGCLIGAEHVNNSYECDIPIGAGICASYQTQTNSPRRARSVASQSIIAYTMSLGAENSVAYSNNSIAIPTNFTISVTTEILPVSMTKTSVDCTMYICGDSTECSNLLLQYGSFCTQLNRALTGIAVEQDKNTQEVFAQVKQIYKTPPIKDFGGFNFSQILPDPSKPSKRSFIEDLLFNKVTLADAGFIKQYGDCLGDIAARDLICAQKFNGLTVLPPLLTDEMIAQYTSALLAGTITSGWTFGAGAALQIPFAMQMAYRFNGIGVTQNVLYENQKLIANQFNSAIGKIQDSLSSTASALGKLQDVVNQNAQALNTLVKQLSSNCGAISSVLNDILSRLDKVEAEVQIDRLITCRLQSLQTYVTQQLIRAAEIRASANLAATKMSECVLGQSKRVDFCGKGYHLMSFPQSAPHGVVFLHVTYVPAQEKNFTTAPAICHDGKAHFPREGVFVSNGTHWFVTQRNFYEPQIITTDNTFVSGNCDVVIGIVNNTVYDPLQPELDSGGSGYIPEAPRDGQAYVRKDGEWVLLSTFL

SEQ ID NO: 10439 - protein, 1177 aa, Artificial Sequence
  SARS-CoV-2/Portugal/PT0035/2020__EPI_ISL_418020 spike protein (1-1147)(F970C_G999C) Foldon construct
MFVFLVLLPLVSSQCVNLTTRTQLPPAYTNSFTRGVYYPDKVFRSSVLHSTQDLFLPFFSNVTWFHAIHVSGTNGTKRFDNPVLPFNDGVYFASTEKSNIIRGWIFGTTLDSKTQSLLIVNNATNVVIKVCEFQFCNDPFLGVYYHKNNKSWMESEFRVYSSANNCTFEYVSQPFLMDLEGKQGNFKNLREFVFKNIDGYFKIYSKHTPINLVRDLPQGFSALEPLVDLPIGINITRFQTLLALHRSYLTPGDSSSGWTAGAAAYYVGYLQPRTFLLKYNENGTITDAVDCALDPLSETKCTLKSFTVEKGIYQTSNFRVQPTESIVRFPNITNLCPFGEVFNATRFASVYAWNRKRISNCVADYSVLYNSASFSTFKCYGVSPTKLNDLCFTNVYADSFVIRGDEVRQIAPGQTGKIADYNYKLPDDFTGCVIAWNSNNLDSKVGGNYNYLYRLFRKSNLKPFERDISTEIYQAGSTPCNGVEGFNCYFPLQSYGFQPTNGVGYQPYRVVVLSFELLHAPATVCGPKKSTNLVKNKCVNFNFNGLTGTGVLTESNKKFLPFQQFGRDIADTTDAVRDPQTLEILDITPCSFGGVSVITPGTNTSNQVAVLYQDVNCTEVPVAIHADQLTPTWRVYSTGSNVFQTRAGCLIGAEHVNNSYECDIPIGAGICASYQTQTNSPRRARSVASQSIIAYTMSLGAENSVAYSNNSIAIPTNFTISVTTEILPVSMTKTSVDCTMYICGDSTECSNLLLQYGSFCTQLNRALTGIAVEQDKNTQEVFAQVKQIYKTPPIKDFGGFNFSQILPDPSKPSKRSFIEDLLFNKVTLADAGFIKQYGDCLGDISARDLICAQKFNGLTVLPPLLTDEMIAQYTSALLAGTITSGWTFGAGAALQIPFAMQMAYRFNGIGVTQNVLYENQKLIANQFNSAIGKIQDSLSSTASALGKLQDVVNQNAQALNTLVKQLSSNCGAISSVLNDILSRLDKVEAEVQIDRLITCRLQSLQTYVTQQLIRAAEIRASANLAATKMSECVLGQSKRVDFCGKGYHLMSFPQSAPHGVVFLHVTYVPAQEKNFTTAPAICHDGKAHFPREGVFVSNGTHWFVTQRNFYEPQIITTDNTFVSGNCDVVIGIVNNTVYDPLQPELDSGGSGYIPEAPRDGQAYVRKDGEWVLLSTFL

SEQ ID NO: 10440 - protein, 1177 aa, Artificial Sequence
  SARS-CoV-2/USA/NY-NYUMC7/2020__EPI_ISL_418192 spike protein (1-1147)(F970C_G999C) Foldon construct
MFVFLVLLPLVSSQCVNLTTRTQLPPAYTNSFTRGVYYPDKVFRSSVLHSTQDLFLPFFSNVTWFHAIHVSGTNGTKRFDNPVLPFNDGVYFASTEKSNIIRGWIFGTTLDSKTQSLLIVNNATNVVIKVCEFQFCNDPFLGVYHHKNNKSWMESEFRVYSSANNCTFEYVSQPFLMDLEGKQGNFKNLREFVFKNIDGYFKIYSKHTPINLVRDLPQGFSALEPLVDLPIGINITRFQTLLALHRSYLTPGDSSSGWTAGAAAYYVGYLQPRTFLLKYNENGTITDAVDCALDPLSETKCTLKSFTVEKGIYQTSNFRVQPTESIVRFPNITNLCPFGEVFNATRFASVYAWNRKRISNCVADYSVLYNSASFSTFKCYGVSPTKLNDLCFTNVYADSFVIRGDEVRQIAPGQTGKIADYNYKLPDDFTGCVIAWNSNNLDSKVGGNYNYLYRLFRKSNLKPFERDISTEIYQAGSTPCNGVEGFNCYFPLQSYGFQPTNGVGYQPYRVVVLSFELLHAPATVCGPKKSTNLVKNKCVNFNFNGLTGTGVLTESNKKFLPFQQFGRDIADTTDAVRDPQTLEILDITPCSFGGVSVITPGTNTSNQVAVLYQGVNCTEVPVAIHADQLTPTWRVYSTGSNVFQTRAGCLIGAEHVNNSYECDIPIGAGICASYQTQTNSPRRARSVASQSIIAYTMSLGAENSVAYSNNSIAIPTNFTISVTTEILPVSMTKTSVDCTMYICGDSTECSNLLLQYGSFCTQLNRALTGIAVEQDKNTQEVFAQVKQIYKTPPIKDFGGFNFSQILPDPSKPSKRSFIEDLLFNKVTLADAGFIKQYGDCLGDIAARDLICAQKFNGLTVLPPLLTDEMIAQYTSALLAGTITSGWTFGAGAALQIPFAMQMAYRFNGIGVTQNVLYENQKLIANQFNSAIGKIQDSLSSTASALGKLQDVVNQNAQALNTLVKQLSSNCGAISSVLNDILSRLDKVEAEVQIDRLITCRLQSLQTYVTQQLIRAAEIRASANLAATKMSECVLGQSKRVDFCGKGYHLMSFPQSAPHGVVFLHVTYVPAQEKNFTTAPAICHDGKAHFPREGVFVSNGTHWFVTQRNFYEPQIITTDNTFVSGNCDVVIGIVNNTVYDPLQPELDSGGSGYIPEAPRDGQAYVRKDGEWVLLSTFL

SEQ ID NO: 10441 - protein, 1177 aa, Artificial Sequence
  SARS-CoV-2/Iceland/189/2020__EPI_ISL_417709 spike protein (1-1147)(F970C_G999C) Foldon construct
MFVFLVLLPLVSSQCVNLTTRTQLPPAYTNSFTRGVYYPDKVFRSSVLHSTQDLFLPFFSNVTWFHAIHVSGTNGTKRFDNPVLPFNDGVYFASTEKSNIIRGWIFGTTLDSKTQSLLIVNNATNVVIKVCEFQFCNDPFLGVYYHKNNKSWMESEFRVYSSANNCTFEYVSQPFLMDLEGKQGNFKNLREFVFKNIDGYFKIYSKHTPINLVRDLPQGFSALEPLVDLPIGINITRFQTLLALHRSYLTPGDSSSGWTAGAAAYYVGYLQPRTFLLKYNENGTITDAVDCALDPLSETKCTLKSFTVEKGIYQTSNFRVQPTESIVRFPNITNLCPFGEVFNATRFASVYAWNRKRISNCVADYSVLYNSASFSTFKCYGVSPTKLNDLCFTNVYADSFVIRGDEVRQIAPGQTGKIADYNYKLPDDFTGCVIAWNSNNLDSKVGGNYNYLYRLFRKSNLKPFERDISTEIYQAGSTPCNGVEGFNCYFPLQSYGFQPTNGVGYQPYRVVVLSFELLHAPATVCGPKKSTNLVKNKCVNFNFNGLTGTGVLTESNKKFLPFQQFGRDIADTTDAVRDPQTLEILDITPCSFGGVSVITPGTNTSNQVAVLYQGVNCTEVPVAIHADQLTPTWRVYSTGSNVFQTRAGCLIGAEHVNNSYECDIPIGAGICASYQTQTNSPRRARSVASQSIIAYTMSLGAENSVAYSNNSIAIPTNFTISVTTEILPVSMTKTSVDCTMYICGDSTECSNLLLQYGSFCTQLNRALTGIAVEQDKNTQEVFAQVKQIYKTPPIKDFGGFNFSQILPDPSKPSKRSFIEDLLFNKVTLADAGFTKQYGDCLGDIAARDLICAQKFNGLTVLPPLLTDEMIAQYTSALLAGTITSGWTFGAGAALQIPFAMQMAYRFNGIGVTQNVLYENQKLIANQFNSAIGKIQDSLSSTASALGKLQDVVNQNAQALNTLVKQLSSNCGAISSVLNDILSRLDKVEAEVQIDRLITCRLQSLQTYVTQQLIRAAEIRASANLAATKMSECVLGQSKRVDFCGKGYHLMSFPQSAPHGVVFLHVTYVPAQEKNFTTAPAICHDGKAHFPREGVFVSNGTHWFVTQRNFYEPQIITTDNTFVSGNCDVVIGIVNNTVYDPLQPELDSGGSGYIPEAPRDGQAYVRKDGEWVLLSTFL

SEQ ID NO: 10442 - protein, 1177 aa, Artificial Sequence
  SARS-CoV-2/Australia/NSW56/2020__EPI_ISL_417408 spike protein (1-1147)(F970C_G999C) Foldon construct
MFVFLVLLPLVSSQCVNLTTRTQLPPAYTNSFTRGVYYPDKVFRSSVLHSTQDLFLPFFSNVTWFHAIHVSGTNGTKRFDNPVLPFNDGVYFASTEKSNIIRGWIFGTTLDSKTQSLLIVNNATNVVIKVCEFQFCNDPFLGVYYHKNNKSWMESEFRVYSSANNCTFEYVSQPFLMDLEGKQGNFKNLREFVFKNIDGYFKIYSKHTPINLVRDLPQGFSALEPLVDLPIGINITRFQTLLALHRSYLTPGDSSSGWTAGAAAYYVGYLQPRTFLLKYNENGTITDAVDCALDPLSETKCTLKSFTVEKGIYQTSNFRVQPTESIVRFPNITNLCPFGEVFNATRFASVYAWNRKRISNCVADYSVLYNSASFSTFKCYGVSPTKLNDLCFTNVYADSFVIRGDEVRQIAPGQTGKIADYNYKLPDDFTGCVIAWNSNNLDSKVGGNYNYLYRLFRKSNLKPFERDISTEIYQAGSTPCNGVEGFNCYFPLQSYGFQPTNGVGYQPYRVVVLSFELLHAPATVCGPKKSTNLVKNKCVNFNFNGLTGTGVLTESNKKFLPFQQFGRDIADTTDAVRDPQTLEILDITPCSFGGVSVITPGTNTSNQVAVLYQDVNCTEVPVAIHADQLTPTWRVYSTGSNVFQTRAGCLIGAEHVNNSYECDIPIGAGICASYQTQTNSPRRARSVASQSIIAYTMSLGAENSVAYSNNSIAIPTNFTISVTTEILPVSMTKTSVDCTMYICGDSTECSNLLLQYGSFCTQLNRALTGIAVEQDKNTQEVFAQVKQIYKTPPIKDFGGFNFSQILPDSSKPSKRSFIEDLLFNKVTLADAGFIKQYGDCLGDIAARDLICAQKFNGLTVLPPLLTDEMIAQYTSALLAGTITSGWTFGAGAALQIPFAMQMAYRFNGIGVTQNVLYENQKLIANQFNSAIGKIQDSLSSTASALGKLQDVVNQNAQALNTLVKQLSSNCGAISSVLNDILSRLDKVEAEVQIDRLITCRLQSLQTYVTQQLIRAAEIRASANLAATKMSECVLGQSKRVDFCGKGYHLMSFPQSAPHGVVFLHVTYVPAQEKNFTTAPAICHDGKAHFPREGVFVSNGTHWFVTQRNFYEPQIITTDNTFVSGNCDVVIGIVNNTVYDPLQPELDSGGSGYIPEAPRDGQAYVRKDGEWVLLSTFL

SEQ ID NO: 10443 - protein, 1177 aa, Artificial Sequence
  SARS-CoV-2/Iceland/280/2020__EPI_ISL_417608 spike protein (1-1147)(F970C_G999C) Foldon construct
MFVFLVLLPLVSSQCVNLTTRTQLPPAYTNSFTRGVYYPDKVFRSSVLHSTQDLFLPFFSNVTWFHAIHVSGTNGTKRFDNPVLPFNDGVYFASTEKSNIIRGWIFGTTLDSKTQSLLIVNNATNVVIKVCEFQFCNDPFLGVYYHKNNKSWMESEFRVYSSANNCTFEYVSQPFLMDLEGKQGNFKNLREFVFKNIDGYFKIYSKHTPINLVRDLPQGFSALEPLVDLPIGINITRFQTLLALHRSYLTPGDSSSGWTAGAAAYYVGYLQPRTFLLKYNENGTITDAVDCALDPLSETKCTLKSFTVEKGIYQTSNFRVQPTESIVRFPNITNLCPFGEVFNATRFASVYAWNRKRISNCVADYSVLYNSASFSTFKCYGVSPTKLNDLCFTNVYADSFVIRGDEVRQIAPGQTGKIADYNYKLPDDFTGCVIAWNSNNLDSKVGGNYNYLYRLFRKSNLKPFERDISTEIYQAGSTPCNGVEGFNCYFPLQSYGFQPTNGVGYQPYRVVVLSFELLHAPATVCGPKKSTNLVKNKCVNFNFNGLTGTGVLTESNKKFLPFQQFGRDIADTTDAVRDPQTLEILDITPCSFGGVSVITPGTNTSNQVAVLYQGVNCTEVPVAIHADQLTPTWRVYSTGSNVFQTRAGCLIGAEHVNNSYECDIPIGAGICASYHTQTNSPRRARSVASQSIIAYTMSLGAENSVAYSNNSIAIPTNFTISVTTEILPVSMTKTSVDCTMYICGDSTECSNLLLQYGSFCTQLNRALTGIAVEQDKNTQEVFAQVKQIYKTPPIKDFGGFNFSQILPDPSKPSKRSFIEDLLFNKVTLADAGFIKQYGDCLGDIAARDLICAQKFNGLTVLPPLLTDEMIAQYTSALLAGTITSGWTFGAGAALQIPFAMQMAYRFNGIGVTQNVLYENQKLIANQFNSAIGKIQDSLSSTASALGKLQDVVNQNAQALNTLVKQLSSNCGAISSVLNDILSRLDKVEAEVQIDRLITCRLQSLQTYVTQQLIRAAEIRASANLAATKMSECVLGQSKRVDFCGKGYHLMSFPQSAPHGVVFLHVTYVPAQEKNFTTAPAICHDGKAHFPREGVFVSNGTHWFVTQRNFYEPQIITTDNTFVSGNCDVVIGIVNNTVYDPLQPELDSGGSGYIPEAPRDGQAYVRKDGEWVLLSTFL

SEQ ID NO: 10444 - protein, 1177 aa, Artificial Sequence; identical to SEQ ID NO: 10399
  SARS-CoV-2/Iceland/247/2020__EPI_ISL_417575 spike protein (1-1147)(F970C_G999C) Foldon construct

SEQ ID NO: 10445 - protein, 1177 aa, Artificial Sequence
  SARS-CoV-2/Iceland/238/2020__EPI_ISL_417566 spike protein (1-1147)(F970C_G999C) Foldon construct
MFVFLVLLPLVSSQCVNLTTRTQLPPAYTNSFTRGVYYPDKVFRSSVLHSTQDLFLPFFSNVTWFHAIHVSGTNGTKRFDNPVLPFNDGVYFASTEKSNIIRGWIFGTTLDSKTQSLLIVNNATNVVIKVCEFQFCNDPFLGVYYHKNNKSWMESEFRVYSSANNCTFEYVSQPFLMDLEGKQGNFKNLREFVFKNIDGYFKIYSKHTPINLVRDLPQGFSALEPLVDLPIGINITRFQTLLALHRSYLTPGDSSSGWTAGAAAYYVGYLQPRTFLLKYNENGTITDAVDCALDPLSETKCTLKSFTVEKGIYQTSNFRVQPTESIVRFPNITNLCPFGEVFNATRFASVYAWNRKRISNCVADYSVLYNSASFSTFKCYGVSPTKLNDLCFTNVYADSFVIRGDEVRQIAPGQTGKIADYNYKLPDDFTGCVIAWNSNNLDSKVGGNYNYLYRLFRKSNLKPFERDISTEIYQAGSTPCNGVEGFNCYFPLQSYGFQPTNGVGYQPYRVVVLSFELLHAPATVCGPKKSTNLVKNKCVNFNFNGLTGTGVLTESNKKFLPFQQFGRDIADTTDAVRDPQTLEILDITPCSFGGVSVITPGTNTSNQVAVLYQGVNCTEVPVAIHADQLTPTWRVYSTGSNVFQTRAGCLIGAEHVNNSYECDIPIGAGICASYQTQTNSPRRARSVASQSIIAYTMSLGAENSVAYSNNSIAIPTNFTISVTTEILPVSMTKTSVDCTMYICGDSTECSNLLLQYGSFCTQLNRALTGIAVEQDKNTQEVFAQVKQIYKTPPIKDFGGFNFSQILPDPSKPSKRSFIEDLLFNKVTLADVGFIKQYGDCLGDIAARDLICAQKFNGLTVLPPLLTDEMIAQYTSALLAGTITSGWTFGAGAALQIPFAMQMAYRFNGIGVTQNVLYENQKLIANQFNSAIGKIQDSLSSTASALGKLQDVVNQNAQALNTLVKQLSSNCGAISSVLNDILSRLDKVEAEVQIDRLITCRLQSLQTYVTQQLIRAAEIRASANLAATKMSECVLGQSKRVDFCGKGYHLMSFPQSAPHGVVFLHVTYVPAQEKNFTTAPAICHDGKAHFPREGVFVSNGTHWFVTQRNFYEPQIITTDNTFVSGNCDVVIGIVNNTVYDPLQPELDSGGSGYIPEAPRDGQAYVRKDGEWVLLSTFL

SEQ ID NO: 10446 - protein, 1177 aa, Artificial Sequence
  SARS-CoV-2/Greece/16/2020__EPI_ISL_418265 spike protein (1-1147)(F970C_G999C) Foldon construct
MFVFLVLLPLVSSQCVNLTTRTQLPPAYTNSFTRGVYYPDKVFRSSVLHSTQDLFLPFFSNVTWFHAIHVSGTNGTKRFDNPVLPFNDGVYFASTEKSNIIRGWIFGTTLDSKTQSLLIVNNATNVVIKVCEFQFCNDPFLGVYYHKNNKSWMESEFRVYSSANNCTFEYVSQPFLMDLEGKQGNFKNLREFVFKNVDGYFKIYSKHTPINLVRDLPQGFSALEPLVDLPIGINITRFQTLLALHRSYLTPGDSSSGWTAGAAAYYVGYLQPRTFLLKYNENGTITDAVDCALDPLSETKCTLKSFTVEKGIYQTSNFRVQPTESIVRFPNITNLCPFGEVFNATRFASVYAWNRKRISNCVADYSVLYNSASFSTFKCYGVSPTKLNDLCFTNVYADSFVIRGDEVRQIAPGQTGKIADYNYKLPDDFTGCVIAWNSNNLDSKVGGNYNYLYRLFRKSNLKPFERDISTEIYQAGSTPCNGVEGFNCYFPLQSYGFQPTNGVGYQPYRVVVLSFELLHAPATVCGPKKSTNLVKNKCVNFNFNGLTGTGVLTESNKKFLPFQQFGRDIADTTDAVRDPQTLEILDITPCSFGGVSVITPGTNTSNQVAVLYQDVNCTEVPVAIHADQLTPTWRVYSTGSNVFQTRAGCLIGAEHVNNSYECDIPIGAGICASYQTQTNSPRRARSVASQSIIAYTMSLGAENSVAYSNNSIAIPTNFTISVTTEILPVSMTKTSVDCTMYICGDSTECSNLLLQYGSFCTQLNRALTGIAVEQDKNTQEVFAQVKQIYKTPPIKDFGGFNFSQILPDPSKPSKRSFIEDLLFNKVTLADAGFIKQYGDCLGDIAARDLICAQKFNGLTVLPPLLTDEMIAQYTSALLAGTITSGWTFGAGAALQIPFAMQMAYRFNGIGVTQNVLYENQKLIANQFNSAIGKIQDSLSSTASALGKLQDVVNQNAQALNTLVKQLSSNCGAISSVLNDILSRLDKVEAEVQIDRLITCRLQSLQTYVTQQLIRAAEIRASANLAATKMSECVLGQSKRVDFCGKGYHLMSFPQSAPHGVVFLHVTYVPAQEKNFTTAPAICHDGKAHFPREGVFVSNGTHWFVTQRNFYEPQIITTDNTFVSGNCDVVIGIVNNTVYDPLQPELDSGGSGYIPEAPRDGQAYVRKDGEWVLLSTFL

SEQ ID NO: 10447 - protein, 1177 aa, Artificial Sequence
  SARS-CoV-2/Iceland/319/2020__EPI_ISL_417648 spike protein (1-1147)(F970C_G999C) Foldon construct
MFVFLVLLPLVSSQCVNLTTRTQLPPAYTNSFTRGVYYPDKVFRSSVLHSTQDLFLPFFSNVTWFHAIHVSGTNGTKRFDNPVLPFNDGVYFASTEKSNIIRGWIFGTTLDSKTQSLLIVNNATNVVIKVCEFQFCNDPFLGVYYHKNNKSWMESEFRVYSSANNCTFEYVSQPFLIDLEGKQGNFKNLREFVFKNIDGYFKIYSKHTPINLVRDLPQGFSALEPLVDLPIGINITRFQTLLALHRSYLTPGDSSSGWTAGAAAYYVGYLQPRTFLLKYNENGTITDAVDCALDPLSETKCTLKSFTVEKGIYQTSNFRVQPTESIVRFPNITNLCPFGEVFNATRFASVYAWNRKRISNCVADYSVLYNSASFSTFKCYGVSPTKLNDLCFTNVYADSFVIRGDEVRQIAPGQTGKIADYNYKLPDDFTGCVIAWNSNNLDSKVGGNYNYLYRLFRKSNLKPFERDISTEIYQAGSTPCNGVEGFNCYFPLQSYGFQPTNGVGYQPYRVVVLSFELLHAPATVCGPKKSTNLVKNKCVNFNFNGLTGTGVLTESNKKFLPFQQFGRDIADTTDAVRDPQTLEILDITPCSFGGVSVITPGTNTSNQVAVLYQGVNCTEVPVAIHADQLTPTWRVYSTGSNVFQTRAGCLIGAEHVNNSYECDIPIGAGICASYQTQTNSPRRARSVASQSIIAYTMSLGAENSVAYSNNSIAIPTNFTISVTTEILPVSMTKTSVDCTMYICGDSTECSNLLLQYGSFCTQLNRALTGIAVEQDKNTQEVFAQVKQIYKTPPIKDFGGFNFSQILPDPSKPSKRSFIEDLLFNKVTLADAGFIKQYGDCLGDIAARDLICAQKFNGLTVLPPLLTDEMIAQYTSALLAGTITSGWTFGAGAALQIPFAMQMAYRFNGIGVTQNVLYENQKLIANQFNSAIGKIQDSLSSTASALGKLQDVVNQNAQALNTLVKQLSSNCGAISSVLNDILSRLDKVEAEVQIDRLITCRLQSLQTYVTQQLIRAAEIRASANLAATKMSECVLGQSKRVDFCGKGYHLMSFPQSAPHGVVFLHVTYVPAQEKNFTTAPAICHDGKAHFPREGVFVSNGTHWFVTQRNFYEPQIITTDNTFVSGNCDVVIGIVNNTVYDPLQPELDSGGSGYIPEAPRDGQAYVRKDGEWVLLSTFL

SEQ ID NO: 10448 - protein, 1177 aa, Artificial Sequence
  SARS-CoV-2/Congo/94/2020__EPI_ISL_417947 spike protein (1-1147)(F970C_G999C) Foldon construct
MFVFLVLLPLVSSQCVNLTTRTQLPPAYTNSFTRGVYYPDKVFRSSVLHSTQDLFLPFFSNVTWFHAIHVSGTNGTKRFDNPVLPFNDGVYFASTEKSNIIRGWIFGTTLDSKTQSLLIVNNATNVVIKVCEFQFCNDPFLGVYYHKNNKSWMESEFRVYSSANNCTFEYVSQPFLMDLEGKQGNFKNLREFVFKNIDGYFKIYSKHTPINLVRDLPQGFSALEPLVDLPIGINITRFQTLLALHRSYLTPGDSSSGWTAGAAAYYVGYLQPRTFLLKYNENGTITDAVDCALDPLSETKCTLKSFTVEKGIYQTSNFRVQPTESIVRFPNITNLCPFGEVFNATRFASVYAWNRKRISNCVADYSVLYNSASFSTFKCYGVSPTKLNDLCFTNVYADSFVIRGDEVRQIAPGQTGKIADYNYKLPDDFTGCVIAWNSNNLDSKVGGNYNYLYRLFRKSNLKPFERDISTEIYQAGSTPCNGVEGFNCYFPLQSYGFQPTNGVGYQPYRVVVLSFELLHAPATVCGPKKSTNLVKNKCVNFNFNGLTGTGVLTESNKKFLPFQQFGRDIADTTDAVRDPQTLEILDITPCSFGGVSVITPGTNTSNQVAVLYQGVNCTEVPVAIHADQLTPTWRVYSTGSNVFQTRAGCLIGAEHVNNSYECDIPIGAGICASYQTQTNSPRRARSVASQSIIAYTMSLGAENSVAYSNNSIAIPTNFTISVTTEILPVSMTKTSVDCTMYICGDSTECSNLLLQYGSFCTQLNRALTGIAVEQDKNTQEVFAQVKQIYKTPPIKDFGGFNFSQILPDPSKPSKRSFIEDILFNKVTLADAGFIKQYGDCLGDIAARDLICAQKFNGLTVLPPLLTDEMIAQYTSALLAGTITSGWTFGAGAALQIPFAMQMAYRFNGIGVTQNVLYENQKLIANQFNSAIGKIQDSLSSTASALGKLQDVVNQNAQALNTLVKQLSSNCGAISSVLNDILSRLDKVEAEVQIDRLITCRLQSLQTYVTQQLIRAAEIRASANLAATKMSECVLGQSKRVDFCGKGYHLMSFPQSAPHGVVFLHVTYVPAQEKNFTTAPAICHDGKAHFPREGVFVSNGTHWFVTQRNFYEPQIITTDNTFVSGNCDVVIGIVNNTVYDPLQPELDSGGSGYIPEAPRDGQAYVRKDGEWVLLSTFL

SEQ ID NO: 10449 - protein, 1177 aa, Artificial Sequence
  SARS-CoV-2/Congo/158/2020__EPI_ISL_417950 spike protein (1-1147)(F970C_G999C) Foldon construct
MFVFLVLLPLVSSQCVNLTTRTQLPPAYTNSFTRGVYYPDKVFRSSVLHSTQDLFLPFFSNVTWFHAIHVSGTNGTKRFDNPVLPFNDGVYFASTEKSNIIRGWIFGTTLDSKTQSLLIVNNATNVVIKVCEFQFCNDPFLGVYYHKNNKSWMESEFRVYSSANNCTFEYVSQPFLMDLEGKQGNFKNLREFVFKNIDGYFKIYSKHTPINLVRDLPQGFSALEPLVDLPIGINITRFQTLLALHRSYLTPGDSSSGWTAGAAAYYVGYLQPRTFLLKYNENGTITDAVDCALDPLSETKCTLKSFTVEKGIYQTSNFRVQPTESIVRFPNITNLCPFGEVFNATRFASVYAWNRKRISNCVADYSVLYNSASFSTFKCYGVSPTKLNDLCFTNVYADSFVIRGDEVRQIAPGQTGKIADYNYKLPDDFTGCVIAWNSNNLDSKVGGNYNYLYRLFRKSNLKPFERDISTEIYQAGSTPCNGVEGFNCYFPLQSYGFQPTNGVGYQPYRVVVLSFELLHAPATVCGPKKSTNLVKNKCVNFNFNGLTGTGVLTESNKKFLPFQQFGRDIADTTDAVRDPQTLEILDITPCSFGGVSVITPGTNTSNQVAVLYQDVNCTEVPVAIHADQLTPTWRVYSTGSNVFQTRAGCLIGAEHVNNSYECDIPIGAGICASYQTQTNSPRRARSVASQSIIAYTMSLGAENSVAYSNNSIAIPTNFTISVTTEILPVSMTKTSVDCTMYICGDSTECSNLLLQYGSFCTQLNRALTGIAVEQDKNTQEVFAQVKQIYKTPPIKDFGGFNFSQILPDPSKPSKRSFIEDLLFNKVTLADAGFIKQYGDCLGDIAARDLICAQKFNGLTVLPPLLTDEMIAQYTSALLAGTITSGWTFGAGAALQIPFAMQMAYRFNGIGVTQNVLYENQKLIANQFNSAIGKIQDSLSSTASALGKLQDVVNQNAQALNTLVKQLSSNCGAISSVLNDILSRLDKVEAEVQIDRLITCRLQSLQTYVTQQLIRAAEIRASANLAATKMSECVLGQSKRVDFCGKGYHLMSFPQSAPHGVVFLHVTYVPAQEKNFTTAPAICHDGKAHFPREGVFVSNGTHWFVTQRNFYEPQIITTDNTFLSGNCDVVIGIVNNTVYDPLQPELDSGGSGYIPEAPRDGQAYVRKDGEWVLLSTFL

SEQ ID NO: 10450 - protein, 1177 aa, Artificial Sequence
  SARS-CoV-2/USA/UT-00034/2020__EPI_ISL_417977 spike protein (1-1147)(F970C_G999C) Foldon construct
MFVFLVLLPLVSSQCVNLTTRTQLPPAYTNSFTRGVYYPDKVFRSSVLHSTQDLFLPFFSNVTWFHAIHVSGTNGTKRFDNPVLPFNDGVYFASTEKSNIIRGWIFGTTLDSKTQSLLIVNNATNVVIKVCEFQFCNDPFLGVYYYKNNKSWMESEFRVYSSANNCTFEYVSQPFLMDLEGKQGNFKNLREFVFKNIDGYFKIYSKHTPINLVRDLPQGFSALEPLVDLPIGINITRFQTLLALHRSYLTPGDSSSGWTAGAAAYYVGYLQPRTFLLKYNENGTITDAVDCALDPLSETKCTLKSFTVEKGIYQTSNFRVQPTESIVRFPNITNLCPFGEVFNATRFASVYAWNRKRISNCVADYSVLYNSASFSTFKCYGVSPTKLNDLCFTNVYADSFVIRGDEVRQIAPGQTGKIADYNYKLPDDFTGCVIAWNSNNLDSKVGGNYNYLYRLFRKSNLKPFERDISTEIYQAGSTPCNGVEGFNCYFPLQSYGFQPTNGVGYQPYRVVVLSFELLHAPATVCGPKKSTNLVKNKCVNFNFNGLTGTGVLTESNKKFLPFQQFGRDIADTTDAVRDPQTLEILDITPCSFGGVSVITPGTNTSNQVAVLYQGVNCTEVPVAIHADQLTPTWRVYSTGSNVFQTRAGCLIGAEHVNNSYECDIPIGAGICASYQTQTNSPRRARSVASQSIIAYTMSLGAENSVAYSNNSIAIPTNFTISVTTEILPVSMTKTSVDCTMYICGDSTECSNLLLQYGSFCTQLNRALTGIAVEQDKNTQEVFAQVKQIYKTPPIKDFGGFNFSQILPDPSKPSKRSFIEDLLFNKVTLADAGFIKQYGDCLGDIAARDLICAQKFNGLTVLPPLLTDEMIAQYTSALLAGTITSGWTFGAGAALQIPFAMQMAYRFNGIGVTQNVLYENQKLIANQFNSAIGKIQDSLSSTASALGKLQDVVNQNAQALNTLVKQLSSNCGAISSVLNDILSRLDKVEAEVQIDRLITCRLQSLQTYVTQQLIRAAEIRASANLAATKMSECVLGQSKRVDFCGKGYHLMSFPQSAPHGVVFLHVTYVPAQEKNFTTAPAICHDGKAHFPREGVFVSNGTHWFVTQRNFYEPQIITTDNTFVSGNCDVVIGIVNNTVYDPLQPELDSGGSGYIPEAPRDGQAYVRKDGEWVLLSTFL

SEQ ID NO: 10451 - protein, 1177 aa, Artificial Sequence
  SARS-CoV-2/USA/UT-00033/2020__EPI_ISL_417976 spike protein (1-1147)(F970C_G999C) Foldon construct
MFVFLVLLPLVSSQCVNLTTRTQLPPAYTNSFTRGVYYPDKVFRSSVLHSTQDLFLPFFSNVTWFHAIHVSGTNGTKRFDNPVLPFNDGVYFASTEKSNIIRGWIFGTTLDSKTQSLLIVNNATNVVIKVCEFQFCNDPFLGVYYHKNNKSWMESEFRVYSSANNCTFEYVSQPFLMDLEGKQGNFKNLREFVFKNIDGYFKIYSKHTPINLVRDLPQGFSALEPLVDLPIGINITRFQTLLALHRSYLTPGDSSSGLTAGAAAYYVGYLQPRTFLLKYNENGTITDAVDCALDPLSETKCTLKSFTVEKGIYQTSNFRVQPTESIVRFPNITNLCPFGEVFNATRFASVYAWNRKRISNCVADYSVLYNSASFSTFKCYGVSPTKLNDLCFTNVYADSFVIRGDEVRQIAPGQTGKIADYNYKLPDDFTGCVIAWNSNNLDSKVGGNYNYLYRLFRKSNLKPFERDISTEIYQAGSTPCNGVEGFNCYFPLQSYGFQPTNGVGYQPYRVVVLSFELLHAPATVCGPKKSTNLVKNKCVNFNFNGLTGTGVLTESNKKFLPFQQFGRDIADTTDAVRDPQTLEILDITPCSFGGVSVITPGTNTSNQVAVLYQGVNCTEVPVAIHADQLTPTWRVYSTGSNVFQTRAGCLIGAEHVNNSYECDIPIGAGICASYQTQTNSPRRARSVASQSIIAYTMSLGAENSVAYSNNSIAIPTNFTISVTTEILPVSMTKTSVDCTMYICGDSTECSNLLLQYGSFCTQLNRALTGIAVEQDKNTQEVFAQVKQIYKTPPIKDFGGFNFSQILPDPSKPSKRSFIEDLLFNKVTLADAGFIKQYGDCLGDIAARDLICAQKFNGLTVLPPLLTDEMIAQYTSALLAGTITSGWTFGAGAALQIPFAMQMAYRFNGIGVTQNVLYENQKLIANQFNSAIGKIQDSLSSTASALGKLQDVVNQNAQALNTLVKQLSSNCGAISSVLNDILSRLDKVEAEVQIDRLITCRLQSLQTYVTQQLIRAAEIRASANLAATKMSECVLGQSKRVDFCGKGYHLMSFPQSAPHGVVFLHVTYVPAQEKNFTTAPAICHDGKAHFPREGVFVSNGTHWFVTQRNFYEPQIITTDNTFVSGNCDVVIGIVNNTVYDPLQPELDSGGSGYIPEAPRDGQAYVRKDGEWVLLSTFL

SEQ ID NO: 10452 - protein, 1177 aa, Artificial Sequence
  SARS-CoV-2/USA/WI-13/2020__EPI_ISL_417516 spike protein (1-1147)(F970C_G999C) Foldon construct
MFVFLVLLPLVSSQCVNLTTRTQLPPAYTNSFTRGVYYPDKVFRSSVLHSTQDLFLPFFSNVTWFHAIHVSGTNGTKRFDNPVLPFNDGVYFASTEKSNIIRGWIFGTTLDSKTQSLLIVNNATNVVIKVCEFQFCNDPFLGVYYHKNNKSWMESEFRVYSSANNCTFEYVSQPFLMDLEGKQGNFKNLREFVFKNIDGYFKIYSKHTPINLVRDLPQGFSALEPLVDLPIGINITRFQTLLALHRSYLTPGDSSSGWTAGAAAYYVGYLQPRTFLLKYNENGTITDAVDCALDPLSETKCTLKSFTVEKGIYQTSNFRVLPTESIVRFPNITNLCPFGEVFNATRFASVYAWNRKRISNCVADYSVLYNSASFSTFKCYGVSPTKLNDLCFTNVYADSFVIRGDEVRQIAPGQTGKIADYNYKLPDDFTGCVIAWNSNNLDSKVGGNYNYLYRLFRKSNLKPFERDISTEIYQAGSTPCNGVEGFNCYFPLQSYGFQPTNGVGYQPYRVVVLSFELLHAPATVCGPKKSTNLVKNKCVNFNFNGLTGTGVLTESNKKFLPFQQFGRDIADTTDAVRDPQTLEILDITPCSFGGVSVITPGTNTSNQVAVLYQGVNCTEVPVAIHADQLTPTWRVYSTGSNVFQTRAGCLIGAEHVNNSYECDIPIGAGICASYQTQTNSPRRARSVASQSIIAYTMSLGAENSVAYSNNSIAIPTNFTISVTTEILPVSMTKTSVDCTMYICGDSTECSNLLLQYGSFCTQLNRALTGIAVEQDKNTQEVFAQVKQIYKTPPIKDFGGFNFSQILPDPSKPSKRSFIEDLLFNKVTLADAGFIKQYGDCLGDIAARDLICAQKFNGLTVLPPLLTDEMIAQYTSALLAGTITSGWTFGAGAALQIPFAMQMAYRFNGIGVTQNVLYENQKLIANQFNSAIGKIQDSLSSTASALGKLQDVVNQNAQALNTLVKQLSSNCGAISSVLNDILSRLDKVEAEVQIDRLITCRLQSLQTYVTQQLIRAAEIRASANLAATKMSECVLGQSKRVDFCGKGYHLMSFPQSAPHGVVFLHVTYVPAQEKNFTTAPAICHDGKAHFPREGVFVSNGTHWFVTQRNFYEPQIITTDNTFVSGNCDVVIGIVNNTVYDPLQPELDSGGSGYIPEAPRDGQAYVRKDGEWVLLSTFL

SEQ ID NO: 10453 - protein, 1176 aa, Artificial Sequence
  SARS-CoV-2/India/1-27/2020__EPI_ISL_413522 spike protein (1-1146)(F969C_G998C) Foldon construct
MFVFLVLLPLVSSQCVNLTTRTQLPPAYTNSFTRGVYYPDKVFRSSVLHSTQDLFLPFFSNVTWFHAIHVSGTNGTKRFDNPVLPFNDGVYFASTEKSNIIRGWIFGTTLDSKTQSLLIVNNATNVVIKVCEFQFCNDPFLGVYHKNNKSWMESEFRVYSSANNCTFEYVSQPFLMDLEGKQGNFKNLREFVFKNIDGYFKIYSKHTPINLVRDLPQGFSALEPLVDLPIGINITRFQTLLALHRSYLTPGDSSSGWTAGAAAYYVGYLQPRTFLLKYNENGTITDAVDCALDPLSETKCTLKSFTVEKGIYQTSNFRVQPTESIVRFPNITNLCPFGEVFNATRFASVYAWNRKRISNCVADYSVLYNSASFSTFKCYGVSPTKLNDLCFTNVYADSFVIRGDEVIQIAPGQTGKIADYNYKLPDDFTGCVIAWNSNNLDSKVGGNYNYLYRLFRKSNLKPFERDISTEIYQAGSTPCNGVEGFNCYFPLQSYGFQPTNGVGYQPYRVVVLSFELLHAPATVCGPKKSTNLVKNKCVNFNFNGLTGTGVLTESNKKFLPFQQFGRDIADTTDAVRDPQTLEILDITPCSFGGVSVITPGTNTSNQVAVLYQDVNCTEVPVAIHADQLTPTWRVYSTGSNVFQTRAGCLIGAEHVNNSYECDIPIGAGICASYQTQTNSPRRARSVASQSIIAYTMSLGAENSVAYSNNSIAIPTNFTISVTTEILPVSMTKTSVDCTMYICGDSTECSNLLLQYGSFCTQLNRALTGIAVEQDKNTQEVFAQVKQIYKTPPIKDFGGFNFSQILPDPSKPSKRSFIEDLLFNKVTLADAGFIKQYGDCLGDIAARDLICAQKFNGLTVLPPLLTDEMIAQYTSALLAGTITSGWTFGAGAALQIPFAMQMAYRFNGIGVTQNVLYENQKLIANQFNSAIGKIQDSLSSTASALGKLQDVVNQNAQALNTLVKQLSSNCGAISSVLNDILSRLDKVEAEVQIDRLITCRLQSLQTYVTQQLIRAAEIRASANLAATKMSECVLGQSKRVDFCGKGYHLMSFPQSAPHGVVFLHVTYVPAQEKNFTTAPAICHDGKAHFPREGVFVSNGTHWFVTQRNFYEPQIITTDNTFVSGNCDVVIGIVNNTVYDPLQPELDSGGSGYIPEAPRDGQAYVRKDGEWVLLSTFL

SEQ ID NO: 10454 - protein, 1171 aa, Artificial Sequence
  SARS-CoV-2/pangolin/Guangxi/P4L/2017__EPI_ISL_410538 spike protein (1-1141)(F964C_G993C) Foldon construct
MFVFLFVLPLVSSQCVNLTTRTGIPPGYTNSSTRGVYYPDKVFRSSILHLTQDLFLPFFSNVTWFNTINYQGGFKKFDNPVLPFNDGVYFASTEKSNIIRGWIFGTTLDARTQSLLIVNNATNVVIKVCEFQFCTDPFLGVYYHNNNKTWVENEFRVYSSANNCTFEYISQPFLMDLEGKQGNFKNLREFVFKNVDGYFKIYSKHTPIDLVRDLPRGFAALEPLVDLPIGINITRFQTLLALHRSYLTPGNLESGWTTGAAAYYVGYLQQRTFLLSYNQNGTITDAVDCSLDPLSETKCTLKSLTVEKGIYQTSNFRVQPTISIVRFPNITNLCPFGEVFNASKFASVYAWNRKRISNCVADYSVLYNSTSFSTFKCYGVSPTKLNDLCFTNVYADSFVVKGDEVRQIAPGQTGVIADYNYKLPDDFTGCVIAWNSVKQDALTGGNYGYLYRLFRKSKLKPFERDISTEIYQAGSTPCNGQVGLNCYYPLERYGFHPTTGVNYQPFRVVVLSFELLNGPATVCGPKLSTTLVKDKCVNFNFNGLTGTGVLTTSKKQFLPFQQFGRDISDTTDAVRDPQTLEILDITPCSFGGVSVITPGTNTSNQVAVLYQDVNCTEVPMAIHAEQLTPAWRVYSAGANVFQTRAGCLVGAEHVNNSYECDIPVGAGICASYHSMSSLRSVNQRSIIAYTMSLGAENSVAYSNNSIAIPTNFTISVTTEILPVSMTKTSVDCTMYICGDSIECSNLLLQYGSFCTQLNRALTGIAVEQDKNTQEVFAQVKQIYKTPPIKDFGGFNFSQILPDPSKPSKRSFIEDLLFNKVTLADAGFIKQYGDCLGDIAARDLICAQKFNGLTVLPPLLTDEMIAQYTSALLAGTITSGWTFGAGAALQIPFAMQMAYRFNGIGVTQNVLYENQKLIANQFNSAIGKIQDSLSSTASALGKLQDVVNQNAQALNTLVKQLSSNCGAISSVLNDILSRLDKVEAEVQIDRLITCRLQSLQTYVTQQLIRAAEIRASANLAATKMSECVLGQSKRVDFCGKGYHLMSFPQSAPHGVVFLHVTYVPAQEKNFTTAPAICHEGKAHFPREGVFVSNGTHWFITQRNFYEPQIITTDNTFVSGSCDVVIGIVNNTVYDPLQPELDSGGSGYIPEAPRDGQAYVRKDGEWVLLSTFL

SEQ ID NO: 10455 - protein, 1171 aa, Artificial Sequence
  SARS-CoV-2/pangolin/Guangxi/P5L/2017__EPI_ISL_410540 spike protein (1-1141)(F964C_G993C) Foldon construct
MFVFLFVLPLVSSQCVNLTTRTGIPPGYTNSSTRGVYYPDKVFRSSILHLTQDLFLPFFSNVTWFNTINYQGGFKKFDNPVLPFNDGVYFASTEKSNIIRGWIFGTTLDARTQSLLIVNNATNVVIKVCEFQFCTDPFLGVYYHNNNKTWVENEFRVYSSANNCTFEYISQPFLMDLEGKQGNFKNLREFVFKNVDGYFKIYSKHTPIDLVRDLPRGFAALEPLVDLPIGINITRFQTLLALHRSYLTPGKLESGWTTGAAAYYVGYLQQRTFLLSYNQNGTITDAVDCSLDPLSETKCTLKSLTVEKGIYQTSNFRVQPTISIVRFPNITNLCPFGEVFNASKFASVYAWNRKRISNCVADYSVLYNSTSFSTFKCYGVSPTKLNDLCFTNVYADSFVVKGDEVRQIAPGQTGVIADYNYKLPDDFTGCVIAWNSVKQDALTGGNYGYLYRLFRKSKLKPFERDISTEIYQAGSTPCNGQVGLNCYYPLERYGFHPTTGVNYQPFRVVVLSFELLNGPATVCGPKLSTTLVKDKCVNFNFNGLTGTGVLTTSKKQFLPFQQFGRDISDTTDAVRDPQTLEILDITPCSFGGVSVITPGTNTSNQVAVLYQDVNCTEVPMAIHAEQLTPAWRVYSAGANVFQTRAGCLVGAEHVNNSYECDIPVGAGICASYHSMSSFRSVNQRSIIAYTMSLGAENSVAYSNNSIAIPTNFTISVTTEILPVSMTKTSVDCTMYICGDSIECSNLLLQYGSFCTQLNRALTGIAVEQDKNTQEVFAQVKQIYKTPPIKDFGGFNFSQILPDPSKPSKRSFIEDLLFNKVTLADAGFIKQYGDCLGDIAARDLICAQKFNGLTVLPPLLTDEMIAQYTSALLAGTITSGWTFGAGAALQIPFAMQMAYRFNGIGVTQNVLYENQKLIANQFNSAIGKIQDSLSSTASALGKLQDVVNQNAQALNTLVKQLSSNCGAISSVLNDILSRLDKVEAEVQIDRLITCRLQSLQTYVTQQLIRAAEIRASANLAATKMSECVLGQSKRVDFCGKGYHLMSFPQSAPHGVVFLHVTYVPAQEKNFTTAPAICHEGKAHFPREGVFVSNGTHWFITQRNFYEPQIITTDNTFVSGSCDVVIGIVNNTVYDPLQPELDSGGSGYIPEAPRDGQAYVRKDGEWVLLSTFL

SEQ ID NO: 10456 - protein, 1171 aa, Artificial Sequence
  SARS-CoV-2/pangolin/Guangxi/P5E/2017__EPI_ISL_410541 spike protein (1-1141)(F964C_G993C) Foldon construct
MFVFLFVLPLVSSQCVNLTTRTGIPPGYTNSSTRGVYYPDKVFRSSILHLTQDLFLPFFSNVTWFNTITYQGGSKKFDNPVLPFNDGVYFASTEKSNIIRGWIFGTTLDARTQSLLIVNNATNVVIKVCEFQFCTDPFLGVYYHNNNKTWVENEFRVYSSANNCTFEYISQPFLMDLEGKQGNFKNLREFVFKNVDGYFKIYSKHTPIDLVRDLPRGFAALEPLVDLPIGINITRFQTLLALHRSYLTPGKLESGWTTGAAAYYVGYLQQRTFLLSYNQNGTITDAVDCSLDPLSETKCTLKSLTVEKGIYQTSNFRVQPTISIVRFPNITNLCPFGEVFNASKFASVYAWNRKRISNCVADYSVLYNSTSFSTFKCYGVSPTKLNDLCFTNVYADSFVVKGDEVRQIAPGQTGVIADYNYKLPDDFTGCVIAWNSVKQDALTGDNYGYLYRLFRKSKLKPFERDISTEIYQAGSTPCNGQVGLNCYYPLERYGFHPTTGVNYQPFRVVVLSFELLNGPATVCGPKLSTTLVKDKCVNFNFNGLTGTGVLTTSKKQFLPFQQFGRDISDTTDAVRDPQTLEILDITPCSFGGVSVITPGTNTSNQVAVLYQDVNCTEVPMAIHAEQLTPAWRVYSAGANVFQTRAGCLVGAEHVNNSYECDIPVGAGICASYHSMSSFRSVNQRSIIAYTMSLGAENSVAYSNNSIAIPTNFTISVTTEILPVSMTKTSVDCTMYICGDSIECSNLLLQYGSFCTQLNRALTGIAVEQDKNTQEVFAQVKQIYKTPPIKDFGGFNFSQILPDPSKPSKRSFIEDLLFNKVTLADAGFIKQYGDCLGDIAARDLICAQKFNGLTVLPPLLTDEMIAQYTSALLAGTITSGWTFGAGAALQIPFAMQMAYRFNGIGVTQNVLYENQKLIANQFNSAIGKIQDSLSSTASALGKLQDVVNQNAQALNTLVKQLSSNCGAISSVLNDILSRLDKVEAEVQIDRLITCRLQSLQTYVTQQLIRAAEIRASANLAATKMSECVLGQSKRVDFCGKGYHLMSFPQSAPHGVVFLHVTYVPAQEKNFTTAPAICHEGKAHFPREGVFVSNGTHWFITQRNFYEPQIITTDNTFVSGSCDVVIGIVNNTVYDPLQPELDSGGSGYIPEAPRDGQAYVRKDGEWVLLSTFL

SEQ ID NO: 10457 - protein, 1169 aa, Artificial Sequence
  SARS-CoV-2/pangolin/Guangxi/P1E/2017__EPI_ISL_410539 spike protein (1-1139)(F962C_G991C) Foldon construct
MFVFLFVLPLVSSQCVNLTTRTGIQPGYTNSSTRGVYYPDKVFRSSILHLTQDLFLPFFSNVTWFNTINYQGGFKKFDNPVLPFNDGVYFASTEKSNIIRGWIFGTTLDARTQSLLIVNNATNVVIKVCEFQFCTDPFLGVYYHNNNKTWVENEFRVYSSANNCTFEYISQPFLMDLEGKQGNFKNLREFVFKNVDGYFKIYSKHTPIDLVRDLPRGFAALEPLVDLPIGINITRFQTLLALHRSYLTPGKLESGWTTGAAAYYVGYLQQRTFLLSYNQNGTITDAVDCSLDPLSETKCTLKSLTVEKGIYQTSNFRVQPTISIVRFPNITNLCPFGEVFNASKFASVYAWNRKRISNCVADYSVLYNSTSFSTFKCYGVSPTKLNDLCFTNVYADSFVVKGDEVRQIAPGQTGVIADYNYKLPDDFTGCVIAWNSVKQDALTGGNYLYRLFRKSKLKPFERDISTEIYQAGSTPCNGQVGLNCYYPLERYGFHPTTGVNYQPFRVVVLSFELLNGPATVCGPKLSTTLVKDKCVNFNFNGLTGTGVLTTSKKQFLPFQQFGRDISDTTDAVRDPQTLEILDITPCSFGGVSVITPGTNTSNQVAVLYQDVNCTEVPMAIHAEQLTPAWRVYSAGANVFQTRAGCLVGAEHVNNSYECDIPVGAGICASYHSMSSLRSVNQRSIIAYTMSLGAENSVAYSNNSIAIPTNFTISVTTEILPVSMTKTSVDCTMYICGDSIECSNLLLQYGSFCTQLNRALTGIAVEQDKNTQEVFAQVKQIYKTPPIKDFGGFNFSQILPDPSKPSKRSFIEDLLFNKVTLADAGFIKQYGDCLGDIAARDLICAQKFNGLTVLPPLLTDEMIAQYTSALLAGTITSGWTFGAGAALQIPFAMQMAYRFNGIGVTQNVLYENQKLIANQFNSAIGKIQDSLSSTASALGKLQDVVNQNAQALNTLVKQLSSNCGAISSVLNDILSRLDKVEAEVQIDRLITCRLQSLQTYVTQQLIRAAEIRASANLAATKMSECVLGQSKRVDFCGKGYHLMSFPQSAPHGVVFLHVTYVPAQEKNFTTAPAICHEGKAHFPREGVFVSNGTHWFITQRNFYEPQIITTDNTFVSGSCDVVIGIVNNTVYDPLQPELDSGGSGYIPEAPRDGQAYVRKDGEWVLLSTFL

SEQ ID NO: 10458 - protein, 1177 aa, Artificial Sequence
  SARS-CoV-2/Wuhan/WIV05/2019__EPI_ISL_402128 spike protein (1-1147)(A972C_R995C) Foldon construct
MFVFLVLLPLVSSQCVNLTTRTQLPPAYTNSFTRGVYYPDKVFRSSVLHSTQDLFLPFFSNVTWFHAIHVSGTNGTKRFDNPVLPFNDGVYFASTEKSNIIRGWIFGTTLDSKTQSLLIVNNATNVVIKVCEFQFCNDPFLGVYYHKNNKSWMESEFRVYSSANNCTFEYVSQPFLMDLEGKQGNFKNLREFVFKNIDGYFKIYSKHTPINLVRDLPQGFSALEPLVDLPIGINITRFQTLLALHRSYLTPGDSSSGWTAGAAAYYVGYLQPRTFLLKYNENGTITDAVDCALDPLSETKCTLKSFTVEKGIYQTSNFRVQPTESIVRFPNITNLCPFGEVFNATRFASVYAWNRKRISNCVADYSVLYNSASFSTFKCYGVSPTKLNDLCFTNVYADSFVIRGDEVRQIAPGQTGKIADYNYKLPDDFTGCVIAWNSNNLDSKVGGNYNYLYRLFRKSNLKPFERDISTEIYQAGSTPCNGVEGFNCYFPLQSYGFQPTNGVGYQPYRVVVLSFELLHAPATVCGPKKSTNLVKNKCVNFNFNGLTGTGVLTESNKKFLPFQQFGRDIADTTDAVRDPQTLEILDITPCSFGGVSVITPGTNTSNQVAVLYQDVNCTEVPVAIHADQLTPTWRVYSTGSNVFQTRAGCLIGAEHVNNSYECDIPIGAGICASYQTQTNSPRRARSVASQSIIAYTMSLGAENSVAYSNNSIAIPTNFTISVTTEILPVSMTKTSVDCTMYICGDSTECSNLLLQYGSFCTQLNRALTGIAVEQDKNTQEVFAQVKQIYKTPPIKDFGGFNFSQILPDPSKPSKRSFIEDLLFNKVTLADAGFIKQYGDCLGDIAARDLICAQKFNGLTVLPPLLTDEMIAQYTSALLAGTITSGWTFGAGAALQIPFAMQMAYRFNGIGVTQNVLYENQKLIANQFNSAIGKIQDSLSSTASALGKLQDVVNQNAQALNTLVKQLSSNFGCISSVLNDILSRLDKVEAEVQIDCLITGRLQSLQTYVTQQLIRAAEIRASANLAATKMSECVLGQSKRVDFCGKGYHLMSFPQSAPHGVVFLHVTYVPAQEKNFTTAPAICHDGKAHFPREGVFVSNGTHWFVTQRNFYEPQIITTDNTFVSGNCDVVIGIVNNTVYDPLQPELDSGGSGYIPEAPRDGQAYVRKDGEWVLLSTFL

SEQ ID NO: 10459 - protein, 1173 aa, Artificial Sequence
  SARS-CoV-2/bat/Yunnan/RaTG13/2013__EPI_ISL_402131 spike protein (1-1143)(A968C_R991C) Foldon construct
MFVFLVLLPLVSSQCVNLTTRTQLPPAYTNSSTRGVYYPDKVFRSSVLHLTQDLFLPFFSNVTWFHAIHVSGTNGIKRFDNPVLPFNDGVYFASTEKSNIIRGWIFGTTLDSKTQSLLIVNNATNVVIKVCEFQFCNDPFLGVYYHKNNKSWMESEFRVYSSANNCTFEYVSQPFLMDLEGKQGNFKNLREFVFKNIDGYFKIYSKHTPINLVRDLPPGFSALEPLVDLPIGINITRFQTLLALHRSYLTPGDSSSGWTAGAAAYYVGYLQPRTFLLKYNENGTITDAVDCALDPLSETKCTLKSFTVEKGIYQTSNFRVQPTDSIVRFPNITNLCPFGEVFNATTFASVYAWNRKRISNCVADYSVLYNSTSFSTFKCYGVSPTKLNDLCFTNVYADSFVITGDEVRQIAPGQTGKIADYNYKLPDDFTGCVIAWNSKHIDAKEGGNFNYLYRLFRKANLKPFERDISTEIYQAGSKPCNGQTGLNCYYPLYRYGFYPTDGVGHQPYRVVVLSFELLNAPATVCGPKKSTNLVKNKCVNFNFNGLTGTGVLTESNKKFLPFQQFGRDIADTTDAVRDPQTLEILDITPCSFGGVSVITPGTNASNQVAVLYQDVNCTEVPVAIHADQLTPTWRVYSTGSNVFQTRAGCLIGAEHVNNSYECDIPIGAGICASYQTQTNSRSVASQSIIAYTMSLGAENSVAYSNNSIAIPTNFTISVTTEILPVSMTKTSVDCTMYICGDSTECSNLLLQYGSFCTQLNRALTGIAVEQDKNTQEVFAQVKQIYKTPPIKDFGGFNFSQILPDPSKPSKRSFIEDLLFNKVTLADAGFIKQYGDCLGDIAARDLICAQKFNGLTVLPPLLTDEMIAQYTSALLAGTITSGWTFGAGAALQIPFAMQMAYRFNGIGVTQNVLYENQKLIANQFNSAIGKIQDSLSSTASALGKLQDVVNQNAQALNTLVKQLSSNFGCISSVLNDILSRLDKVEAEVQIDCLITGRLQSLQTYVTQQLIRAAEIRASANLAATKMSECVLGQSKRVDFCGKGYHLMSFPQSAPHGVVFLHVTYVPAQEKNFTTAPAICHDGKAHFPREGVFVSNGTHWFVTQRNFYEPQIITTDNTFVSGSCDVVIGIVNNTVYDPLQPELDSGGSGYIPEAPRDGQAYVRKDGEWVLLSTFL

SEQ ID NO: 10460 - protein, 1177 aa, Artificial Sequence
  SARS-CoV-2/Wuhan/HBCDC-HB-01/2019__EPI_ISL_402132 spike protein (1-1147)(A972C_R995C) Foldon construct
MFVFLVLLPLVSSQCVNLTTRTQLPPAYTNSITRGVYYPDKVFRSSVLHSTQDLFLPFFSNVTWFHAIHVSGTNGTKRFDNPVLPFNDGVYFASTEKSNIIRGWIFGTTLDSKTQSLLIVNNATNVVIKVCEFQFCNDPFLGVYYHKNNKSWMESEFRVYSSANNCTFEYVSQPFLMDLEGKQGNFKNLREFVFKNIDGYFKIYSKHTPINLVRDLPQGFSALEPLVDLPIGINITRFQTLLALHRSYLTPGDSSSGWTAGAAAYYVGYLQPRTFLLKYNENGTITDAVDCALDPLSETKCTLKSFTVEKGIYQTSNFRVQPTESIVRFPNITNLCPFGEVFNATRFASVYAWNRKRISNCVADYSVLYNSASFSTFKCYGVSPTKLNDLCFTNVYADSFVIRGDEVRQIAPGQTGKIADYNYKLPDDFTGCVIAWNSNNLDSKVGGNYNYLYRLFRKSNLKPFERDISTEIYQAGSTPCNGVEGFNCYFPLQSYGFQPTNGVGYQPYRVVVLSFELLHAPATVCGPKKSTNLVKNKCVNFNFNGLTGTGVLTESNKKFLPFQQFGRDIADTTDAVRDPQTLEILDITPCSFGGVSVITPGTNTSNQVAVLYQDVNCTEVPVAIHADQLTPTWRVYSTGSNVFQTRAGCLIGAEHVNNSYECDIPIGAGICASYQTQTNSPRRARSVASQSIIAYTMSLGAENSVAYSNNSIAIPTNFTISVTTEILPVSMTKTSVDCTMYICGDSTECSNLLLQYGSFCTQLNRALTGIAVEQDKNTQEVFAQVKQIYKTPPIKDFGGFNFSQILPDPSKPSKRSFIEDLLFNKVTLADAGFIKQYGDCLGDIAARDLICAQKFNGLTVLPPLLTDEMIAQYTSALLAGTITSGWTFGAGAALQIPFAMQMAYRFNGIGVTQNVLYENQKLIANQFNSAIGKIQDSLSSTASALGKLQDVVNQNAQALNTLVKQLSSNFGCISSVLNDILSRLDKVEAEVQIDCLITGRLQSLQTYVTQQLIRAAEIRASANLAATKMSECVLGQSKRVDFCGKGYHLMSFPQSAPHGVVFLHVTYVPAQEKNFTTAPAICHDGKAHFPREGVFVSNGTHWFVTQRNFYEPQIITTDNTFVSGNCDVVIGIVNNTVYDPLQPELDSGGSGYIPEAPRDGQAYVRKDGEWVLLSTFL

SEQ ID NO: 10461 - protein, 1177 aa, Artificial Sequence
  SARS-CoV-2/Guangdong/20SF028/2020__EPI_ISL_403936 spike protein (1-1147)(A972C_R995C) Foldon construct
MFVFLVLLPLVSSQCVNLTTRTQLPPAYTNSFTRGVYYPDKVFRSSVLYSTQDLFLPFFSNVTWFHAIHVSGTNGTKRFDNPVLPFNDGVYFASTEKSNIIRGWIFGTTLDSKTQSLLIVNNATNVVIKVCEFQFCNDPFLGVYYHKNNKSWMESEFRVYSSANNCTFEYVSQPFLMDLEGKQGNFKNLREFVFKNIDGYFKIYSKHTPINLVRDLPQGFSALEPLVDLPIGINITRFQTLLALHRSYLTPGDSSSGWTAGAAAYYVGYLQPRTFLLKYNENGTITDAVDCALDPLSETKCTLKSFTVEKGIYQTSNFRVQPTESIVRFPNITNLCPFGEVFNATRFASVYAWNRKRISNCVADYSVLYNSASFSTFKCYGVSPTKLNDLCFTNVYADSFVIRGDEVRQIAPGQTGKIADYNYKLPDDFTGCVIAWNSNNLDSKVGGNYNYLYRLFRKSNLKPFERDISTEIYQAGSTPCNGVEGFNCYFPLQSYGFQPTNGVGYQPYRVVVLSFELLHAPATVCGPKKSTNLVKNKCVNFNFNGLTGTGVLTESNKKFLPFQQFGRDIADTTDAVRDPQTLEILDITPCSFGGVSVITPGTNTSNQVAVLYQDVNCTEVPVAIHADQLTPTWRVYSTGSNVFQTRAGCLIGAEHVNNSYECDIPIGAGICASYQTQTNSPRRARSVASQSIIAYTMSLGAENSVAYSNNSIAIPTNFTISVTTEILPVSMTKTSVDCTMYICGDSTECSNLLLQYGSFCTQLNRALTGIAVEQDKNTQEVFAQVKQIYKTPPIKDFGGFNFSQILPDPSKPSKRSFIEDLLFNKVTLADAGFIKQYGDCLGDIAARDLICAQKFNGLTVLPPLLTDEMIAQYTSALLAGTITSGWTFGAGAALQIPFAMQMAYRFNGIGVTQNVLYENQKLIANQFNSAIGKIQDSLSSTASALGKLQDVVNQNAQALNTLVKQLSSNFGCISSVLNDILSRLDKVEAEVQIDCLITGRLQSLQTYVTQQLIRAAEIRASANLAATKMSECVLGQSKRVDFCGKGYHLMSFPQSAPHGVVFLHVTYVPAQEKNFTTAPAICHDGKAHFPREGVFVSNGTHWFVTQRNFYEPQIITTDNTFVSGNCDVVIGIVNNTVYDPLQPELDSGGSGYIPEAPRDGQAYVRKDGEWVLLSTFL

SEQ ID NO: 10462 - protein, 1177 aa, Artificial Sequence
  SARS-CoV-2/Shenzhen/SZTH-001/2020__EPI_ISL_406592 spike protein (1-1147)(A972C_R995C) Foldon construct
MFVFLVLLPLVSSQCVNLTTRTQLPPAYTNSFTRGVYYPDKVFRSSVLHSTQDLFLPFFSNVTWFHAIHVSGTNGTKRFDNPVLPFNDGVYFASTEKSNIIRGWIFGTTLDSKTQSLLIVNNATNVVIKVCEFQFCNDPFLGVYYHKNNKSWMESEFRVYSSANNCTFEYVSQPFLMDLEGKQGNFKNLREFVFKNIDGYFKIYSKHTPINLVRDLPQGFSALEPLVDLPIGINITRFQTLLALHRSYLTPGDSSSGWTAGAAAYYVGYLQPRTFLLKYNENGTITDAVDCALDPLSETKCTLKSFTVEKGIYQTSNFRVQPTESIVRFPNITNLCPFGEVFNATRFASVYAWNRKRISNCVADYSVLYNSASFSTFKCYGVSPTKLNDLCFTNVYADSFVIRGDEVRQIAPGQTGKIADYNYKLPDDFTGCVIAWNSNNLDSKVGGNYNYLYRLFRKSNLKPFERDISTEIYQAGSTPCNGVEGFNCYFPLQSYGFQPTNGVGYQPYRVVVLSFELLHAPATVCGPKKSTNLVKNKCVNFNFNGLTGTGVLTESNKKFLPFQQFGRDIADTTDAVRDPQTLEILDITPCSFGGVSVITPGTNTSNQVAVLYQDVNCTEVPVAIHADQLTPTWRVYSTGSNVFQTRAGCLIGAEHVNNSYECDIPIGAGICASYQTQTNSPRRARSVASQSIIAYTMSLGAENSVAYSNNSIAIPTNFTISVTTEILPVSMTKTSVDCTMYICGDSTECSNLLLQYGSFCTQLNRALTGIAVEQDKNTQEVFAQVKQIYKTPPIKDFGGFNFSQILPDPSKPSKRSFIEDLLFNKVTLADAGFIKQYGDCLGDIAARDLICAQKFNGLTVLPPLLTDEMIAQYTSALLAGTITSGWTFGAGAALQIPFAMQMAYRFNGIGVTQNVLYENQKLIANQFNSAIGKIQDSLSSTASALGKLQDVVNQNAQALNTLVKQLSSNFGCISSVLNDILSRLDKVEAEVQIDCLITGRLQSLQTYVTQQLIRAAEIRASANLAATKMSECVLGQSKRVDFCGKGYHLMSFPQSAPHGVVFLHVTYVPAQEKNFTTAPAICHDGKAHFPREGVFVSNGTHWFVTQRNFYEPQIITTDNTFVSGNCDVLIGIVNNTVYDPLQPELDSGGSGYIPEAPRDGQAYVRKDGEWVLLSTFL

SEQ ID NO: 10463 - protein, 1177 aa, Artificial Sequence
  SARS-CoV-2/Shenzhen/SZTH-004/2020__EPI_ISL_406595 spike protein (1-1147)(A972C_R995C) Foldon construct
MFVFLVLLPLVSSQCVNLTTRTQLPPAYTNSFTRGVYYPDKVFRSSVLHSTQDLFLPFFSNVTWFHAIHVSGTNGTKRFDNPVLPFNDGVYFASTEKSNIIRGWIFGTTLDSKTQSLLIVNNATNVVIKVCEFQFCNDPFLGVYYHKNNKSWMESEFRVYSSANNCTFEYVSQPFLMDLEGKQGNFKNLREFVFKNIDGYFKIYSKHTPINLVRDLPQGFSALEPLVDLPIGINITRFQTLLALHRSYLTPGDSSSGWTAGAAAYYVGYLQPRTFLLKYNENGTITDAVDCALDPLSETKCTLKSFTVEKGIYQTSNFRVQPTESIVRFPNITNLCPFGEVFNATRFASVYAWDRKRISNCVAYYSVLYNSASFSTFKCYGVSPTKLNDLCFTNVYADSFVIRGDEVRQIAPGQTGKIADYNYKLPDDFTGCVIAWNSNNLDSKVGGNYNYLYRLFRKSNLKPFERDISTEIYQAGSTPCNGVEGFNCYFPLQSYGFQPTNGVGYQPYRVVVLSFELLHAPATVCGPKKSTNLVKNKCVNFNFNGLTGTGVLTESNKKFLPFQQFGRDIADTTDAVRDPQTLEILDITPCSFGGVSVITPGTNTSNQVAVLYQDVNCTEVPVAIHADQLTPTWRVYSTGSNVFQTRAGCLIGAEHVNNSYECDIPIGAGICASYQTQTNSPRRARSVASQSIIAYTMSLGAENSVAYSNNSIAIPTNFTISVTTEILPVSMTKTSVDCTMYICGDSTECSNLLLQYGSFCTQLNRALTGIAVEQDKNTQEVFAQVKQIYKTPPIKDFGGFNFSQILPDPSKPSKRSFIEDLLFNKVTLADAGFIKQYGDCLGDIAARDLICAQKFNGLTVLPPLLTDEMIAQYTSALLAGTITSGWTFGAGAALQIPFAMQMAYRFNGIGVTQNVLYENQKLIANQFNSAIGKIQDSLSSTASALGKLQDVVNQNAQALNTLVKQLSSNFGCISSVLNDILSRLDKVEAEVQIDCLITGRLQSLQTYVTQQLIRAAEIRASANLAATKMSECVLGQSKRVDFCGKGYHLMSFPQSAPHGVVFLHVTYVPAQEKNFTTAPAICHDGKAHFPREGVFVSNGTHWFVTQRNFYEPQIITTDNTFVSGNCDVVIGIVNNTVYDPLQPELDSGGSGYIPEAPRDGQAYVRKDGEWVLLSTFL

SEQ ID NO: 10464 - protein, 1177 aa, Artificial Sequence
  SARS-CoV-2/France/IDF0372/2020__EPI_ISL_406596 spike protein (1-1147)(A972C_R995C) Foldon construct
MFVFLVLLPLVSSQCVNLTTRTQLPPAYTNSFTRGVYYPDKVFRSSVLHSTQDLFLPFFSNVTWFHAIHVSGTNGTKRFDNPVLPFNDGVYFASTEKSNIIRGWIFGTTLDSKTQSLLIVNNATNVVIKVCEFQFCNDPFLGVYYHKNNKSWMESEFRVYSSANNCTFEYVSQPFLMDLEGKQGNFKNLREFVFKNIDGYFKIYSKHTPINLVRDLPQGFSALEPLVDLPIGINITRFQTLLALHRSYLTPGDSSSGWTAGAAAYYVGYLQPRTFLLKYNENGTITDAVDCALDPLSETKCTLKSFTVEKGIYQTSNFRVQPTESIVRFPNITNLCPFGEVFNATRFASVYAWNRKRISNCVADYSFLYNSASFSTFKCYGVSPTKLNDLCFTNVYADSFVIRGDEVRQIAPGQTGKIADYNYKLPDDFTGCVIAWNSNNLDSKVGGNYNYLYRLFRKSNLKPFERDISTEIYQAGSTPCNGVEGFNCYFPLQSYGFQPTNGVGYQPYRVVVLSFELLHAPATVCGPKKSTNLVKNKCVNFNFNGLTGTGVLTESNKKFLPFQQFGRDIADTTDAVRDPQTLEILDITPCSFGGVSVITPGTNTSNQVAVLYQDVNCTEVPVAIHADQLTPTWRVYSTGSNVFQTRAGCLIGAEHVNNSYECDIPIGAGICASYQTQTNSPRRARSVASQSIIAYTMSLGAENSVAYSNNSIAIPTNFTISVTTEILPVSMTKTSVDCTMYICGDSTECSNLLLQYGSFCTQLNRALTGIAVEQDKNTQEVFAQVKQIYKTPPIKDFGGFNFSQILPDPSKPSKRSFIEDLLFNKVTLADAGFIKQYGDCLGDIAARDLICAQKFNGLTVLPPLLTDEMIAQYTSALLAGTITSGWTFGAGAALQIPFAMQMAYRFNGIGVTQNVLYENQKLIANQFNSAIGKIQDSLSSTASALGKLQDVVNQNAQALNTLVKQLSSNFGCISSVLNDILSRLDKVEAEVQIDCLITGRLQSLQTYVTQQLIRAAEIRASANLAATKMSECVLGQSKRVDFCGKGYHLMSFPQSAPHGVVFLHVTYVPAQEKNFTTAPAICHDGKAHFPREGVFVSNGTHWFVTQRNFYEPQIITTDNTFVSGNCDVVIGIVNNTVYDPLQPELDSGGSGYIPEAPRDGQAYVRKDGEWVLLSTFL

SEQ ID NO: 10465 - protein, 1177 aa, Artificial Sequence
  SARS-CoV-2/Australia/VIC01/2020__EPI_ISL_406844 spike protein (1-1147)(A972C_R995C) Foldon construct
MFVFLVLLPLVSSQCVNLTTRTQLPPAYTNSFTRGVYYPDKVFRSSVLHSTQDLFLPFFSNVTWFHAIHVSGTNGTKRFDNPVLPFNDGVYFASTEKSNIIRGWIFGTTLDSKTQSLLIVNNATNVVIKVCEFQFCNDPFLGVYYHKNNKSWMESEFRVYSSANNCTFEYVSQPFLMDLEGKQGNFKNLREFVFKNIDGYFKIYSKHTPINLVRDLPQGFSALEPLVDLPIGINITRFQTLLALHRRYLTPGDSSSGWTAGAAAYYVGYLQPRTFLLKYNENGTITDAVDCALDPLSETKCTLKSFTVEKGIYQTSNFRVQPTESIVRFPNITNLCPFGEVFNATRFASVYAWNRKRISNCVADYSVLYNSASFSTFKCYGVSPTKLNDLCFTNVYADSFVIRGDEVRQIAPGQTGKIADYNYKLPDDFTGCVIAWNSNNLDSKVGGNYNYLYRLFRKSNLKPFERDISTEIYQAGSTPCNGVEGFNCYFPLQSYGFQPTNGVGYQPYRVVVLSFELLHAPATVCGPKKSTNLVKNKCVNFNFNGLTGTGVLTESNKKFLPFQQFGRDIADTTDAVRDPQTLEILDITPCSFGGVSVITPGTNTSNQVAVLYQDVNCTEVPVAIHADQLTPTWRVYSTGSNVFQTRAGCLIGAEHVNNSYECDIPIGAGICASYQTQTNSPRRARSVASQSIIAYTMSLGAENSVAYSNNSIAIPTNFTISVTTEILPVSMTKTSVDCTMYICGDSTECSNLLLQYGSFCTQLNRALTGIAVEQDKNTQEVFAQVKQIYKTPPIKDFGGFNFSQILPDPSKPSKRSFIEDLLFNKVTLADAGFIKQYGDCLGDIAARDLICAQKFNGLTVLPPLLTDEMIAQYTSALLAGTITSGWTFGAGAALQIPFAMQMAYRFNGIGVTQNVLYENQKLIANQFNSAIGKIQDSLSSTASALGKLQDVVNQNAQALNTLVKQLSSNFGCISSVLNDILSRLDKVEAEVQIDCLITGRLQSLQTYVTQQLIRAAEIRASANLAATKMSECVLGQSKRVDFCGKGYHLMSFPQSAPHGVVFLHVTYVPAQEKNFTTAPAICHDGKAHFPREGVFVSNGTHWFVTQRNFYEPQIITTDNTFVSGNCDVVIGIVNNTVYDPLQPELDSGGSGYIPEAPRDGQAYVRKDGEWVLLSTFL

SEQ ID NO: 10466 - protein, 1177 aa, Artificial Sequence
  SARS-CoV-2/Germany/BavPat1/2020__EPI_ISL_406862 spike protein (1-1147)(A972C_R995C) Foldon construct
MFVFLVLLPLVSSQCVNLTTRTQLPPAYTNSFTRGVYYPDKVFRSSVLHSTQDLFLPFFSNVTWFHAIHVSGTNGTKRFDNPVLPFNDGVYFASTEKSNIIRGWIFGTTLDSKTQSLLIVNNATNVVIKVCEFQFCNDPFLGVYYHKNNKSWMESEFRVYSSANNCTFEYVSQPFLMDLEGKQGNFKNLREFVFKNIDGYFKIYSKHTPINLVRDLPQGFSALEPLVDLPIGINITRFQTLLALHRSYLTPGDSSSGWTAGAAAYYVGYLQPRTFLLKYNENGTITDAVDCALDPLSETKCTLKSFTVEKGIYQTSNFRVQPTESIVRFPNITNLCPFGEVFNATRFASVYAWNRKRISNCVADYSVLYNSASFSTFKCYGVSPTKLNDLCFTNVYADSFVIRGDEVRQIAPGQTGKIADYNYKLPDDFTGCVIAWNSNNLDSKVGGNYNYLYRLFRKSNLKPFERDISTEIYQAGSTPCNGVEGFNCYFPLQSYGFQPTNGVGYQPYRVVVLSFELLHAPATVCGPKKSTNLVKNKCVNFNFNGLTGTGVLTESNKKFLPFQQFGRDIADTTDAVRDPQTLEILDITPCSFGGVSVITPGTNTSNQVAVLYQGVNCTEVPVAIHADQLTPTWRVYSTGSNVFQTRAGCLIGAEHVNNSYECDIPIGAGICASYQTQTNSPRRARSVASQSIIAYTMSLGAENSVAYSNNSIAIPTNFTISVTTEILPVSMTKTSVDCTMYICGDSTECSNLLLQYGSFCTQLNRALTGIAVEQDKNTQEVFAQVKQIYKTPPIKDFGGFNFSQILPDPSKPSKRSFIEDLLFNKVTLADAGFIKQYGDCLGDIAARDLICAQKFNGLTVLPPLLTDEMIAQYTSALLAGTITSGWTFGAGAALQIPFAMQMAYRFNGIGVTQNVLYENQKLIANQFNSAIGKIQDSLSSTASALGKLQDVVNQNAQALNTLVKQLSSNFGCISSVLNDILSRLDKVEAEVQIDCLITGRLQSLQTYVTQQLIRAAEIRASANLAATKMSECVLGQSKRVDFCGKGYHLMSFPQSAPHGVVFLHVTYVPAQEKNFTTAPAICHDGKAHFPREGVFVSNGTHWFVTQRNFYEPQIITTDNTFVSGNCDVVIGIVNNTVYDPLQPELDSGGSGYIPEAPRDGQAYVRKDGEWVLLSTFL

SEQ ID NO: 10467 - protein, 1177 aa, Artificial Sequence
  SARS-CoV-2/Wuhan/HBCDC-HB-02/2020__EPI_ISL_412978 spike protein (1-1147)(A972C_R995C) Foldon construct
MFVFLVLLPLVSSQCVNLTTRTQLPPAYTNSFTRGVYYPDKVFRSSVLHSTQDLFLPFFSNVTWFHAIHVSGTNGTKRFDNPVLPFNDGVYFASTEKSNIIRGWIFGTTLDSKTQSLLIVNNATNVVIKVCEFQFCNDPFLGVYYHKNNKSWMESEFRVYSSANNCTFEYVSQPFLMDLEGKQGNFKNLREFVFKNIDGYFKIYSKHTPINLVRDLPQGFSALEPLVDLPIGINITRFQTLLALHRSYLTPGDSSSGWTAGAAAYYVGYLQPRTFLLKYNENGTITDAVDCALDPLSETKCTLKSFTVEKGIYQTSNFRVQPTESIVRFPNITNLCPFGEVFNATRFASVYAWNRKRISNCVADYSVLYNSASFSTFKCYGVSPTKLNDLCFTNVYADSFVIRGDEVRQIAPGQTGKIADYNYKLPDDFTGCVIAWNSNNLDSKVGGNYNYLYRLFRKSNLKPFERDISTEIYQAGSTPCNGVEGFNCYFPLQSYGFQPTNGVGYQPYRVVVLSFELLHAPATVCGPKKSTNLVKNKCVNFNFNGLTGTGVLTESNKKFLPFQQFGRDIADTTDAVRDPQTLEILDITPCSFGGVSVITPGTNTSNQVAVLYQDVNCTEVPVAIHADQLTPTWRVYSTGSNVFQTRAGCLIGAEHVNNSYECDIPIGAGICASYQTQTNSPRRARSVASQSIIAYTMSLGAENSVAYSNNSIAIPTNFTISVTTEILPVSMTKTSVDCTMYICGDSTECSNFLLQYGSFCTQLNRALTGIAVEQDKNTQEVFAQVKQIYKTPPIKDFGGFNFSQILPDPSKPSKRSFIEDLLFNKVTLADAGFIKQYGDCLGDIAARDLICAQKFNGLTVLPPLLTDEMIAQYTSALLAGTITSGWTFGAGAALQIPFAMQMAYRFNGIGVTQNVLYENQKLIANQFNSAIGKIQDSLSSTASALGKLQDVVNQNAQALNTLVKQLSSNFGCISSVLNDILSRLDKVEAEVQIDCLITGRLQSLQTYVTQQLIRAAEIRASANLAATKMSECVLGQSKRVDFCGKGYHLMSFPQSAPHGVVFLHVTYVPAQEKNFTTAPAICHDGKAHFPREGVFVSNGTHWFVTQRNFYEPQIITTDNTFVSGNCDVVIGIVNNTVYDPLQPELDSGGSGYIPEAPRDGQAYVRKDGEWVLLSTFL

SEQ ID NO: 10468 - protein, 1177 aa, Artificial Sequence
  SARS-CoV-2/Australia/QLD02/2020__EPI_ISL_407896 spike protein (1-1147)(A972C_R995C) Foldon construct
MFVFLVLLPLVSSQCVNLTTRTQLPPAYTNSFTRGVYYPDKVFRSSVLHSTQDLFLPFFSNVTWFHAIHVSGTNGTKRFDNPVLPFNDGVYFASTEKSNIIRGWIFGTTLDSKTQSLLIVNNATNVVIKVCEFQFCNDPFLGVYYHKNNKSWMESEFRVYSSANNCTFEYVSQPFLMDLEGKQGNFKNLREFVFKNIDGYFKIYSKHTPINLVRDLPQGFSALEPLVDLPIGINITRFQTLLALHRSYLTPGDSSSGWTAGAAAYYVGYLQPRTFLLKYNENGTITDAVDCALDPLSETKCTLKSFTVEKGIYQTSNFRVQPTESIVRFPNITNLCPFGEVFNATRFASVYAWNRKRISNCVADYSVLYNSASFSTFKCYGVSPTKLNDLCFTNVYADSFVIRGDEVRQIAPGQTGKIADYNYKLPDDFTGCVIAWNSNNLDSKVGGNYNYLYRLFRKSNLKPFERDISTEIYQAGSTPCNGVEGFNCYFPLQSYGFQPTNGVGYQPYRVVVLSFELLHAPATVCGPKKSTNLVKNKCVNFNFNGLTGTGVLTESNKKFLPFQQFGRDIADTTDAVRDPQTLEILDITPCSFGGVSVITPGTNTSNQVAVLYQDVNCTEVPVAIHADQLTPTWRVYSTGSNVFQTRAGCLIGAEHVNNSYECDIPIGAGICASYQTQTNSPRRARSVASQSIIAYTMSLGAENSVAYSNNSIAIPTNFTISVTTEILPVSMTKTSVDCTMYICGDSTECSNLLLQYGSFCTQLNRALTGIAVEQDKNTQEVFAQVKQIYKTPPIKDFGGFNFSQILPDPSKPSKRSFIEDLLFNKVTLADAGFIKQYGDCLGDIAARDLICAQKFNGLTVLPPLLTDEMIAQYTSALLAGTITSGWTFGAGAALQIPFAMQMAYRFNGIGVTQNVLYENQKLIANQFNSAIGKIQDSLSSTASALGKLQDVVNQNAQALNTLVKQLSSNFGCISSVLNDILSRLDKVEAEVQIDCLITGRLQSLQTYVTQQLIRAAEIRASANLAATKMSECVLGQSKRVDFCGKGYHLMSFPQSAPHGVVFLHVTYVPAQEKNFTTAPAICHDGKAHFPREGVFVSNGTHWFVTQRNFYEPQIITTDNTFVSGNCDVVIGIVNNTVYDPLQLELDSGGSGYIPEAPRDGQAYVRKDGEWVLLSTFL

SEQ ID NO: 10469 - protein, 1177 aa, Artificial Sequence
  SARS-CoV-2/India/1-31/2020__EPI_ISL_413523 spike protein (1-1147)(A972C_R995C) Foldon construct
MFVFLVLLPLVSSQCVNLTTRTQLPPAYTNSFTRGVYYPDKVFRSSVLHSTQDLFLPFFSNVTWFHAIHVSGTNGTKRFDNPVLPFNDGVYFASTEKSNIIRGWIFGTTLDSKTQSLLIVNNATNVVIKVCEFQFCNDPFLGVYYHKNNKSWMESEFRVYSSANNCTFEYVSQPFLMDLEGKQGNFKNLREFVFKNIDGYFKIYSKHTPINLVRDLPQGFSALEPLVDLPIGINITRFQTLLALHRSYLTPGDSSSGWTAGAAAYYVGYLQPRTFLLKYNENGTITDAVDCALDPLSETKCTLKSFTVEKGIYQTSNFRVQPTESIVRFPNITNLCPFGEVFNATRFASVYAWNRKRISNCVADYSVLYNSASFSTFKCYGVSPTKLNDLCFTNVYADSFVIRGDEVRQIAPGQTGKIADYNYKLPDDFTGCVIAWNSNNLDSKVGGNYNYLYRLFRKSNLKPFERDISTEIYQAGSTPCNGVEGFNCYFPLQSYGFQPTNGVGYQPYRVVVLSFELLHAPATVCGPKKSTNLVKNKCVNFNFNGLTGTGVLTESNKKFLPFQQFGRDIADTTDAVRDPQTLEILDITPCSFGGVSVITPGTNTSNQVAVLYQDVNCTEVPVAIHADQLTPTWRVYSTGSNVFQTRAGCLIGAEHVNNSYECDIPIGAGICASYQTQTNSPRRARSVASQSIIAYTMSLGAENSVAYSNNSIAIPTNFTISVTTEILPVSMTKTSVDCTMYICGDSTECSNLLLQYGSFCTQLNRALTGIAVEQDKNTQEVFAQVKQIYKTPPIKDFGGFNFSQILPDPSKPSKRSFIEDLLFNKVTLADAGFIKQYGDCLGDIAARDLICAQKFNGLTVLPPLLTDEMIAQYTSALLAGTITSGWTFGAGAALQIPFAMQMAYRFNGIGVTQNVLYENQKLIANQFNSVIGKIQDSLSSTASALGKLQDVVNQNAQALNTLVKQLSSNFGCISSVLNDILSRLDKVEAEVQIDCLITGRLQSLQTYVTQQLIRAAEIRASANLAATKMSECVLGQSKRVDFCGKGYHLMSFPQSAPHGVVFLHVTYVPAQEKNFTTAPAICHDGKAHFPREGVFVSNGTHWFVTQRNFYEPQIITTDNTFVSGNCDVVIGIVNNTVYDPLQPELDSGGSGYIPEAPRDGQAYVRKDGEWVLLSTFL

SEQ ID NO: 10470 - protein, 1177 aa, Artificial Sequence
  SARS-CoV-2/Guangdong/GD2020087-P0008/2020__EPI_ISL_413863 spike protein (1-1147)(A972C_R995C) Foldon construct
MFVFLVLLPLVSSQCVNLTTRTQLPPAYTNSFTRGVYYPDKVFRSSVLHSTQDLFLPFFSNVTWFHAIHVSGTNGTKRFDNPVLPFNDGVYFASTEKSNIIRGWIFGTTLDSKTQSLLIVNNATNVVIKVCEFQFCNDPFLGVYYHKNNKSWMESEFRVYSSANNCTFEYVSQPFLMDLEGKQGNFKNLREFVFKNIDGYFKIYSKHTPINLVRDLPQGFSALEPLVDLPIGINITRFQTLLALHRSYLTPGDSSSGWTAGAAAYYVGYLQPRTFLLKYNENGTITDAVDCALDPLSETKCTLKSFTVEKGIYQTSNFRVQPTESIVRFPNITNLCPFGEVFNATRFASVYAWNRKRISNCVADYSVLYNSASFSTFKCYGVSPTKLNDLCFTNVYADSFVIRGDEVREIAPGQTGKIADYNYKLPDDFTGCVIAWNSNNLDSKVGGNYNYLYRLFRKSNLKPFERDISTEIYQAGSTPCNGVEGFNCYFPLQSYGFQPTNGVGYQPYRVVVLSFELLHAPATVCGPKKSTNLVKNKCVNFNFNGLTGTGVLTESNKKFLPFQQFGRDIADTTDAVRDPQTLEILDITPCSFGGVSVITPGTNTSNQVAVLYQDVNCTEVPVAIHADQLTPTWRVYSTGSNVFQTRAGCLIGAEHVNNSYECDIPIGAGICASYQTQTNSPRRARSVASQSIIAYTMSLGAENSVAYSNNSIAIPTNFTISVTTEILPVSMTKTSVDCTMYICGDSTECSNLLLQYGSFCTQLNRALTGIAVEQDKNTQEVFAQVKQIYKTPPIKDFGGFNFSQILPDPSKPSKRSFIEDLLFNKVTLADAGFIKQYGDCLGDIAARDLICAQKFNGLTVLPPLLTDEMIAQYTSALLAGTITSGWTFGAGAALQIPFAMQMAYRFNGIGVTQNVLYENQKLIANQFNSAIGKIQDSLSSTASALGKLQDVVNQNAQALNTLVKQLSSNFGCISSVLNDILSRLDKVEAEVQIDCLITGRLQSLQTYVTQQLIRAAEIRASANLAATKMSECVLGQSKRVDFCGKGYHLMSFPQSAPHGVVFLHVTYVPAQEKNFTTAPAICHDGKAHFPREGVFVSNGTHWFVTQRNFYEPQIITTDNTFVSGNCDVVIGIVNNTVYDPLQPELDSGGSGYIPEAPRDGQAYVRKDGEWVLLSTFL

SEQ ID NO: 10471 - protein, 1177 aa, Artificial Sequence
  SARS-CoV-2/Sweden/01/2020__EPI_ISL_411951 spike protein (1-1147)(A972C_R995C) Foldon construct
MFVFLVLLPLVSSQCVNLTTRTQLPPAYTNSFTRGVYYPDKVFRSSVLHSTQDLFLPFFSNVTWFHAIHVSGTNGTKRFDNPVLPFNDGVYFASTEKSNIIRGWIFGTTLDSKTQSLLIVNNATNVVIKVCEFQFCNDPFLGVYYHKNNKSWMESEFRVYSSANNCTFEYVSQPFLMDLEGKQGNFKNLREFVFKNIDGYFKIYSKHTPINLVRDLPQGFSALEPLVDLPIGINITRFQTLLALHRSYLTPGDSSSGWTAGAAAYYVGYLQPRTFLLKYNENGTITDAVDCALDPLSETKCTLKSFTVEKGIYQTSNFRVQPTESIVRFPNITNLCPFGEVFNATRFASVYAWNRKRISNCVADYSVLYNSASFSTFKCYGVSPTKLNDLCFTNVYADSFVIRGDEVRQIAPGQTGKIADYNYKLPDDFTGCVIAWNSNNLDSKVGGNYNYLYRLFRKSNLKPFERDISTEIYQAGSTPCNGVEGFNCYFPLQSYGFQPTNGVGYQPYRVVVLSFELLHAPATVCGPKKSTNLVKNKCVNFNFNGLTGTGVLTESNKKFLPFQQFGRDIADTTDAVRDPQTLEILDITPCSFGGVSVITPGTNTSNQVAVLYQDVNCTEVPVAIHADQLTPTWRVYSTGSNVFQTRAGCLIGAEHVNNSYECDIPIGAGICASYQTQTNSPRRARSVASQSIIAYTMSLGAENSVAYSNNSIAIPTNFTISVTTEILPVSMTKTSVDCTMYICGDSTECSNLLLQYGSFCTQLNRALTGIAVEQDKNTQEVFAQVKQIYKTPPIKDCGGFNFSQILPDPSKPSKRSFIEDLLFNKVTLADAGFIKQYGDCLGDIAARDLICAQKFNGLTVLPPLLTDEMIAQYTSALLAGTITSGWTFGAGAALQIPFAMQMAYRFNGIGVTQNVLYENQKLIANQFNSAIGKIQDSLSSTASALGKLQDVVNQNAQALNTLVKQLSSNFGCISSVLNDILSRLDKVEAEVQIDCLITGRLQSLQTYVTQQLIRAAEIRASANLAATKMSECVLGQSKRVDFCGKGYHLMSFPQSAPHGVVFLHVTYVPAQEKNFTTAPAICHDGKAHFPREGVFVSNGTHWFVTQRNFYEPQIITTDNTFVSGNCDVVIGIVNNTVYDPLQPELDSGGSGYIPEAPRDGQAYVRKDGEWVLLSTFL

SEQ ID NO: 10472 - protein, 1177 aa, Artificial Sequence
  SARS-CoV-2/Tianmen/HBCDC-HB-07/2020__EPI_ISL_412983 spike protein (1-1147)(A972C_R995C) Foldon construct
MFVFLVLLPLVSSQCVNLTTRTQLPPAYTNSFTRGVYYPDKVFRSSVLHSTQDLFLPFFSNVTWFHAIHVSGTNGTKRFDNPVLPFNDGVYFASTEKSNIIRGWIFGTTLDSKTQSLLIVNNATNVVIKVCEFQFCNDPFLGVYYHKNNKSWMESEFRVYSSANNCTFEYVSQPFLMDLEGKQGNFKNLREFVFKNIDGYFKIYSKHTPINLVRDLPQGFSALEPLVDLPIGINITRFQTLLALHRSYLTPGDSSSGWTAGAAAYYVGYLQPRTFLLKYNENGTITDAVDCALDPLSETKCTLKSFTVEKGIYQTSNFRVQPTESIVRFPNITNLCPFGEVFNATRFASVYAWNRKRISNCVADYSVLYNSASFSTFKCYGVSPTKLNDLCFTNVYADSFVIRGDEVRQIAPGQTGKIADYNYKLPDDFTGCVIAWNSNNLDSKVGGNYNYLYRLFRKSNLKPFERDISTEIYQAGSTPCNGVEGFNCYFPLQSYGFQPTNGVGYQPYRVVVLSFELLHAPATVCGPKKSTNLVKNKCVNFNFNGLTGTGVLTESNKKFLPFQQFGRDIADTTDAVRDPQTLEILDITPCSFGGVSVITPGTNTSNQVAVLYQDLNCTEVPVAIHADQLTPTWRVYSTGSNVFQTRAGCLIGAEHVNNSYECDIPIGAGICASYQTQTNSPRRARSVASQSIIAYTMSLGAENSVAYSNNSIAIPTNFTISVTTEILPVSMTKTSVDCTMYICGDSTECSNLLLQYGSFCTQLNRALTGIAVEQDKNTQEVFAQVKQIYKTPPIKDFGGFNFSQILPDPSKPSKRSFIEDLLFNKVTLADAGFIKQYGDCLGDIAARDLICAQKFNGLTVLPPLLTDEMIAQYTSALLAGTITSGWTFGAGAALQIPFAMQMAYRFNGIGVTQNVLYENQKLIANQFNSAIGKIQDSLSSTASALGKLQDVVNQNAQALNTLVKQLSSNFGCISSVLNDILSRLDKVEAEVQIDCLITGRLQSLQTYVTQQLIRAAEIRASANLAATKMSECVLGQSKRVDFCGKGYHLMSFPQSAPHGVVFLHVTYVPAQEKNFTTAPAICHDGKAHFPREGVFVSNGTHWFVTQRNFYEPQIITTDNTFVSGNCDVVIGIVNNTVYDPLQPELDSGGSGYIPEAPRDGQAYVRKDGEWVLLSTFL

SEQ ID NO: 10473 - protein, 1177 aa, Artificial Sequence
  SARS-CoV-2/Hong Kong/case42_VM20002493/2020__EPI_ISL_414527 spike protein (1-1147)(A972C_R995C) Foldon construct
MFVFLVLLPLVSSQCVNLTTRTQLPPAYTNSFTRGVYYPDKVFRSSVLHSTQDLFLPFFSNVTWFHAIHVSGTNGTKRFDNPVLPFNDGVYFASTEKSNIIRGWIFGTTLDSKTQSLLIVNNATNVVIKVCEFQFCNDPFLGVYYHKNNKSWMESEFRVYSSANNCTFEYVSQPFLMDLEGKQGNFKNLREFVFKNIDGYFKIYSKHTPINLVRDLPQGFSALEPLVDLPIGINITRFQTLLALHRSYLTPGDSSSGWTAGAAAYYVGYLQPRTFLLKYNENGTITDAVDCALDPLSETKCTLKSFTVEKGIYQTSNFRVQPTESIVRFPNITNLCPFGEVFNATRFASVYAWNRKRISNCVADYSVLYNSASFSTFKCYGVSPTKLNDLCFTNVYADSFVIRGDEVRQIAPGQTGKIADYNYKLPDDFTGCVIAWNSNNLDSKVGGNYNYLYRLFRKSNLKPFERDISTEIYQAGSTPCNGVEGFNCYFPLQSYGFQPTNGVGYQPYRVVVLSFELLHAPATVCGPKKSTNLVKNKCVNFNFNGLTGTGVLTESNKKFLPFQQFGRDIADTTDAVRDPQTLEILDITPCSFGGVSVITPGTNTSNQVAVLYQDVNCTEVPVAIHADQLTPTWRVYSTGSNVFQTRAGCLIGAEHVNNSYECDIPIGAGICASYQTQTNSPRRARSVASQSIIAYTMSLGAENSVAYSNNSIAIPTNFAISVTTEILPVSMTKTSVDCTMYICGDSTECSNLLLQYGSFCTQLNRALTGIAVEQDKNTQEVFAQVKQIYKTPPIKDFGGFNFSQILPDPSKPSKRSFIEDLLFNKVTLADAGFIKQYGDCLGDIAARDLICAQKFNGLTVLPPLLTDEMIAQYTSALLAGTITSGWTFGAGAALQIPFAMQMAYRFNGIGVTQNVLYENQKLIANQFNSAIGKIQDSLSSTASALGKLQDVVNQNAQALNTLVKQLSSNFGCISSVLNDILSRLDKVEAEVQIDCLITGRLQSLQTYVTQQLIRAAEIRASANLAATKMSECVLGQSKRVDFCGKGYHLMSFPQSAPHGVVFLHVTYVPAQEKNFTTAPAICHDGKAHFPREGVFVSNGTHWFVTQRNFYEPQIITTDNTFVSGNCDVVIGIVNNTVYDPLQPELDSGGSGYIPEAPRDGQAYVRKDGEWVLLSTFL

SEQ ID NO: 10474 - protein, 1177 aa, Artificial Sequence
  SARS-CoV-2/USA/CruiseA-23/2020__EPI_ISL_414482 spike protein (1-1147)(A972C_R995C) Foldon construct
MFVFLVLLPLVSSQCVNLTTRTQLPPAYTNSFTRGVYYPDKVFRSSVLHSTQDLFLPFFSNVTWFHAIHVSGTNGTKRFDNPVLPFNDGVYFASTEKSNIIRGWIFGTTLDSKTQSLLIVNNATNVVIKVCEFQFCNDPFLGVYYHKNNKSWMESEFRVYSSANNCTFEYVSQPFLMDLEVKQGNFKNLREFVFKNIDGYFKIYSKHTPINLVRDLPQGFSALEPLVDLPIGINITRFQTLLALHRSYLTPGDSSSGWTAGAAAYYVGYLQPRTFLLKYNENGTITDAVDCALDPLSETKCTLKSFTVEKGIYQTSNFRVQPTESIVRFPNITNLCPFGEVFNATRFASVYAWNRKRISNCVADYSVLYNSASFSTFKCYGVSPTKLNDLCFTNVYADSFVIRGDEVRQIAPGQTGKIADYNYKLPDDFTGCVIAWNSNNLDSKVGGNYNYLYRLFRKSNLKPFERDISTEIYQAGSTPCNGVEGFNCYFPLQSYGFQPTNGVGYQPYRVVVLSFELLHAPATVCGPKKSTNLVKNKCVNFNFNGLTGTGVLTESNKKFLPFQQFGRDIADTTDAVRDPQTLEILDITPCSFGGVSVITPGTNTSNQVAVLYQDVNCTEVPVAIHADQLTPTWRVYSTGSNVFQTRAGCLIGAEHVNNSYECDIPIGAGICASYQTQTNSPRRARSVASQSIIAYTMSLGAENSVAYSNNSIAIPTNFTISVTTEILPVSMTKTSVDCTMYICGDSTECSNLLLQYGSFCTQLNRALTGIAVEQDKNTQEVFAQVKQIYKTPPIKDFGGFNFSQILPDPSKPSKRSFIEDLLFNKVTLADAGFIKQYGDCLGDIAARDLICAQKFNGLTVLPPLLTDEMIAQYTSALLAGTITSGWTFGAGAALQIPFAMQMAYRFNGIGVTQNVLYENQKLIANQFNSAIGKIQDSLSSTASALGKLQDVVNQNAQALNTLVKQLSSNFGCISSVLNDILSRLDKVEAEVQIDCLITGRLQSLQTYVTQQLIRAAEIRASANLAATKMSECVLGQSKRVDFCGKGYHLMSFPQSAPHGVVFLHVTYVPAQEKNFTTAPAICHDGKAHFPREGVFVSNGTHWFVTQRNFYEPQIITTDNTFVSGNCDVVIGIVNNTVYDPLQPELDSGGSGYIPEAPRDGQAYVRKDGEWVLLSTFL

SEQ ID NO: 10475 - protein, 1177 aa, Artificial Sequence
  SARS-CoV-2/Hong Kong/case85_VM20002868/2020__EPI_ISL_414519 spike protein (1-1147)(A972C_R995C) Foldon construct
MFVFLVLVPLVSSQCVNLTTRTQLPPAYTNSFTRGVYYPDKVFRSSVLHSTQDLFLPFFSNVTWFHAIHVSGTNGTKRFDNPVLPFNDGVYFASTEKSNIIRGWIFGTTLDSKTQSLLIVNNATNVVIKVCEFQFCNDPFLGVYYHKNNKSWMESEFRVYSSANNCTFEYVSQPFLMDLEGKQGNFKNLREFVFKNIDGYFKIYSKHTPINLVRDLPQGFSALEPLVDLPIGINITRFQTLLALHRSYLTPGDSSSGWTAGAAAYYVGYLQPRTFLLKYNENGTITDAVDCALDPLSETKCTLKSFTVEKGIYQTSNFRVQPTESIVRFPNITNLCPFGEVFNATRFASVYAWNRKRISNCVADYSVLYNSASFSTFKCYGVSPTKLNDLCFTNVYADSFVIRGDEVRQIAPGQTGKIADYNYKLPDDFTGCVIAWNSNNLDSKVGGNYNYLYRLFRKSNLKPFERDISTEIYQAGSTPCNGVEGFNCYFPLQSYGFQPTNGVGYQPYRVVVLSFELLHAPATVCGPKKSTNLVKNKCVNFNFNGLTGTGVLTESNKKFLPFQQFGRDIADTTDAVRDPQTLEILDITPCSFGGVSVITPGTNTSNQVAVLYQDVNCTEVPVAIHADQLTPTWRVYSTGSNVFQTRAGCLIGAEHVNNSYECDIPIGAGICASYQTQTNSPRRARSVASQSIIAYTMSLGAENSVAYSNNSIAIPTNFTISVTTEILPVSMTKTSVDCTMYICGDSTECSNLLLQYGSFCTQLNRALTGIAVEQDKNTQEVFAQVKQIYKTPPIKDFGGFNFSQILPDPSKPSKRSFIEDLLFNKVTLADAGFIKQYGDCLGDIAARDLICAQKFNGLTVLPPLLTDEMIAQYTSALLAGTITSGWTFGAGAALQIPFAMQMAYRFNGIGVTQNVLYENQKLIANQFNSAIGKIQDSLSSTASALGKLQDVVNQNAQALNTLVKQLSSNFGCISSVLNDILSRLDKVEAEVQIDCLITGRLQSLQTYVTQQLIRAAEIRASANLAATKMSECVLGQSKRVDFCGKGYHLMSFPQSAPHGVVFLHVTYVPAQEKNFTTAPAICHDGKAHFPREGVFVSNGTHWFVTQRNFYEPQIITTDNTFVSGNCDVVIGIVNNTVYDPLQPELDSGGSGYIPEAPRDGQAYVRKDGEWVLLSTFL

SEQ ID NO: 10476 - protein, 1177 aa, Artificial Sequence; identical to SEQ ID NO: 10466
  SARS-CoV-2/England/200990660/2020__EPI_ISL_414523 spike protein (1-1147)(A972C_R995C) Foldon construct

SEQ ID NO: 10477 - protein, 1177 aa, Artificial Sequence
  SARS-CoV-2/Australia/NSW09/2020__EPI_ISL_413595 spike protein (1-1147)(A972C_R995C) Foldon construct
MFVFLVLLPLVSSQCVNLTTRTQLPPAYTNSFTRGVYYPDKVFRSSVLHSTQDLFLPFFSNVTWFHAIHVSGTNGTKRFDNPVLPFNDGVYFASTEKSNIIRGWIFGTTLDSKTQSLLIVNNATNVVIKVCEFQFCNDPFLGVYYHKNNKSWMESEFRVYSSANNCTFEYVSQPFLMDLEGKQGNFKNLREFVFKNIDGYFKIYSKHTPINLVRDLPQGFSALEPLVDLPIGINITRFQTLLALHRSYLTPGDSSSGWTAGAAAYYVGYLQPRTFLLKYNENGTITDAVDCALDPLSETKCTLKSFTVEKGIYQTSNFRVQPTESIVRFPNITNLCPFGEVFNATRFASVYAWNRKRISNCVADYSVLYNSASFSTFKCYGVSPTKLNDLCFTNVYADSFVIRGDEVRQIAPGQTGKIADYNYKLPDDFTGCVIAWNSNNLDSKVGGNYNYLYRLFRKSNLKPFERDISTEIYQAGSTPCNGVEGFNCYFPLQSYGFQPTNGVGYQPYRVVVLSFELLHAPATVCGPKKSTNLVKNKCVNFNFNGLTGTGVLTESNKKFLPFQQFGRDIADTTDAVRDPQTLEILDITPCSFGGVSVITPGTNTSNQVAVLYQDVNCTEVPVAIHADQLTPTWRVYSTGSNVFQTRAGCLIGAEHVNNSYECDIPIGAGICASYQTQTNSPRRARSVASQSIIAYTMSLGAENSVAYSNNSIAIPTNFTISVTTEILPVSMTKTSVDCTMYICGDSTECSNLLLQYGSFCTQLNRALTGIAVEQDKNTQEVFAQVKQIYKTPPIKDFGGFNFSQILPDPSKPSKRSFIEDLLFNKVTLADAGFIKQYGDCLGDIAARDLICAQKFNGLTVLPPLLTDEMIAQYTSALLAGTITSGWTFGAGAALQIPFAMQMAYRFNGIGVTQNVLYENQKLIANQFNSAIGKIQDSLSFTASALGKLQDVVNQNAQALNTLVKQLSSNFGCISSVLNDILSRLDKVEAEVQIDCLITGRLQSLQTYVTQQLIRAAEIRASANLAATKMSECVLGQSKRVDFCGKGYHLMSFPQSAPHGVVFLHVTYVPAQEKNFTTAPAICHDGKAHFPREGVFVSNGTHWFVTQRNFYEPQIITTDNTFVSGNCDVVIGIVNNTVYDPLQPELDSGGSGYIPEAPRDGQAYVRKDGEWVLLSTFL

SEQ ID NO: 10478 - protein, 1177 aa, Artificial Sequence; identical to SEQ ID NO: 10458
  SARS-CoV-2/Australia/NSW10/2020__EPI_ISL_413596 spike protein (1-1147)(A972C_R995C) Foldon construct

SEQ ID NO: 10479 - protein, 1177 aa, Artificial Sequence
  SARS-CoV-2/Switzerland/1000477797/2020__EPI_ISL_413023 spike protein (1-1147)(A972C_R995C) Foldon construct
MFVFLVLLPLVSSQCVNLTTRTQLPPAYTNSFTRGVYYPDKVFRSSVLHSTQDLFLPFFSNVTWFHAIHVSGTNGTKRFDNPVLPFNDGVYFASTEKSNIIRGWIFGTTLDSKTQSLLIVNNATNVVIKVCEFQFCNDPFLGVYYHKNNKSWMESEFRVYSSANNCTFEYVSQPFLMDLEGKQGNFKNLREFVFKNIDGYFNIYSKHTPINLVRDLPQGFSALEPLVDLPIGINITRFQTLLALHRSYLTPGDSSSGWTAGAAAYYVGYLQPRTFLLKYNENGTITDAVDCALDPLSETKCTLKSFTVEKGIYQTSNFRVQPTESIVRFPNITNLCPFGEVFNATRFASVYAWNRKRISNCVADYSVLYNSASFSTFKCYGVSPTKLNDLCFTNVYADSFVIRGDEVRQIAPGQTGKIADYNYKLPDDFTGCVIAWNSNNLDSKVGGNYNYLYRLFRKSNLKPFERDISTEIYQAGSTPCNGVEGFNCYFPLQSYGFQPTNGVGYQPYRVVVLSFELLHAPATVCGPKKSTNLVKNKCVNFNFNGLTGTGVLTESNKKFLPFQQFGRDIADTTDAVRDPQTLEILDITPCSFGGVSVITPGTNTSNQVAVLYQGVNCTEVPVAIHADQLTPTWRVYSTGSNVFQTRAGCLIGAEHVNNSYECDIPIGAGICASYQTQTNSPRRARSVASQSIIAYTMSLGAENSVAYSNNSIAIPTNFTISVTTEILPVSMTKTSVDCTMYICGDSTECSNLLLQYGSFCTQLNRALTGIAVEQDKNTQEVFAQVKQIYKTPPIKDFGGFNFSQILPDPSKPSKRSFIEDLLFNKVTLADAGFIKQYGDCLGDIAARDLICAQKFNGLTVLPPLLTDEMIAQYTSALLAGTITSGWTFGAGAALQIPFAMQMAYRFNGIGVTQNVLYENQKLIANQFNSAIGKIQDSLSSTASALGKLQDVVNQNAQALNTLVKQLSSNFGCISSVLNDILSRLDKVEAEVQIDCLITGRLQSLQTYVTQQLIRAAEIRASANLAATKMSECVLGQSKRVDFCGKGYHLMSFPQSAPHGVVFLHVTYVPAQEKNFTTAPAICHDGKAHFPREGVFVSNGTHWFVTQRNFYEPQIITTDNTFVSGNCDVVIGIVNNTVYDPLQPELDSGGSGYIPEAPRDGQAYVRKDGEWVLLSTFL

SEQ ID NO: 10480 - protein, 1177 aa, Artificial Sequence
  SARS-CoV-2/Belgium/BA-02291/2020__EPI_ISL_415159 spike protein (1-1147)(A972C_R995C) Foldon construct
MFVFLVLLPLVSSQCVNLTTRTQLPPAYTNSFTRGVYYPDKVFRSSVLHSTQDLFLPFFSNVTWFHAIHVSGTNGTKRFDNPVLPFNDGVYFASTEKSNIIRGWIFGTTLDSKTQSLLIVNNATNVVIKVCEFQFCNDPFLGVYYHKNNKSWMESEFRVYSSANNCTFEYVSQPFLMDLEGKQGNFKNLREFVFKNIDGYFKIYSKHTPINLVRDLPQGFSALEPLVDLPIGINITRFQTLLALHRSYLTPGDSSSGWTAGAAAYYVGYLQPRTFLLKYNENGTITDAVDCALDPLSETKCTLKSFTVEKGIYQTSNFRVQPTESIVRFPNITNLCPFGEVFNATRFASVYAWNRKRISNCVADYSVLYNSASFSTFKCYGVSPTKLNDLCFTNVYADSFVIRGDEVRQIAPGQTGKIADYNYKLPDDFTGCVIAWNSNNLDSKVGGNYNYLYRLFRRSNLKPFERDISTEIYQAGSTPCNGVEGFNCYFPLQSYGFQPTNGVGYQPYRVVVLSFELLPAPATVCGPKKSTNLVKNKCVNFNFNGLTGTGVLTESNKKFLPFQQFGRDIADTTDAVRDPQTLEILDITPCSFGGVSVITPGTNTSNQVAVLYQGVNCTEVPVAIHADQLTPTWRVYSTGSNVFQTRAGCLIGAEHVNNSYECDIPIGAGICASYQTQTNSPRRARSVASQSIIAYTMSLGAENSVAYSNNSIAIPTNFTISVTTEILPVSMTKTSVDCTMYICGDSTECSNLLLQYGSFCTQLNRALTGIAVEQDKNTQEVFAQVKQIYKTPPIKDFGGFNFSQILPDPSKPSKRSFIEDLLFNKVTLADAGFIKQYGDCLGDIAARDLICAQKFNGLTVLPPLLTDEMIAQYTSALLAGTITSGWTFGAGAALQIPFAMQMAYRFNGIGVTQNVLYENQKLIANQFNSAIGKIQDSLSSAAPALGKLQDVVNQNAQALNTLVKQLSSNFGCISSVLNDILSRLDKVEAEVQIDCLITGRLQSLQTYVTQQLIRAAEIRASANLAATKMSECVLGQSKRVDFCGKGYHLMSFPQSAPHGVVFLHVTYVPAQEKNFTTAPAICHDGKAHFPREGVFVSNGTHWFVTQRNFYEPQIITTDNTFVSGNCDVVIGIVNNTVYDPLQPELDSGGSGYIPEAPRDGQAYVRKDGEWVLLSTFL

SEQ ID NO: 10481 - protein, 1177 aa, Artificial Sequence
  SARS-CoV-2/USA/WA8-UW5/2020__EPI_ISL_413486 spike protein (1-1147)(A972C_R995C) Foldon construct
MFVFLVLLPLVSSQCVNLTTRTQLPPAYTNSFTRGVYYPDKVFRSSVLHSTQDLFLPFFSNVTWFHAIHVSGTNGTKRFDNPVLPFNDGVYFASTEKSNIIRGWIFGTTLDSKTQSLLIVNNATNVVIKVCEFQFCNDPFLGVYYHKNNKSWMESEFRVYSSANNCTFEYVSQPFLMDLEGKQGNFKNLREFVFKNIDGYFKIYSKHTPINLVRDLPQGFSALEPLVDLPIGINITRFQTLLALHRSYLTPGDSSSGWTAGAAAYYVGYLQPRTFLLKYNENGTITDAVDCALDPLSETKCTLKSFTVEKGIYQTSNFRVQPTESIVRFPNITNLCPFGEVFNATRFASVYAWNRKRISNCVADYSVLYNSASFSTFKCYGVSPTKLNDLCFTNVYADSFVIRGDEVRQIAPGQTGKIADYNYKLPDDFTGCVIAWNSNNLDSKVGGNYNYLYRLFRKSNLKPFERDISTEIYQAGSTPCNGVEGFNCYFPLQSYGFQPTNGVGYQPYRVVVLSFELLHAPATVCGPKKSTNLVKNKCVNFNFNGLTGTGVLTESNKKFLPFQQFGRDIADTTDAVRDPQTLEILDITPCSFGGVSVITPGTNTSNQVAVLYQDVNCTEVPVAIHADQLTPTWRVYSTGSNVFQTRAGCLIGAEYVNNSYECDIPIGAGICASYQTQTNSPRRARSVASQSIIAYTMSLGAENSVAYSNNSIAIPTNFTISVTTEILPVSMTKTSVDCTMYICGDSTECSNLLLQYGSFCTQLNRALTGIAVEQDKNTQEVFAQVKQIYKTPPIKDFGGFNFSQILPDPSKPSKRSFIEDLLFNKVTLADAGFIKQYGDCLGDIAARDLICAQKFNGLTVLPPLLTDEMIAQYTSALLAGTITSGWTFGAGAALQIPFAMQMAYRFNGIGVTQNVLYENQKLIANQFNSAIGKIQDSLSSTASALGKLQDVVNQNAQALNTLVKQLSSNFGCISSVLNDILSRLDKVEAEVQIDCLITGRLQSLQTYVTQQLIRAAEIRASANLAATKMSECVLGQSKRVDFCGKGYHLMSFPQSAPHGVVFLHVTYVPAQEKNFTTAPAICHDGKAHFPREGVFVSNGTHWFVTQRNFYEPQIITTDNTFVSGNCDVVIGIVNNTVYDPLQPELDSGGSGYIPEAPRDGQAYVRKDGEWVLLSTFL

SEQ ID NO: 10482 - protein, 1177 aa, Artificial Sequence
  SARS-CoV-2/England/20102000506/2020__EPI_ISL_415147 spike protein (1-1147)(A972C_R995C) Foldon construct
MFVFLVLLPLVSSQCVNLTTRTQLPPAYTNSFTRGVYYPDKVFRSSVLHSTQDLFLPFFSNVTWFHAIHVSGTNGTKRFDNPVLPFNDGVYFASTEKSNIIRGWIFGTTLDSKTQSLLIVNNATNVVIKVCEFQFCNDPFLGVYYHKNNKSWMESEFRVYSSANNCTFEYVSQPFLMDLEGKQGNFKNLREFVFKNIDGYFKIYSKHTPINLVRDLPQGFSALEPLVDLPIGINITRFQTLLALHRSYLTPGDSSSGWTAGAAAYYVGYLQPRTFLLKYNENGTITDAVDCALDPLSETKCTLKSFTVEKGIYQTSNFRVQPTESIVRFPNITNLCPFGEVFNATRFASVYAWNRKRISNCVADYSVLYNSASFSTFKCYGVSPTKLNDLCFTNVYADSFVIRGDEVRQIAPGQTGKIADYNYKLPDDFTGCVIAWNSNNLDSKVGGNYNYLYRLFRKSNLKPFERDISTEIYQAGSTPCNGVEGFNCYFPLQSYGFQPTNGVGYQPYRVVVLSFELLHAPATVCGPKKSTNLVKNKCVNFNFNGLTGTGVLTESNKKFLPFQQFGRDIADTTDAVRDPQTLEILDITPCSFGGVSVITPGTNTSNQVAVLYQGVNCTEVPVAIHADQLTPTWRVYSTGSNVFQTRAGCLIGAEHVNNSYECDIPIGAGICASYQTQTNSPRRARSVASQSIIAYTMSLGAENSVAYSNNSIAIPTNFTISVTTEILPVSMTKTSVDCTMYICGDSTECSNLLLQYGSFCTQLNRALTGIAVEQDKNTQEVFAQVKQIYKTPPIKDFGGFNFSQILPDPSKPSKRSFIEDLLFNKVTLADAGFIKQYGYCLGDIAARDLICAQKFNGLTVLPPLLTDEMIAQYTSALLAGTITSGWTFGAGAALQIPFAMQMAYRFNGIGVTQNVLYENQKLIANQFNSAIGKIQDSLSSTASALGKLQDVVNQNAQALNTLVKQLSSNFGCISSVLNDILSRLDKVEAEVQIDCLITGRLQSLQTYVTQQLIRAAEIRASANLAATKMSECVLGQSKRVDFCGKGYHLMSFPQSAPHGVVFLHVTYVPAQEKNFTTAPAICHDGKAHFPREGVFVSNGTHWFVTQRNFYEPQIITTDNTFVSGNCDVVIGIVNNTVYDPLQPELDSGGSGYIPEAPRDGQAYVRKDGEWVLLSTFL

SEQ ID NO: 10483 - protein, 1177 aa, Artificial Sequence
  SARS-CoV-2/Belgium/VAG-03013/2020__EPI_ISL_415155 spike protein (1-1147)(A972C_R995C) Foldon construct
MFVFLVLLPLVSSQCVNLTTRTQLPPAYTNSFTRGVYYPDKVFRSSVLHSTQDLFLPFFSNVTWFHAIHVSGTNGTKRFDNPVLPFNDGVYFASTEKSNIIRGWIFGTTLDSKTQSLLIVNNATNVVIKVCEFQFCNDPFLGVYYHKNNKSWMESEFRVYSSANNCTFEYVSQPFLMDLEGKQGNFKNLREFVFKNIDGYFKIYSKHTPINLVRDLPQGFSALEPLVDLPIGINITRFQTLLALHRSYLTPGDSSSGWTAGAAAYYVGYLQPRTFLLKYNENGTITDAVDCALDPLSETKCTLKSFTVEKGIYQTSNFRVQPTESIVRFPNITNLCPFGEVFNATRFASVYAWNRKRISNCVADYSVLYNSASFSTFKCYGVSPTKLNDLCFTNVYADSFVIRGDEVRQIAPGQTGKIADYNYKLPDDFTGCVIAWNSNNLDSKVGGNYNYLYRLFRKSNLKPFERDISTEIYQAGSTPCNGVEGFNCYFPLQSYGFQPTNGVGYQPYRVVVLSFELLHAPATVCGPKKSTNLVKNKCVNFNFNGLTGTGVLTESNKKFLPFQQFGRDIADTTDAVRDPQTLEILDITPCSFGGVSVITPGTNTSNQVAVLYQGVNCTEVPVAIHADQLTPTWRVYSTGSNVFQTRAGCLIGAEHVNNSYECDIPIGAGICASYQTQTNSPRRARSVASQSIIAYTMSLGAENSVAYSNNSIAIPTNFTISVTTEILPVSMTKTSVDCTMYICGDSTECSNLLLQYGSFCTQLNRALTGIAVEQDKNTQEVFAQVKQIYKTPPIKDFGGFNFSQILPDPSKPSKRSFIEDLLFNKVTLADAGFIKQYGDCLGDIAARDLICAQKFNGLTVLPPLLTDEMIAQYTSALLAGTITSGWTFGAGAALQIPFAMQMAYRFNGIGVTQNVLYENQKLIANQFNSAIGKIQDSLSSTATALGKLQDVVNQNAQALNTLVKQLSSNFGCISSVLNDILSRLDKVEAEVQIDCLITGRLQSLQTYVTQQLIRAAEIRASANLAATKMSECVLGQSKRVDFCGKGYHLMSFPQSAPHGVVFLHVTYVPAQEKNFTTAPAICHDGKAHFPREGVFVSNGTHWFVTQRNFYEPQIITTDNTFVSGNCDVVIGIVNNTVYDPLQPELDSGGSGYIPEAPRDGQAYVRKDGEWVLLSTFL

SEQ ID NO: 10484 - protein, 1177 aa, Artificial Sequence
  SARS-CoV-2/Belgium/BC-03016/2020__EPI_ISL_415157 spike protein (1-1147)(A972C_R995C) Foldon construct
MFVFLVLLPLVSSQCVNLTTRTQLPPAYTNSFTRGVYYPDKVFRSSVLHSTQDLFLPFFSNVTWFHAIHVSGTNGTKRFDNPVLPFNDGVYFASTEKSNIIRGWIFGTTLDSKTQSLLIVNNATNVVIKVCEFQFCNDPFLGVYYHKNNKSWMESEFRVYSSANNCTFEYVSQPFLMDLEGKQGNFKNLREFVFKNIDGYFKIYSKHTPINLVRDLPQGFSALEPLVDLPIGINITRFQTLLALHRSYLTPGDSSSGWTAGAAAYYVGYLQPRTFLLKYNENGTITDAVDCALDPLSETKCTLKSFTVEKGIYQTSNFRVQPTESIVRFPNITNLCPFGEVFNATRFASVYAWNRKRISNCVADYSVLYNSASFSTFKCYGVSPTKLNDLCFTNVYADSFVIRGDEVRQIAPGQTGKIADYNYKLPDDFTGCVIAWNSNNLDSKVGGNYNYLYRLFRKSNLKPFERDISTEIYQAGSTPCNGVEGFNCYFPLQSYGFQPTNGVGYQPYRVVVLSFELLHAPATVCGPKKSTNLVKNKCVNFNFNGLTGTGVLTESNKKFLPFQQFGRDIADTTDAVRDPQTLEILDITPCSFGGVSVITPGTNTSNQVAVLYQGVNCTEVPVAIHADQLTPTWRVYSTGSNVFQTRAGCLIGAEHVNNSYECDIPIGAGICASYQTQTNSPRRARSVASQSIIAYTMSLGAENSVAYSNNSIAIPTNFTISVTTEILPVSMTKTSVDCTMYICGDSTECSNLLLQYGSFCTQLNRALTGIAVEQDKNTQEVFAQVKQIYKTPPIKDFGGFNFSQILPDPSKPSKRSFIEDLLFNKVTLADAGFIKQYGDCLGDIAARDLICAQKFNGLTVLPPLLTDEMIAQYTSALLAGTITSGWTFGAGAALQIPFAMQMAYRFNGIGVTQNVLYENQKLIANQFNSAIGKIQDSLSSTAPALGKLQDVVNQNAQALNTLVKQLSSNFGCISSVLNDILSRLDKVEAEVQIDCLITGRLQSLQTYVTQQLIRAAEIRASANLAATKMSECVLGQSKRVDFCGKGYHLMSFPQSAPHGVVFLHVTYVPAQEKNFTTAPAICHDGKAHFPREGVFVSNGTHWFVTQRNFYEPQIITTDNTFVSGNCDVVIGIVNNTVYDPLQPELDSGGSGYIPEAPRDGQAYVRKDGEWVLLSTFL

SEQ ID NO: 10485 - protein, 1177 aa, Artificial Sequence
  SARS-CoV-2/Germany/BavPat3/2020__EPI_ISL_414521 spike protein (1-1147)(A972C_R995C) Foldon construct
MFVFLVLLPLVSSQCVNLTTRTQLPPAYTNSFTRGVYYPDKVFRSSVLHSTQDLFLPFFSNVTWFHAIHVSGTNGTKRFDNPVLPFNDGVYFASTEKSNIIRGWIFGTTLDSKTQSLLIVNNATNVVIKVCEFQFCNDPFLGVYYHKNNKSWMESEFRVYSSANNCTFEYVSQPFLMDLEGKQGNFKNLREFVFKNIDGYFKIYSKHTPINLVRDLPQGFSALEPLVDLPIGINITRFQTLLALHRSYLTPGDSSSGWTAGAAAYYVGYLQPRTFLLKYNENGTITDAVDCALDPLSETKCTLKSFTVEKGIYQTSNFRVQPTESIVRFPNITNLCPFGEVFNATRFASVYAWNRKRISNCVADYSVLYNSASFSTFKCYGVSPTKLNDLCFTNVYADSFVIRGDEVRQIAPGQTGKIADYNYKLPDDFTGCVIAWNSNNLDSKVGGNYNYLYRLFRKSNLKPFERDISTEIYQAGSTPCNGVEGFNCYFPLQSYGFQPTNGVGYQPYRVVVLSFELLHAPATVCGPKKSTNLVKNKCVNFNFNGLTGTGVLTESNKKFLPFQQFGRDIADTTDAVRDPQTLEILDITPCSFGGVSVITPGTNTSNQVAVLYQDVNCTEVPVAIHADQLTPTWRVYSTGSNVFQTRAGCLIGAEHVNNSYECDIPIGAGICASYQTQTNSPRRARSVASQSIIAYTMSLGAENSVAYSNNSIAIPTNFTISVTTEILPVSMTKTSVDCTMYICGDSTECSNLLLQYGSFCTQLNRALTGIAVEQDKNTQQVFAQVKQIYKTPPIKDFGGFNFSQILPDPSKPSKRSFIEDLLFNKVTLADAGFIKQYGDCLGDIAARDLICAQKFNGLTVLPPLLTDEMIAQYTSALLAGTITSGWTFGAGAALQIPFAMQMAYRFNGIGVTQNVLYENQKLIANQFNSAIGKIQDSLSSTASALGKLQDVVNQNAQALNTLVKQLSSNFGCISSVLNDILSRLDKVEAEVQIDCLITGRLQSLQTYVTQQLIRAAEIRASANLAATKMSECVLGQSKRVDFCGKGYHLMSFPQSAPHGVVFLHVTYVPAQEKNFTTAPAICHDGKAHFPREGVFVSNGTHWFVTQRNFYEPQIITTDNTFVSGNCDVVIGIVNNTVYDPLQPELDSGGSGYIPEAPRDGQAYVRKDGEWVLLSTFL

SEQ ID NO: 10486 - protein, 1177 aa, Artificial Sequence
  SARS-CoV-2/France/HF1805/2020__EPI_ISL_414628 spike protein (1-1147)(A972C_R995C) Foldon construct
MFVFLVLLPLVSSQCVNLTTRTQLPPAYTNSFTRGVYYPDKVFRSSVLHSTQDLFLPFFSNVTWFHAIHVSGTNGTKRFDNPVLPFNDGVYFASTEKSNIIRGWIFGTTLDSKTQSLLIVNNATNVVIKVCEFQFCNDPFLGVYYHKNNKSWMESEFRVYSSANNCTFEYVSQPFLMDLEGKQGNFKNLREFVFKNIDGYFKIYSKHTPINLVRDLPQGFSALEPLVDLPIGINITRFQTLLALHRSYLTPGDSSSGWTAGAAAYYVGYLQPRTFLLKYNENGTITDAVDCALDPLSETKCTLKSFTVEKGIYQTSNFRVQPTESIVRFPNITNLCPFGEVFNATRFASVYAWNRKRISNCVADYSVLYNSASFSTFKCYGVSPTKLNDLCFTNVYADSFVIRGDEVRQIAPGQTGKIADYNYKLPDDFTGCVIAWNSNNLDSKVGGNYNYLYRLFRKSNLKPFERDISTEIYQAGSTPCNGVEGFNCYFPLQSYGFQPTNGVGYQPYRVVVLSFELLHAPATVCGPKKSTNLVKNKCVNFNFNGLTGTGVLTESNKKFLPFQQFGRDIADTTDAVRDPQTLEILDITPCSFGGVSVITPGTNTSNQVAVLYQGVNCTEVPVAIHADQLTPTWRVYSTGSNVFQTRAGCLIGAEHVNNSYECDIPIGAGICASYQTQTNSPRRARSVASQSIIAYTMSLGAENSVAYSNNSIAIPTNFTISVTTEILPVSMTKTSVDCTMYICGDSTECSNLLLQYGSFCTQLNRALTGIAVEQDKNTQEVFAQVKQIYKTPPIKDFGGFNFSQILPDPSKPSKRSFIEDLLFNKVTLADAGFIKQYGDCLGDIAARDLICAQKFNGLTVLPPLLTDEMIAQYTSALLAGTITSGWTFGAGAALQIPFAMQMAYRFNGIGVTQNVLYENQKLIANQFNSAIGKIQDSLSSTASALGKLQDVVNQNAQALNTLVKQLSSNFGCISSVLNDILSRLDKVEAEVQIDCLITGRLQSLQTYVTQQLIRAAEIRASANLAATKMSECVLGQSKRVDFCGKGYHLMSFPQSAPHGVVFLHVTYVPAQEKNFTTAPAICHDGKAHFPREGVFVSNGTHWFVTQRNFYEPQIITTDNTFVSGNCDVVIGVVNNTVYDPLQPELDSGGSGYIPEAPRDGQAYVRKDGEWVLLSTFL

SEQ ID NO: 10487 - protein, 1177 aa, Artificial Sequence
  SARS-CoV-2/Netherlands/ZuidHolland_9/2020__EPI_ISL_414445 spike protein (1-1147)(A972C_R995C) Foldon construct
MFVFLVLLPLVSSQCVNLTTRTQLPPAYTNSFTRGVYYPDKVFRSSVLHSTQDLFLPFFSNVTWFHAIHVSGTNGTKRFDNPVLPFNDGVYFASTEKSNIIRGWIFGTTLDSKTQSLLIVNNATNVVIKVCEFQFCNDPFLGVYYHKNNKSWMESEFRVYSSANNCTFEYVSQPFLMDLEGKQGNFKNLREFVFKNIDGYFKIYSKHTPINLVRDLPQGFSALEPLVDLPIGINITRFQTLLALHRSYLTPGDSSSGWTAGAAAYYVGYLQPRTFLLKYNENGTITDAVDCALDPLSETKCTLKSFTVEKGIYQTSNFRVQPTESIVRFPNITNLCPFGEVFNATRFASVYAWNRKRISNCVADYSVLYNSASFSTFKCYGVSPTKLNDLCFTNVYADSFVIRGDEVRQIAPGQTGKIADYNYKLPDDFTGCVIAWNSNNLDSKVGGNYNYLYRLFRKSNLKPFERDISTEIYQAGSTPCNGVEGFNCYFPLQSYGFQPTNGVGYQPYRVVVLSFELLHAPATVCGPKKSTNLVKNKCVNFNFNGLTGTGVLTESNKKFLPFQQFGRDIADTTDAVRDPQTLEILDITPCSFGGVSVITPGTNTSNQVAVLYQGVNCTEVPVAIHADQLTPTWRVYSTGSNVFQTRAGCLIGAEHVNNSYECDIPIGAGICASYQTQTNSPRRARSVASQSIIAYTMSLGAENSVAYSNNSIAIPTNFTISVTTEILPVSMTKTSVDCTMYICGDSTECSNLLLQYGSFCTQLNRALTGIAVEQDKNTQEVFAQVKQIYKTPPIKDFGGFNFSQILPDPSKPSKRSFIEDLLFNKVTLADAGFIKQYGDCLGDIAARDLICVQKFNGLTVLPPLLTDEMIAQYTSALLAGTITSGWTFGAGAALQIPFAMQMAYRFNGIGVTQNVLYENQKLIANQFNSAIGKIQDSLSSTASALGKLQDVVNQNAQALNTLVKQLSSNFGCISSVLNDILSRLDKVEAEVQIDCLITGRLQSLQTYVTQQLIRAAEIRASANLAATKMSECVLGQSKRVDFCGKGYHLMSFPQSAPHGVVFLHVTYVPAQEKNFTTAPAICHDGKAHFPREGVFVSNGTHWFVTQRNFYEPQIITTDNTFVSGNCDVVIGIVNNTVYDPLQPELDSGGSGYIPEAPRDGQAYVRKDGEWVLLSTFL

SEQ ID NO: 10488 - protein, 1177 aa, Artificial Sequence
  SARS-CoV-2/Finland/FIN03032020A/2020__EPI_ISL_413602 spike protein (1-1147)(A972C_R995C) Foldon construct
MFVFLVLLPLVSSQCVNLTTRTQLPPAYTNSFTRGVYYPDKVFRSSVLHSTQDLFLPFFSNVTWFHAIHVSGTNGTKRFDNPVLPFNDGVYFASTEKSNIIRGWIFGTTLDSKTQSLLIVNNATNVVIKVCEFQFCNDPFLGVYYHKNNKSWMESEFRVYSSANNCTFEYVSQPFLMDLEGKQGNFKNLREFVFKNIDGYFKIYSKHTPINLVRDLPQGFSALEPLVDLPIGINITRFQTLLALHRSYLTPGDSSSGWTAGAAAYYVGYLQPRTFLLKYNENGTITDAVDCALDPLSETKCTLKSFTVEKGIYQTSNFRVQPTESIVRFPNITNLCPFGEVFNATRFASVYAWNRKRISNCVADYSVLYNSASFSTFKCYGVSPTKLNDLCFTNVYADSFVIRGDEVRQIAPGQTGKIADYNYKLPDDFTGCVISWNSNNLDSKVGGNYNYLYRLFRKSNLKPFERDISTEIYQAGSTPCNGVEGFNCYFPLQSYGFQPTNGVGYQPYRVVVLSFELLHAPATVCGPKKSTNLVKNKCVNFNFNGLTGTGVLTESNKKFLPFQQFGRDIADTTDAVRDPQTLEILDITPCSFGGVSVITPGTNTSNQVAVLYQGVNCTEVPVAIHADQLTPTWRVYSTGSNVFQTRAGCLIGAEHVNNSYECDIPIGAGICASYQTQTNSPRRARSVASQSIIAYTMSLGAENSVAYSNNSIAIPTNFTISVTTEILPVSMTKTSVDCTMYICGDSTECSNLLLQYGSFCTQLNRALTGIAVEQDKNTQEVFAQVKQIYKTPPIKDFGGFNFSQILPDPSKPSKRSFIEDLLFNKVTLADAGFIKQYGDCLGDIAARDLICAQKFNGLTVLPPLLTDEMIAQYTSALLAGTITSGWTFGAGAALQIPFAMQMAYRFNGIGVTQNVLYENQKLIANQFNSAIGKIQDSLSSTASALGKLQDVVNQNAQALNTLVKQLSSNFGCISSVLNDILSRLDKVEAEVQIDCLITGRLQSLQTYVTQQLIRAAEIRASANLAATKMSECVLGQSKRVDFCGKGYHLMSFPQSAPHGVVFLHVTYVPAQEKNFTTAPAICHDGKAHFPREGVFVSNGTHWFVTQRNFYEPQIITTDNTFVSGNCDVVIGIVNNTVYDPLQPELDSGGSGYIPEAPRDGQAYVRKDGEWVLLSTFL

SEQ ID NO: 10489 - protein, 1177 aa, Artificial Sequence
  SARS-CoV-2/France/GE1977/2020__EPI_ISL_414632 spike protein (1-1147)(A972C_R995C) Foldon construct
MFVFLVLLPLVSSQCVNLTTRTQLPPAYTNSFTRGVYYPDKVFRSSVLHSTQDLFLPFFSNVTWFHAIHVSGTNGTKRFDNPVLPFNDGVYFASTEKSNIIRGWIFGTTLDSKTQSLLIVNNATNVVIKVCEFQFCNDPFLGVYYHKNNKSWMESEFRVYSSANNCTFEYVSQPFLMDLEGKQGNFKNLREFVFKNIDGYFKIYSKHTPINLVRDLPQGFSALEPLVDLPIGINITRFQTLLALHRSYLTPGDSSSGWTAGAAAYYVGYLQPRTFLLKYNENGTITDAVDCALDPLSETKCTLKSFTVEKGIYQTSNFRVQPTESIVRFPNITNLCPFGEVFNATRFASVYAWNRKRISNCVADYSVLYNSASFSTFKCYGVSPTKLNDLCFTNVYADSFVIRGDEVRQIAPGQTGKIADYNYKLPDDFTGCVIAWNSNNLDSKVGGNYNYLYRLFRKSNLKPFERDISTEIYQAGSTPCNGVEGFNCYFPLQSYGFQPTNGVGYQPYRVVVLSFELLHAPATVCGPKKSTNLVKNKCVNFNFNGLTGTGVLTESNKKFLPFQQFGRDIADTTDAVRDPQTLEILDITPCSFGGVSVITPGTNTSNQVAVLYQGVNCTEVPVAIHADQLTPTWRVYSTGSNVFQTRAGCLIGAEHVNNSYECDIPIGAGICASYQTQTNSPRRARSVASQSIIAYTMSLGAENSVAYSNNSIAIPTNFTISVTTEILPVSMTKTSVDCTMYICGDSTECSNLLLQYGSFCTQLNRALTGIAVEQDKNTQEVFAQVKQIYKTPPIKDFGGFNFSQILPDPSKPSKRSFIEDLLFNKVTLADAGFIKQYGDCLGDIAARDLICAQKFNGLTVLPPLLTDEMIAQYTSALLAGTITSGWTFGAGAALQIPFAMQMAYRFNGIGVTQNVLYENQKLIANQFNSAIGKIQDSLFSTASALGKLQDVVNQNAQALNTLVKQLSSNFGCISSVLNDILSRLDKVEAEVQIDCLITGRLQSLQTYVTQQLIRAAEIRASANLAATKMSECVLGQSKRVDFCGKGYHLMSFPQSAPHGVVFLHVTYVPAQEKNFTTAPAICHDGKAHFPREGVFVSNGTHWFVTQRNFYEPQIITTDNTFVSGNCDVVIGIVNNTVYDPLQPELDSGGSGYIPEAPRDGQAYVRKDGEWVLLSTFL

SEQ ID NO: 10490 - protein, 1177 aa, Artificial Sequence
  SARS-CoV-2/Finland/FIN-313/2020__EPI_ISL_414641 spike protein (1-1147)(A972C_R995C) Foldon construct
MFVFLVLLPLVSSQCVNLTTRTQLPPAYTNSFTRGVYYPDKVFRSSVLHSTQDLFLPFFSNVTWFHAIHVSGTNGTKRFDNPVLPFNDGVYFASTEKSNIIRGWIFGTTLDSKTQSLLIVNNATNVVIKVCEFQFCNDPFLGVYYHKNNKSWMESEFRVYSSANNCTFEYVSQPFLMDLEGKQGNFKNLREFVFKNIDGYFKIYSKHTPINLVRDLPQGFSALEPLVDLPIGINITRFKTLLALHRSYLTPGDSSSGWTAGAAAYYVGYLQPRTFLLKYNENGTITDAVDCALDPLSETKCTLKSFTVEKGIYQTSNFRVQPTESIVRFPNITNLCPFGEVFNATRFASVYAWNRKRISNCVADYSVLYNSASFSTFKCYGVSPTKLNDLCFTNVYADSFVIRGDEVRQIAPGQTGKIADYNYKLPDDFTGCVIAWNSNNLDSKVGGNYNYLYRLFRKSNLKPFERDISTEIYQAGSTPCNGVEGFNCYFPLQSYGFQPTNGVGYQPYRVVVLSFELLHAPATVCGPKKSTNLVKNKCVNFNFNGLTGTGVLTESNKKFLPFQQFGRDIADTTDAVRDPQTLEILDITPCSFGGVSVITPGTNTSNQVAVLYQGVNCTEVPVAIHADQLTPTWRVYSTGSNVFQTRAGCLIGAEHVNNSYECDIPIGAGICASYQTQTNSPRRARSVASQSIIAYTMSLGAENSVAYSNNSIAIPTNFTISVTTEILPVSMTKTSVDCTMYICGDSTECSNLLLQYGSFCTQLNRALTGIAVEQDKNTQEVFAQVKQIYKTPPIKDFGGFNFSQILPDPSKPSKRSFIEDLLFNKVTLADAGFIKQYGDCLGDIAARDLICAQKFNGLTVLPPLLTDEMIAQYTSALLAGTITSGWTFGAGAALQIPFAMQMAYRFNGIGVTQNVLYENQKLIANQFNSAIGKIQDSLSSTASALGKLQDVVNQNAQALNTLVKQLSSNFGCISSVLNDILSRLDKVEAEVQIDCLITGRLQSLQTYVTQQLIRAAEIRASANLAATKMSECVLGQSKRVDFCGKGYHLMSFPQSAPHGVVFLHVTYVPAQEKNFTTAPAICHDGKAHFPREGVFVSNGTHWFVTQRNFYEPQIITTDNTFVSGNCDVVIGIVNNTVYDPLQPELDSGGSGYIPEAPRDGQAYVRKDGEWVLLSTFL

SEQ ID NO: 10491 - protein, 1177 aa, Artificial Sequence
  SARS-CoV-2/Netherlands/ZuidHolland_2/2020__EPI_ISL_414556 spike protein (1-1147)(A972C_R995C) Foldon construct
MFVFLVLLPLVSSQCVNLTTRTQLPPAYTNSFTRGVYYPDKVFRSSVLHSTQDLFLPFFSNVTWFHAIHVSGTNGTKRFDNPVLPFNDGVYFASTEKSNIIRGWIFGTTLDSKTQSLLIVNNATNVVIKVCEFQFCNDPFLGVYYHKNNKSWMESEFRVYSSANNCTFEYVSQPFLMDLEGKQGNFKNLREFVFKNIDGYFKIYSKHTPINLVRDLPQGFSALEPLVDLPIGINITRFQTLLALHRSYLTPGDSSSGWTAGAAAYYVGYLQPRTFLLKYNENGTITDAVDCALDPLSETKCTLKSFTVEKGIYQTSNFRVQPTESIVRFPNITNLCPFGEVFNATRFASVYAWNRKRISNCVADYSVLYNSASFSTFKCYGVSPTKLNDLCFTNVYADSFVIRGDEVRQIAPGQTGKIADYNYKLPDDFTGCVIAWNSNNLDSKVGGNYNYLYRLFRKSNLKPFERDISTEIYQAGSTPCNGVEGFNCYFPLQSYGFQPTNGVGYQPYRVVVLSFELLHAPATVCGPKKSTNLVKNKCVNFNFNGLTGTGVLTESNKKFLPFQQFGRDIADTTDAVRDPQTLEILDITPCSFGGVSVITPGTNTSNQVAVLYQGVNCTEVPVAIHADQLTPTWRVYSTGSNVFQTRAGCLIGAEHVNNSYECDIPIGAGICASYQTQTNSPRRARSVASQSIIAYTMSLGAENSVAYSNNSIAIPTNFTISVTTEILPVSMTKTSVDCTMYICGDSTECSNLLLQYGSFCTQLNRALTGIALEQDKNTQEVFAQVKQIYKTPPIKDFGGFNFSQILPDPSKPSKRSFIEDLLFNKVTLADAGFIKQYGDCLGDIAARDLICAQKFNGLTVLPPLLTDEMIAQYTSALLAGTITSGWTFGAGAALQIPFAMQMAYRFNGIGVTQNVLYENQKLIANQFNSAIGKIQDSLSSTASALGKLQDVVNQNAQALNTLVKQLSSNFGCISSVLNDILSRLDKVEAEVQIDCLITGRLQSLQTYVTQQLIRAAEIRASANLAATKMSECVLGQSKRVDFCGKGYHLMSFPQSAPHGVVFLHVTYVPAQEKNFTTAPAICHDGKAHFPREGVFVSNGTHWFVTQRNFYEPQIITTDNTFVSGNCDVVIGIVNNTVYDPLQPELDSGGSGYIPEAPRDGQAYVRKDGEWVLLSTFL

SEQ ID NO: 10492 - protein, 1177 aa, Artificial Sequence
  SARS-CoV-2/USA/WA-UW31/2020__EPI_ISL_414618 spike protein (1-1147)(A972C_R995C) Foldon construct
MFVFLVLLPLVSSQCVNLTTRTQLPPAYTNSFTRGVYYPDKVFRSSVLHSTQDLFLPFFSNVTWFHAIHVSGTNGTKRFDNPVLPFNDGVYFASTEKSNIIRGWIFGTTLDSKTQSLLIVNNATNVVIKVCEFQFCNDPFLGVYYHKNNKSWMESEFRVYSSANNCTFEYVSQPFLMDLEGKQGNFKNLREFVFKNIDGYFKIYSKHTPINLVRDLPQGFSALEPLVDLPIGINITRFQTLLALHRSYLTPGDSSSGWTAGAAAYYVGYLQPRTFLLKYNENGTITDAVDCALDPLSETKCTLKSFTVEKGIYQTSNFRVQPTESIVRFPNITNLCPFGEVFNATRFASVYAWNRKRISNCVADYSVLYNSASFSTFKCYGVSPTKLNDLCFTNVYADSFVIRGDEVRQIAPGQTGKIADYNYKLPDDFTGCVIAWNSNNLDSKVGGNYNYLYRLFRKSNLKPFERDISTEIYQAGSTPCNGAEGFNCYFPLQSYGFQPTNGVGYQPYRVVVLSFELLHAPATVCGPKKSTNLVKNKCVNFNFNGLTGTGVLTESNKKFLPFQQFGRDIADTTDAVRDPQTLEILDITPCSFGGVSVITPGTNTSNQVAVLYQDVNCTEVPVAIHADQLTPTWRVYSTGSNVFQTRAGCLIGAEHVNNSYECDIPIGAGICASYQTQTNSPRRARSVASQSIIAYTMSLGAENSVAYSNNSIAIPTNFTISVTTEILPVSMTKTSVDCTMYICGDSTECSNLLLQYGSFCTQLNRALTGIAVEQDKNTQEVFAQVKQIYKTPPIKDFGGFNFSQILPDPSKPSKRSFIEDLLFNKVTLADAGFIKQYGDCLGDIAARDLICAQKFNGLTVLPPLLTDEMIAQYTSALLAGTITSGWTFGAGAALQIPFAMQMAYRFNGIGVTQNVLYENQKLIANQFNSAIGKIQDSLSSTASALGKLQDVVNQNAQALNTLVKQLSSNFGCISSVLNDILSRLDKVEAEVQIDCLITGRLQSLQTYVTQQLIRAAEIRASANLAATKMSECVLGQSKRVDFCGKGYHLMSFPQSAPHGVVFLHVTYVPAQEKNFTTAPAICHDGKAHFPREGVFVSNGTHWFVTQRNFYEPQIITTDNTFVSGNCDVVIGIVNNTVYDPLQPELDSGGSGYIPEAPRDGQAYVRKDGEWVLLSTFL

SEQ ID NO: 10493 - protein, 1177 aa, Artificial Sequence
  SARS-CoV-2/South Korea/SNU01/2020__EPI_ISL_411929 spike protein (1-1147)(A972C_R995C) Foldon construct
MFVFLVLLPLVSSQCVNLTTRTQLPPAYTNSFTRGVYYPDKVFRSSVLHSTQDLFLPFFSNVTWFHAIHVSGTNGTKRFDNPVLPFNDGVYFASTEKSNIIRGWIFGTTLDSKTQSLLIVNNATNVVIKVCEFQFCNDPFLGVYYHKNNKSWMESEFRVYSSANNCTFEYVSQPFLMDLEGKQGNFKNLREFVFKNIDGYFKIYSKHTPINLVRDLPQGFWALEPLVDLPIGINITRFQTLLALHRSYLTPGDSSSGWTAGAAAYYVGYLQPRTFLLKYNENGTITDAVDCALDPLSETKCTLKSFTVEKGIYQTSNFRVQPTESIVRFPNITNLCPFGEVFNATRFASVYAWNRKRISNCVADYSVLYNSASFSTFKCYGVSPTKLNDLCFTNVYADSFVIRGDEVRQIAPGQTGKIADYNYKLPDDFTGCVIAWNSNNLDSKVGGNYNYLYRLFRKSNLKPFERDISTEIYQAGSTPCNGVEGFNCYFPLQSYGFQPTNGVGYQPYRVVVLSFELLHAPATVCGPKKSTNLVKNKCVNFNFNGLTGTGVLTESNKKFLPFQQFGRDIADTTDAVRDPQTLEILDITPCSFGGVSVITPGTNTSNQVAVLYQDVNCTEVPVAIHADQLTPTWRVYSTGSNVFQTRAGCLIGAEHVNNSYECDIPIGAGICASYQTQTNSPRRARSVASQSIIAYTMSLGAENSVAYSNNSIAIPTNFTISVTTEILPVSMTKTSVDCTMYICGDSTECSNLLLQYGSFCTQLNRALTGIAVEQDKNTQEVFAQVKQIYKTPPIKDFGGFNFSQILPDPSKPSKRSFIEDLLFNKVTLADAGFIKQYGDCLGDIAARDLICAQKFNGLTVLPPLLTDEMIAQYTSALLAGTITSGWTFGAGAALQIPFAMQMAYRFNGIGVTQNVLYENQKLIANQFNSAIGKIQDSLSSTASALGKLQDVVNQNAQALNTLVKQLSSNFGCISSVLNDILSRLDKVEAEVQIDCLITGRLQSLQTYVTQQLIRAAEIRASANLAATKMSECVLGQSKRVDFCGKGYHLMSFPQSAPHGVVFLHVTYVPAQEKNFTTAPAICHDGKAHFPREGVFVSNGTHWFVTQRNFYEPQIITTDNTFVSGNCDVVIGIVNNTVYDPLQPELDSGGSGYIPEAPRDGQAYVRKDGEWVLLSTFL

SEQ ID NO: 10494 - protein, 1177 aa, Artificial Sequence
  SARS-CoV-2/China/WF0004/2020__EPI_ISL_413694 spike protein (1-1147)(A972C_R995C) Foldon construct
MFVFLVLLPLVSSQCVNLTTRTQLPPAYTNSFTRGVYYPDKVFRSSVLHSTQDLFLPFFSNVTWFHAIHVSGTNGTKRFDNPVLPFNDGVYFASTEKSNIIRGWIFGTTLDSKTQSLLIVNNATNVVIKVCEFQFCNDPFLGVYYHKNNKSWTESEFRVYSSANNCTFEYVSQPFLMDLEGKQGNFKNLREFVFKNIDGYFKIYSKHTPINLVRDLPQGFSALEPLVDLPIGINITRFQTLLALHRSYLTPGDSSSGWTAGAAAYYVGYLQPRTFLLKYNENGTITDAVDCALDPLSETKCTLKSFTVEKGIYQTSNFRVQPTESIVRFPNITNLCPFGEVFNATRFASVYAWNRKRISNCVADYSVLYNSASFSTFKCYGVSPTKLNDLCFTNVYADSFVIRGDEVRQIAPGQTGKIADYNYKLPDDFTGCVIAWNSNNLDSKVGGNYNYLYRLFRKSNLKPFERDISTEIYQAGSTPCNGVEGFNCYFPLQSYGFQPTNGVGYQPYRVVVLSFELLHAPATVCGPKKSTNLVKNKCVNFNFNGLTGTGVLTESNKKFLPFQQFGRDIADTTDAVRDPQTLEILDITPCSFGGVSVITPGTNTSNQVAVLYQDVNCTEVPVAIHADQLTPTWRVYSTGSNVFQTRAGCLIGAEHVNNSYECDIPIGAGICASYQTQTNSPRRARSVASQSIIAYTMSLGAENSVAYSNNSIAIPTNFTISVTTEILPVSMTKTSVDCTMYICGDSTECSNLLLQYGSFCTQLNRALTGIAVEQDKNTQEVFAQVKQIYKTPPIKDFGGFNFSQILPDPSKPSKRSFIEDLLFNKVTLADAGFIKQYGDCLGDIAARDLICAQKFNGLTVLPPLLTDEMIAQYTSALLAGTITSGWTFGAGAALQIPFAMQMAYRFNGIGVTQNVLYENQKLIANQFNSAIGKIQDSLSSTASALGKLQDVVNQNAQALNTLVKQLSSNFGCISSVLNDILSRLDKVEAEVQIDCLITGRLQSLQTYVTQQLIRAAEIRASANLAATKMSECVLGQSKRFDFCGKGYHLMSFPQSAPHGVVFLHVTYVPAQEKNFTTAPAICHDGKAHFPREGVFVSNGTHWFVTQRNFYEPQIITTDNTFVSGNCDVVIGIVNNTVYDPLQPELDSGGSGYIPEAPRDGQAYVRKDGEWVLLSTFL

SEQ ID NO: 10495 - protein, 1177 aa, Artificial Sequence
  SARS-CoV-2/China/WF0028/2020__EPI_ISL_413791 spike protein (1-1147)(A972C_R995C) Foldon construct
MFVFLVLLPLVSSQCVNLTTRTQLPPAYTNSFTRGVYYPDKVFRSSVLHSTQDLFLPFFSNVTWFHAIHVSGTNGTKRFDNPVLPFNDGVYFASTEKSNIIRGWIFGTTLDSKTQSLLIVNNATNVVIKVCEFQFCNDPFLGVYYHKNNKSWMESEFRVYSSANNCTFEYVSQPFLMDLEGKQGNFKNLREFVFKNIDGYFKIYSKHTPINLVRDLPQGFSALEPLVDLPIGINITRFQTLLALHRSYLTPGDSSSGWTAGAAAYYVGYLQPRTFLLKYNENGTITDAVDCALDPLSETKCTLKSFTVEKGIYQTSNFRVQPTESIVRFPNITNLCPFGEVFNATRFASVYAWNRKRISNCVADYSVLYNSASFSTFKCYGVSPTKLNDLCFTNVYADSFVIRGDEVRQIAPGQTGKIADYNYKLPDDFTGCVIAWNSNNLDSKVGGNYNYLYRLFRKSNLKPFERDISTEIYQAGSTPCNGVEGFNCYFPLQSYGFQPTNGVGYQPYRVVVLSFELLHAPATVCGPKKSTNLVKNKCVNFNFNGLTGTGVLTESNKKFLPFQQFGRDIADTTDAVRDPQTLEILDITPCSFGGVSVITPGTNTSNQVAVLYQDVNCTEVPVAIHADQLTPTWRVYSTGSNVFQTRAGCLIGAEHVNNSYECDIPIGAGICASYQTQTNSPRRARSVASQSIIAYTMSLGAENSVAYSNNSIAIPTNFTISVTTEILPVSMTKTSVDCTMYICGDSTECSNLLLQYGSFCTQLNRALTGIAVEQDKNTQEVFAQVKQIYKTPPIKDFGGFNFSQILPDPSKPSKRSFIEDLLFNKVTLADAGFIKQYGDCLGDIAARDLICAQKFNGLTVLPPLLTDEMIAQYTSALLAGTITSGWTFGAGAALQIPFAMQMAYRFNGIGVTQNVLYENQKLIANQFNSAIGKIQDSLSSTASALGKLQDVVNQNAQALNTLVKQLSSNFGCISSVLNDILSRLDKVEAEVQIDCLITGRLQSLQTYVTQQLIRAAEIRASANLAATKMSECVLGQSKRVDFCGKGYHLMSFPQSAPHGVVFLHVTYVPAQEKNFTTAPAICHDGKAHFPREGVFVSNGTHWFVTQRNFYEPQIITTDNTFVSGNCDVVIGIVNNTVYDPLQPELESGGSGYIPEAPRDGQAYVRKDGEWVLLSTFL

SEQ ID NO: 10496 - protein, 1177 aa, Artificial Sequence
  SARS-CoV-2/2019-nCoV/USA-CruiseA-18/2020__MT159716.1 spike protein (1-1147)(A972C_R995C) Foldon construct
MFVFLVLLPLVSSQCVNLTTRTQLPPAYTNSFTRGVYYPDKVFRSSVLHSTQDLFLPFFSNVTWFHAIHVSGTNGTKRFDNPVLPFNDGVYFASTEKSNIIRGWIFGTTLDSKTQSLLIVNNATNVVIKVCEFQFCNDPFLGVYYHKNNKSWMESELRVYSSANNCTFEYVSQPFLMDLEGKQGNFKNLREFVFKNIDGYFKIYSKHTPINLVRDLPQGFSALEPLVDLPIGINITRFQTLLALHRSYLTPGDSSSGWTAGAAAYYVGYLQPRTFLLKYNENGTITDAVDCALDPLSETKCTLKSFTVEKGIYQTSNFRVQPTESIVRFPNITNLCPFGEVFNATRFASVYAWNRKRISNCVADYSVLYNSASFSTFKCYGVSPTKLNDLCFTNVYADSFVIRGDEVRQIAPGQTGKIADYNYKLPDDFTGCVIAWNSNNLDSKVGGNYNYLYRLFRKSNLKPFERDISTEIYQAGSTPCNGVEGFNCYFPLQSYGFQPTNGVGYQPYRVVVLSFELLHAPATVCGPKKSTNLVKNKCVNFNFNGLTGTGVLTESNKKFLPFQQFGRDIADTTDAVRDPQTLEILDITPCSFGGVSVITPGTNTSNQVAVLYQDVNCTEVPVAIHADQLTPTWRVYSTGSNVFQTRAGCLIGAEHVNNSYECDIPIGAGICASYQTQTNSPRRARSVASQSIIAYTMSLGAENSVAYSNNSIAIPTNFTISVTTEILPVSMTKTSVDCTMYICGDSTECSNLLLQYGSFCTQLNRALTGIAVEQDKNTQEVFAQVKQIYKTPPIKDFGGFNFSQILPDPSKPSKRSFIEDLLFNKVTLADAGFIKQYGDCLGDIAARDLICAQKFNGLTVLPPLLTDEMIAQYTSALLAGTITSGWTFGAGAALQIPFAMQMAYRFNGIGVTQNVLYENQKLIANQFNSAIGKIQDSLSSTASALGKLQDVVNQNAQALNTLVKQLSSNFGCISSVLNDILSRLDKVEAEVQIDCLITGRLQSLQTYVTQQLIRAAEIRASANLAATKMSECVLGQSKRVDFCGKGYHLMSFPQSAPHGVVFLHVTYVPAQEKNFTTAPAICHDGKAHFPREGVFVSNGTHWFVTQRNFYEPQIITTDNTFVSGNCDVVIGIVNNTVYDPLQPELDSGGSGYIPEAPRDGQAYVRKDGEWVLLSTFL

SEQ ID NO: 10497 - protein, 1177 aa, Artificial Sequence
  SARS-CoV-2/SARS-CoV-2/Yunnan-01/human/2020/CHN__MT049951.1 spike protein (1-1147)(A972C_R995C) Foldon construct
MFVFLVLLPLVSSQCVNLTTRTQLPPANTNSFTRGVYYPDKVFRSSVLHSTQDLFLPFFSNVTWFHAIHVSGTNGTKRFDNPVLPFNDGVYFASTEKSNIIRGWIFGTTLDSKTQSLLIVNNATNVVIKVCEFQFCNDPFLGVYYHKNNKSWMESEFRVYSSANNCTFEYVSQPFLMDLEGKQGNFKNLREFVFKNIDGYFKIYSKHTPINLVRDLPQGFSALEPLVDLPIGINITRFQTLLALHRSYLTPGDSSSGWTAGAAAYYVGYLQPRTFLLKYNENGTITDAVDCALDPLSETKCTLKSFTVEKGIYQTSNFRVQPTESIVRFPNITNLCPFGEVFNATRFASVYAWNRKRISNCVADYSVLYNSASFSTFKCYGVSPTKLNDLCFTNVYADSFVIRGDEVRQIAPGQTGKIADYNYKLPDDFTGCVIAWNSNNLDSKVGGNYNYLYRLFRKSNLKPFERDISTEIYQAGSTPCNGVEGFNCYFPLQSYGFQPTNGVGYQPYRVVVLSFELLHAPATVCGPKKSTNLVKNKCVNFNFNGLTGTGVLTESNKKFLPFQQFGRDIADTTDAVRDPQTLEILDITPCSFGGVSVITPGTNTSNQVAVLYQDVNCTEVPVAIHADQLTPTWRVYSTGSNVFQTRAGCLIGAEHVNNSYECDIPIGAGICASYQTQTNSPRRARSVASQSIIAYTMSLGAENSVAYSNNSIAIPTNFTISVTTEILPVSMTKTSVDCTMYICGDSTECSNLLLQYGSFCTQLNRALTGIAVEQDKNTQEVFAQVKQIYKTPPIKDFGGFNFSQILPDPSKPSKRSFIEDLLFNKVTLADAGFIKQYGDCLGDIAARDLICAQKFNGLTVLPPLLTDEMIAQYTSALLAGTITSGWTFGAGAALQIPFAMQMAYRFNGIGVTQNVLYENQKLIANQFNSAIGKIQDSLSSTASALGKLQDVVNQNAQALNTLVKQLSSNFGCISSVLNDILSRLDKVEAEVQIDCLITGRLQSLQTYVTQQLIRAAEIRASANLAATKMSECVLGQSKRVDFCGKGYHLMSFPQSAPHGVVFLHVTYVPAQEKNFTTAPAICHDGKAHFPREGVFVSNGTHWFVTQRNFYEPQIITTDNTFVSGNCDVVIGIVNNTVYDPLQPELDSGGSGYIPEAPRDGQAYVRKDGEWVLLSTFL

SEQ ID NO: 10498 - protein, 1177 aa, Artificial Sequence
  SARS-CoV-2/USA/WA-UW292/2020__EPI_ISL_418077 spike protein (1-1147)(A972C_R995C) Foldon construct
MFVFLVLLPLVSSQCVNLTTRTQLPPAYTNSFTRGVYYPDKVFRSSVLHSTQDLFLPFFSNVTWFHAIHVSGTNGTKRFDNPVLPFNDGVYFASTEKSNIIRGWIFGTTLDSKTQSLLIVNNATNVVIKVCEFQFCNDPFLGVYYHKNNKSWMESEFRVYSSANNCTFEYVSQPFLMDLEGKQGNFKNLREFVFKNIDGYFKIYSKHTPINLVRDLPQGFSALEPLVDLPIGINITRFQTLLALHRSYLTPGDSSSGWTAGAAAYYVGYLQPRTFLLKYNENGTITDAVDCALDPLSETKCTLKSFTVEKGIYQTSNFRVQPTESIVRFPNITNLCPFGEVFNATRFASVYAWNRKRISNCVADYSVLYNSASFSTFKCYGVSPTKLNDLCFTNVYADSFVIRGDEVRQIAPGQTGKIADYNYKLPDDFTGCVIAWNSNNLDSKVGGNYNYLYRLFRKSNLKPFERDISTEIYQASSTPCNGVEGFNCYFPLQSYGFQPTNGVGYQPYRVVVLSFELLHAPATVCGPKKSTNLVKNKCVNFNFNGLTGTGVLTESNKKFLPFQQFGRDIADTTDAVRDPQTLEILDITPCSFGGVSVITPGTNTSNQVAVLYQDVNCTEVPVAIHADQLTPTWRVYSTGSNVFQTRAGCLIGAEHVNNSYECDIPIGAGICASYQTQTNSPRRARSVASQSIIAYTMSLGAENSVAYSNNSIAIPTNFTISVTTEILPVSMTKTSVDCTMYICGDSTECSNLLLQYGSFCTQLNRALTGIAVEQDKNTQEVFAQVKQIYKTPPIKDFGGFNFSQILPDPSKPSKRSFIEDLLFNKVTLADAGFIKQYGDCLGDIAARDLICAQKFNGLTVLPPLLTDEMIAQYTSALLAGTITSGWTFGAGAALQIPFAMQMAYRFNGIGVTQNVLYENQKLIANQFNSAIGKIQDSLSSTASALGKLQDVVNQNAQALNTLVKQLSSNFGCISSVLNDILSRLDKVEAEVQIDCLITGRLQSLQTYVTQQLIRAAEIRASANLAATKMSECVLGQSKRVDFCGKGYHLMSFPQSAPHGVVFLHVTYVPAQEKNFTTAPAICHDGKAHFPREGVFVSNGTHWFVTQRNFYEPQIITTDNTFVSGNCDVVIGIVNNTVYDPLQPELDSGGSGYIPEAPRDGQAYVRKDGEWVLLSTFL

SEQ ID NO: 10499 - protein, 1177 aa, Artificial Sequence
  SARS-CoV-2/Iceland/192/2020__EPI_ISL_417819 spike protein (1-1147)(A972C_R995C) Foldon construct
MFVFFVLLPLVSSQCVNLTTRTQLPPAYTNSFTRGVYYPDKVFRSSVLHSTQDLFLPFFSNVTWFHAIHVSGTNGTKRFDNPVLPFNDGVYFASTEKSNIIRGWIFGTTLDSKTQSLLIVNNATNVVIKVCEFQFCNDPFLGVYYHKNNKSWMESEFRVYSSANNCTFEYVSQPFLMDLEGKQGNFKNLREFVFKNIDGYFKIYSKHTPINLVRDLPQGFSALEPLVDLPIGINITRFQTLLALHRSYLTPGDSSSGWTAGAAAYYVGYLQPRTFLLKYNENGTITDAVDCALDPLSETKCTLKSFTVEKGIYQTSNFRVQPTESIVRFPNITNLCPFGEVFNATRFASVYAWNRKRISNCVADYSVLYNSASFSTFKCYGVSPTKLNDLCFTNVYADSFVIRGDEVRQIAPGQTGKIADYNYKLPDDFTGCVIAWNSNNLDSKVGGNYNYLYRLFRKSNLKPFERDISTEIYQAGSTPCNGVEGFNCYFPLQSYGFQPTNGVGYQPYRVVVLSFELLHAPATVCGPKKSTNLVKNKCVNFNFNGLTGTGVLTESNKKFLPFQQFGRDIADTTDAVRDPQTLEILDITPCSFGGVSVITPGTNTSNQVAVLYQGVNCTEVPVAIHADQLTPTWRVYSTGSNVFQTRAGCLIGAEHVNNSYECDIPIGAGICASYQTQTNSPRRARSVASQSIIAYTMSLGAENSVAYSNNSIAIPTNFTISVTTEILPVSMTKTSVDCTMYICGDSTECSNLLLQYGSFCTQLNRALTGIAVEQDKNTQEVFAQVKQIYKTPPIKDFGGFNFSQILPDPSKPSKRSFIEDLLFNKVTLADAGFIKQYGDCLGDIAARDLICAQKFNGLTVLPPLLTDEMIAQYTSALLAGTITSGWTFGAGAALQIPFAMQMAYRFNGIGVTQNVLYENQKLIANQFNSAIGKIQDSLSSTASALGKLQDVVNQNAQALNTLVKQLSSNFGCISSVLNDILSRLDKVEAEVQIDCLITGRLQSLQTYVTQQLIRAAEIRASANLAATKMSECVLGQSKRVDFCGKGYHLMSFPQSAPHGVVFLHVTYVPAQEKNFTTAPAICHDGKAHFPREGVFVSNGTHWFVTQRNFYEPQIITTDNTFVSGNCDVVIGIVNNTVYDPLQPELDSGGSGYIPEAPRDGQAYVRKDGEWVLLSTFL

SEQ ID NO: 10500 - protein, 1177 aa, Artificial Sequence
  SARS-CoV-2/Belgium/ULG-6939/2020__EPI_ISL_417020 spike protein (1-1147)(A972C_R995C) Foldon construct
MFVFLVLLPLVSSQCVNLTTRTQLPPAYTNSFTRGVYYPDKVFRSSVLHSTQDLFLPFFSNVTWFHAIHVSGTNGTKRFDNPVLPFNDGVYFASTEKSNIIRGWIFGTTLDSKTQSLLIVNNATNVVIKVCEFQFCNDPFLGVYYHKNNKSWMESEFRVYSSANNCTFEYVSQPFLMDLEGKQGNFKNLREFVFKNIDGYFKIYSKHTPINLVRDLPQGFSALEPLVDLPIGINITRFQTLLALHRSYLTPGDSSSGWTAGAAAYYVGYLQPRTFLLKYNENGTITDAVDCALDPLSETKCTLKSFTVEKGIYQTSNFRVQPTESIVRFPNITNLCPFGEVFNATRFASVYAWNRKRISNCVADYSVLYNSASFSTFKCYGVSPTKLNDLCFTNVYADSFVIRGDEVRQIAPGQTGKIADYNYKLPDDFTGCVIAWNSNNLDSKVGGNYNYLYRLFRKSNLKPFERDISTEIYQAGSTPCNGVEGFNCYFPLQSYGFQPTNGVGYQPYRVVVLSFELLHAPATVCGPKKSTNLVKNKCVNFNFNGLTGTGVLTESNKKFLPFQQFGRDIADTTDAVRDPQTLEILDITPCSFGGVSVITPGTNTSNQVAVLYQGVNCTEVPVAIHADQLTPTWRVYSTGSNVFQTRAGCLIGAEHVNNSYECDIPIGAGICASYQTQTNSPRRARSVASQSIIAYTMSLGAENSVVYSNNSIAIPTNFTISVTTEILPVSMTKTSVDCTMYICGDSTECSNLLLQYGSFCTQLNRALTGIAVEQDKNTQEVFAQVKQIYKTPPIKDFGGFNFSQILPDPSKPSKRSFIEDLLFNKVTLADAGFIKQYGDCLGDIAARDLICAQKFNGLTVLPPLLTDEMIAQYTSALLAGTITSGWTFGAGAALQIPFAMQMAYRFNGIGVTQNVLYENQKLIANQFNSAIGKIQDSLSSTASALGKLQDVVNQNAQALNTLVKQLSSNFGCISSVLNDILSRLDKVEAEVQIDCLITGRLQSLQTYVTQQLIRAAEIRASANLAATKMSECVLGQSKRVDFCGKGYHLMSFPQSAPHGVVFLHVTYVPAQEKNFTTAPAICHDGKAHFPREGVFVSNGTHWFVTQRNFYEPQIITTDNTFVSGNCDVVIGIVNNTVYDPLQPELDSGGSGYIPEAPRDGQAYVRKDGEWVLLSTFL

SEQ ID NO: 10501 - protein, 1177 aa, Artificial Sequence
  SARS-CoV-2/France/HF2496/2020__EPI_ISL_418231 spike protein (1-1147)(A972C_R995C) Foldon construct
MFVFLVLLPLVSSQCVNLTTRTQLPPAYTNSFTRGVYYPDKVFRSSVLHSTQDLFLPFFSNVTWFHAIHVSGTNGTKRFDNPVLPFNDGVYFASTEKSNIIRGWIFGTTLDSKTQSLLIVNNATNVVIKVCEFQFCNDPFLGVYYHKNNKSWMESEFRVYSSANNCTFEYVSQPFLMDLEGKQGNFKNLREFVFKNIDGYFKIYSKHTPINLVRDLPQGFSALEPLVDLPIGINITRFQTLLALHRSYLTPGDSSSGWTAGAAAYYVGYLQPRTFLLKYNENGTITDAVDCALDPLSETKCTLKSFTVEKGIYQTSNFRVQPTESIVRFPNITNLCPFGEVFNATRFASVYAWNRKRISNCVADYSVLYNSASFSTFKCYGVSPTKLNDLCFTNVYADSFVIRGDEVRQIAPGQTGKIADYNYKLPDDFTGCVIAWNSNNLDSKVGGNYNYLYRLFRKSNLKPFERDISTEIYQAGSTPCNGVEGFNCYFPLQSYGFQPTNGVGYQPYRVVVLSFELLHAPATVCGPKKSTNLVKNKCVNFNFNGLTGTGVLTESNKKFLPFQQFGRDIADTTDAVRDPQTLEILDITPCSFGGVSVITPGTNTSNQVAVLYQGVNCTEVPVAIHADQLTPTWRVYSTGSNVFQTRAGCLIGAEHVNNSYECDIPIGAGICASYQTQTNSPRRARSVASQSIIAYTMSLGAENSVAYSNNSIAIPTNFTISVTTEILPVSMTKTSVDCTMYICGDSTECSNLLLQYGSFCTQLNRALTGIAVEQDKNTQEVFAQVKQIYKTPPIKDFGGFNFSQILPDPSKPSKRSFIEDLLFNKVTLADAGFIKQYGDCLGDIVARDLICAQKFNGLTVLPPLLTDEMIAQYTSALLAGTITSGWTFGAGAALQIPFAMQMAYRFNGIGVTQNVLYENQKLIANQFNSAIGKIQDSLSSTASALGKLQDVVNQNAQALNTLVKQLSSNFGCISSVLNDILSRLDKVEAEVQIDCLITGRLQSLQTYVTQQLIRAAEIRASANLAATKMSECVLGQSKRVDFCGKGYHLMSFPQSAPHGVVFLHVTYVPAQEKNFTTAPAICHDGKAHFPREGVFVSNGTHWFVTQRNFYEPQIITTDNTFVSGNCDVVIGIVNNTVYDPLQPELDSGGSGYIPEAPRDGQAYVRKDGEWVLLSTFL

SEQ ID NO: 10502 - protein, 1177 aa, Artificial Sequence
  SARS-CoV-2/USA/WA-UW291/2020__EPI_ISL_418076 spike protein (1-1147)(A972C_R995C) Foldon construct
MFVFLVLLPLVSSQCVNLTTRTQLPPAYTNSFTRGVYYPDKVFRSSVLHSTQDLFLPFFSNVTWFHAIHVSGTNGTKRFDNPVLPFNDGVYFASTEKSNIIRGWIFGTTLDSKTQSLLIVNNATNVVIKVCEFQFCNDPFLGVYYHKNNKSWMESEFRVYSSANNCTFEYVSQPFLMDLEGKQGNFKNLREFVFKNIDGYFKIYSKHTPINLVRDLPQGFSALEPLVDLPIGINITRFQTLLALHRSYLTPGDSSSGWTAGAAAYYVGYLQPRTFLLKYNENGTITDAVDCALDPLSETKCTLKSFTVEKGIYQTSNFRVQPTESIVRFPNITNLCPFGEVFNATRFASVYAWNRKRISNCVADYSVLYNSASFSTFKCYGVSPTKLNDLCFTNVYADSFVIRGDEVRQIAPGQTGKIADYNYKLPDDFTGCVIAWNSNNLDSKVGGNYNYLYRLFRKSNLKPFERDISTEIYQAGSTPCNGVEGFNCYFPLQSYGFQPTNGVGYQPYRVVVLSFELLHAPATVCGPKKSTNLVKNKCVNFNFNGLTGTGVLTESNKKFLPFQQFGRDIADTTDAVRDPQTLEILDITPCSFGGVSVITPGTNTSNQVAVLYQGVNCTEVPVAIHADQLTPTWRVYSTGSNVFQTRAGCLIGAEHVNNSYECDIPIGAGICASYQTQTNSPRRARSVASQSIIAYTMSLGAENSVAYSNNSIAIPTNFTISVTTEILPVSMTKTSVDCTMYICGDSTECSNLLLQYGSFCTQLNRALTGIAVEQDKNTQEVFAQVKQIYKTPPIKDFGGFNFSQILPDPSKPSKRSFIEDLLFNKVTLADAGFIKQYGDCLGDIAARDLICAQKFNGLTVLPPLLTDEMIAQYTSALLAGTITSGWTFGAGAALQIPFAMQMAYRFNGIGVTQNVLYENQKLIANQFNSAIGKIQYSLSSTASALGKLQDVVNQNAQALNTLVKQLSSNFGCISSVLNDILSRLDKVEAEVQIDCLITGRLQSLQTYVTQQLIRAAEIRASANLAATKMSECVLGQSKRVDFCGKGYHLMSFPQSAPHGVVFLHVTYVPAQEKNFTTAPAICHDGKAHFPREGVFVSNGTHWFVTQRNFYEPQIITTDNTFVSGNCDVVIGIVNNTVYDPLQPELDSGGSGYIPEAPRDGQAYVRKDGEWVLLSTFL

SEQ ID NO: 10503 - protein, 1177 aa, Artificial Sequence; identical to SEQ ID NO: 10466
  SARS-CoV-2/Portugal/PT0034/2020__EPI_ISL_418019 spike protein (1-1147)(A972C_R995C) Foldon construct

SEQ ID NO: 10504 - protein, 1177 aa, Artificial Sequence; identical to SEQ ID NO: 10458
  SARS-CoV-2/Iceland/202/2020__EPI_ISL_417750 spike protein (1-1147)(A972C_R995C) Foldon construct

SEQ ID NO: 10505 - protein, 1177 aa, Artificial Sequence
  SARS-CoV-2/USA/WA-UW261/2020__EPI_ISL_418046 spike protein (1-1147)(A972C_R995C) Foldon construct
MFVFLVLLPLVSSQCVNLTTRTQLPPAYTNSFTRGVYYPDKVFRSSVLHSTQDLFLPFFSNVTWFHAIHVSGTNGTKRFDNPVLPFNDGVYFASTEKSNIIRGWIFGTTLDSKTQSLLIVNNATNVVIKVCEFQFCNDPFLGVYYHKNNKSWMESEFRVYSSANNCTFEYVSQPFLMDLEGKQGNFKNLREFVFKNIDGYFKIYSKHTPINLVRDLPQGFSALEPLVDLPIGINITRFQTLLALHRSYLTPGDSSSGWTAGAAAYYVGYLQPRTFLLKYNENGTITDAVDCALDPLSETKCTLKSFTVEKGIYQTSNFRVQPTESIVRFPNITNLCPFGEVFNATRFTSVYAWNRKRISNCVADYSVLYNSASFSTFKCYGVSPTKLNDLCFTNVYADSFVIRGDEVRQIAPGQTGKIADYNYKLPDDFTGCVIAWNSNNLDSKVGGNYNYLYRLFRKSNLKPFERDISTEIYQAGSTPCNGVEGFNCYFPLQSYGFQPTNGVGYQPYRVVVLSFELLHAPATVCGPKKSTNLVKNKCVNFNFNGLTGTGVLTESNKKFLPFQQFGRDIADTTDAVRDPQTLEILDITPCSFGGVSVITPGTNTSNQVAVLYQDVNCTEVPVAIHADQLTPTWRVYSTGSNVFQTRAGCLIGAEHVNNSYECDIPIGAGICASYQTQTNSPRRARSVASQSIIAYTMSLGAENSVAYSNNSIAIPTNFTISVTTEILPVSMTKTSVDCTMYICGDSTECSNLLLQYGSFCTQLNRALTGIAVEQDKNTQEVFAQVKQIYKTPPIKDFGGFNFSQILPDPSKPSKRSFIEDLLFNKVTLADAGFIKQYGDCLGDIAARDLICAQKFNGLTVLPPLLTDEMIAQYTSALLAGTITSGWTFGAGAALQIPFAMQMAYRFNGIGVTQNVLYENQKLIANQFNSAIGKIQDSLSSTASALGKLQDVVNQNAQALNTLVKQLSSNFGCISSVLNDILSRLDKVEAEVQIDCLITGRLQSLQTYVTQQLIRAAEIRASANLAATKMSECVLGQSKRVDFCGKGYHLMSFPQSAPHGVVFLHVTYVPAQEKNFTTAPAICHDGKAHFPREGVFVSNGTHWFVTQRNFYEPQIITTDNTFVSGNCDVVIGIVNNTVYDPLQPELDSGGSGYIPEAPRDGQAYVRKDGEWVLLSTFL

SEQ ID NO: 10506 - protein, 1177 aa, Artificial Sequence
  SARS-CoV-2/Portugal/PT0035/2020__EPI_ISL_418020 spike protein (1-1147)(A972C_R995C) Foldon construct
MFVFLVLLPLVSSQCVNLTTRTQLPPAYTNSFTRGVYYPDKVFRSSVLHSTQDLFLPFFSNVTWFHAIHVSGTNGTKRFDNPVLPFNDGVYFASTEKSNIIRGWIFGTTLDSKTQSLLIVNNATNVVIKVCEFQFCNDPFLGVYYHKNNKSWMESEFRVYSSANNCTFEYVSQPFLMDLEGKQGNFKNLREFVFKNIDGYFKIYSKHTPINLVRDLPQGFSALEPLVDLPIGINITRFQTLLALHRSYLTPGDSSSGWTAGAAAYYVGYLQPRTFLLKYNENGTITDAVDCALDPLSETKCTLKSFTVEKGIYQTSNFRVQPTESIVRFPNITNLCPFGEVFNATRFASVYAWNRKRISNCVADYSVLYNSASFSTFKCYGVSPTKLNDLCFTNVYADSFVIRGDEVRQIAPGQTGKIADYNYKLPDDFTGCVIAWNSNNLDSKVGGNYNYLYRLFRKSNLKPFERDISTEIYQAGSTPCNGVEGFNCYFPLQSYGFQPTNGVGYQPYRVVVLSFELLHAPATVCGPKKSTNLVKNKCVNFNFNGLTGTGVLTESNKKFLPFQQFGRDIADTTDAVRDPQTLEILDITPCSFGGVSVITPGTNTSNQVAVLYQDVNCTEVPVAIHADQLTPTWRVYSTGSNVFQTRAGCLIGAEHVNNSYECDIPIGAGICASYQTQTNSPRRARSVASQSIIAYTMSLGAENSVAYSNNSIAIPTNFTISVTTEILPVSMTKTSVDCTMYICGDSTECSNLLLQYGSFCTQLNRALTGIAVEQDKNTQEVFAQVKQIYKTPPIKDFGGFNFSQILPDPSKPSKRSFIEDLLFNKVTLADAGFIKQYGDCLGDISARDLICAQKFNGLTVLPPLLTDEMIAQYTSALLAGTITSGWTFGAGAALQIPFAMQMAYRFNGIGVTQNVLYENQKLIANQFNSAIGKIQDSLSSTASALGKLQDVVNQNAQALNTLVKQLSSNFGCISSVLNDILSRLDKVEAEVQIDCLITGRLQSLQTYVTQQLIRAAEIRASANLAATKMSECVLGQSKRVDFCGKGYHLMSFPQSAPHGVVFLHVTYVPAQEKNFTTAPAICHDGKAHFPREGVFVSNGTHWFVTQRNFYEPQIITTDNTFVSGNCDVVIGIVNNTVYDPLQPELDSGGSGYIPEAPRDGQAYVRKDGEWVLLSTFL

SEQ ID NO: 10507 - protein, 1177 aa, Artificial Sequence
  SARS-CoV-2/USA/NY-NYUMC7/2020__EPI_ISL_418192 spike protein (1-1147)(A972C_R995C) Foldon construct
MFVFLVLLPLVSSQCVNLTTRTQLPPAYTNSFTRGVYYPDKVFRSSVLHSTQDLFLPFFSNVTWFHAIHVSGTNGTKRFDNPVLPFNDGVYFASTEKSNIIRGWIFGTTLDSKTQSLLIVNNATNVVIKVCEFQFCNDPFLGVYHHKNNKSWMESEFRVYSSANNCTFEYVSQPFLMDLEGKQGNFKNLREFVFKNIDGYFKIYSKHTPINLVRDLPQGFSALEPLVDLPIGINITRFQTLLALHRSYLTPGDSSSGWTAGAAAYYVGYLQPRTFLLKYNENGTITDAVDCALDPLSETKCTLKSFTVEKGIYQTSNFRVQPTESIVRFPNITNLCPFGEVFNATRFASVYAWNRKRISNCVADYSVLYNSASFSTFKCYGVSPTKLNDLCFTNVYADSFVIRGDEVRQIAPGQTGKIADYNYKLPDDFTGCVIAWNSNNLDSKVGGNYNYLYRLFRKSNLKPFERDISTEIYQAGSTPCNGVEGFNCYFPLQSYGFQPTNGVGYQPYRVVVLSFELLHAPATVCGPKKSTNLVKNKCVNFNFNGLTGTGVLTESNKKFLPFQQFGRDIADTTDAVRDPQTLEILDITPCSFGGVSVITPGTNTSNQVAVLYQGVNCTEVPVAIHADQLTPTWRVYSTGSNVFQTRAGCLIGAEHVNNSYECDIPIGAGICASYQTQTNSPRRARSVASQSIIAYTMSLGAENSVAYSNNSIAIPTNFTISVTTEILPVSMTKTSVDCTMYICGDSTECSNLLLQYGSFCTQLNRALTGIAVEQDKNTQEVFAQVKQIYKTPPIKDFGGFNFSQILPDPSKPSKRSFIEDLLFNKVTLADAGFIKQYGDCLGDIAARDLICAQKFNGLTVLPPLLTDEMIAQYTSALLAGTITSGWTFGAGAALQIPFAMQMAYRFNGIGVTQNVLYENQKLIANQFNSAIGKIQDSLSSTASALGKLQDVVNQNAQALNTLVKQLSSNFGCISSVLNDILSRLDKVEAEVQIDCLITGRLQSLQTYVTQQLIRAAEIRASANLAATKMSECVLGQSKRVDFCGKGYHLMSFPQSAPHGVVFLHVTYVPAQEKNFTTAPAICHDGKAHFPREGVFVSNGTHWFVTQRNFYEPQIITTDNTFVSGNCDVVIGIVNNTVYDPLQPELDSGGSGYIPEAPRDGQAYVRKDGEWVLLSTFL

SEQ ID NO: 10508 - protein, 1177 aa, Artificial Sequence
  SARS-CoV-2/Iceland/189/2020__EPI_ISL_417709 spike protein (1-1147)(A972C_R995C) Foldon construct
MFVFLVLLPLVSSQCVNLTTRTQLPPAYTNSFTRGVYYPDKVFRSSVLHSTQDLFLPFFSNVTWFHAIHVSGTNGTKRFDNPVLPFNDGVYFASTEKSNIIRGWIFGTTLDSKTQSLLIVNNATNVVIKVCEFQFCNDPFLGVYYHKNNKSWMESEFRVYSSANNCTFEYVSQPFLMDLEGKQGNFKNLREFVFKNIDGYFKIYSKHTPINLVRDLPQGFSALEPLVDLPIGINITRFQTLLALHRSYLTPGDSSSGWTAGAAAYYVGYLQPRTFLLKYNENGTITDAVDCALDPLSETKCTLKSFTVEKGIYQTSNFRVQPTESIVRFPNITNLCPFGEVFNATRFASVYAWNRKRISNCVADYSVLYNSASFSTFKCYGVSPTKLNDLCFTNVYADSFVIRGDEVRQIAPGQTGKIADYNYKLPDDFTGCVIAWNSNNLDSKVGGNYNYLYRLFRKSNLKPFERDISTEIYQAGSTPCNGVEGFNCYFPLQSYGFQPTNGVGYQPYRVVVLSFELLHAPATVCGPKKSTNLVKNKCVNFNFNGLTGTGVLTESNKKFLPFQQFGRDIADTTDAVRDPQTLEILDITPCSFGGVSVITPGTNTSNQVAVLYQGVNCTEVPVAIHADQLTPTWRVYSTGSNVFQTRAGCLIGAEHVNNSYECDIPIGAGICASYQTQTNSPRRARSVASQSIIAYTMSLGAENSVAYSNNSIAIPTNFTISVTTEILPVSMTKTSVDCTMYICGDSTECSNLLLQYGSFCTQLNRALTGIAVEQDKNTQEVFAQVKQIYKTPPIKDFGGFNFSQILPDPSKPSKRSFIEDLLFNKVTLADAGFTKQYGDCLGDIAARDLICAQKFNGLTVLPPLLTDEMIAQYTSALLAGTITSGWTFGAGAALQIPFAMQMAYRFNGIGVTQNVLYENQKLIANQFNSAIGKIQDSLSSTASALGKLQDVVNQNAQALNTLVKQLSSNFGCISSVLNDILSRLDKVEAEVQIDCLITGRLQSLQTYVTQQLIRAAEIRASANLAATKMSECVLGQSKRVDFCGKGYHLMSFPQSAPHGVVFLHVTYVPAQEKNFTTAPAICHDGKAHFPREGVFVSNGTHWFVTQRNFYEPQIITTDNTFVSGNCDVVIGIVNNTVYDPLQPELDSGGSGYIPEAPRDGQAYVRKDGEWVLLSTFL

SEQ ID NO: 10509 - protein, 1177 aa, Artificial Sequence
  SARS-CoV-2/Australia/NSW56/2020__EPI_ISL_417408 spike protein (1-1147)(A972C_R995C) Foldon construct
MFVFLVLLPLVSSQCVNLTTRTQLPPAYTNSFTRGVYYPDKVFRSSVLHSTQDLFLPFFSNVTWFHAIHVSGTNGTKRFDNPVLPFNDGVYFASTEKSNIIRGWIFGTTLDSKTQSLLIVNNATNVVIKVCEFQFCNDPFLGVYYHKNNKSWMESEFRVYSSANNCTFEYVSQPFLMDLEGKQGNFKNLREFVFKNIDGYFKIYSKHTPINLVRDLPQGFSALEPLVDLPIGINITRFQTLLALHRSYLTPGDSSSGWTAGAAAYYVGYLQPRTFLLKYNENGTITDAVDCALDPLSETKCTLKSFTVEKGIYQTSNFRVQPTESIVRFPNITNLCPFGEVFNATRFASVYAWNRKRISNCVADYSVLYNSASFSTFKCYGVSPTKLNDLCFTNVYADSFVIRGDEVRQIAPGQTGKIADYNYKLPDDFTGCVIAWNSNNLDSKVGGNYNYLYRLFRKSNLKPFERDISTEIYQAGSTPCNGVEGFNCYFPLQSYGFQPTNGVGYQPYRVVVLSFELLHAPATVCGPKKSTNLVKNKCVNFNFNGLTGTGVLTESNKKFLPFQQFGRDIADTTDAVRDPQTLEILDITPCSFGGVSVITPGTNTSNQVAVLYQDVNCTEVPVAIHADQLTPTWRVYSTGSNVFQTRAGCLIGAEHVNNSYECDIPIGAGICASYQTQTNSPRRARSVASQSIIAYTMSLGAENSVAYSNNSIAIPTNFTISVTTEILPVSMTKTSVDCTMYICGDSTECSNLLLQYGSFCTQLNRALTGIAVEQDKNTQEVFAQVKQIYKTPPIKDFGGFNFSQILPDSSKPSKRSFIEDLLFNKVTLADAGFIKQYGDCLGDIAARDLICAQKFNGLTVLPPLLTDEMIAQYTSALLAGTITSGWTFGAGAALQIPFAMQMAYRFNGIGVTQNVLYENQKLIANQFNSAIGKIQDSLSSTASALGKLQDVVNQNAQALNTLVKQLSSNFGCISSVLNDILSRLDKVEAEVQIDCLITGRLQSLQTYVTQQLIRAAEIRASANLAATKMSECVLGQSKRVDFCGKGYHLMSFPQSAPHGVVFLHVTYVPAQEKNFTTAPAICHDGKAHFPREGVFVSNGTHWFVTQRNFYEPQIITTDNTFVSGNCDVVIGIVNNTVYDPLQPELDSGGSGYIPEAPRDGQAYVRKDGEWVLLSTFL

SEQ ID NO: 10510 - protein, 1177 aa, Artificial Sequence
  SARS-CoV-2/Iceland/280/2020__EPI_ISL_417608 spike protein (1-1147)(A972C_R995C) Foldon construct
MFVFLVLLPLVSSQCVNLTTRTQLPPAYTNSFTRGVYYPDKVFRSSVLHSTQDLFLPFFSNVTWFHAIHVSGTNGTKRFDNPVLPFNDGVYFASTEKSNIIRGWIFGTTLDSKTQSLLIVNNATNVVIKVCEFQFCNDPFLGVYYHKNNKSWMESEFRVYSSANNCTFEYVSQPFLMDLEGKQGNFKNLREFVFKNIDGYFKIYSKHTPINLVRDLPQGFSALEPLVDLPIGINITRFQTLLALHRSYLTPGDSSSGWTAGAAAYYVGYLQPRTFLLKYNENGTITDAVDCALDPLSETKCTLKSFTVEKGIYQTSNFRVQPTESIVRFPNITNLCPFGEVFNATRFASVYAWNRKRISNCVADYSVLYNSASFSTFKCYGVSPTKLNDLCFTNVYADSFVIRGDEVRQIAPGQTGKIADYNYKLPDDFTGCVIAWNSNNLDSKVGGNYNYLYRLFRKSNLKPFERDISTEIYQAGSTPCNGVEGFNCYFPLQSYGFQPTNGVGYQPYRVVVLSFELLHAPATVCGPKKSTNLVKNKCVNFNFNGLTGTGVLTESNKKFLPFQQFGRDIADTTDAVRDPQTLEILDITPCSFGGVSVITPGTNTSNQVAVLYQGVNCTEVPVAIHADQLTPTWRVYSTGSNVFQTRAGCLIGAEHVNNSYECDIPIGAGICASYHTQTNSPRRARSVASQSIIAYTMSLGAENSVAYSNNSIAIPTNFTISVTTEILPVSMTKTSVDCTMYICGDSTECSNLLLQYGSFCTQLNRALTGIAVEQDKNTQEVFAQVKQIYKTPPIKDFGGFNFSQILPDPSKPSKRSFIEDLLFNKVTLADAGFIKQYGDCLGDIAARDLICAQKFNGLTVLPPLLTDEMIAQYTSALLAGTITSGWTFGAGAALQIPFAMQMAYRFNGIGVTQNVLYENQKLIANQFNSAIGKIQDSLSSTASALGKLQDVVNQNAQALNTLVKQLSSNFGCISSVLNDILSRLDKVEAEVQIDCLITGRLQSLQTYVTQQLIRAAEIRASANLAATKMSECVLGQSKRVDFCGKGYHLMSFPQSAPHGVVFLHVTYVPAQEKNFTTAPAICHDGKAHFPREGVFVSNGTHWFVTQRNFYEPQIITTDNTFVSGNCDVVIGIVNNTVYDPLQPELDSGGSGYIPEAPRDGQAYVRKDGEWVLLSTFL

SEQ ID NO: 10511 - protein, 1177 aa, Artificial Sequence; identical to SEQ ID NO: 10466
  SARS-CoV-2/Iceland/247/2020__EPI_ISL_417575 spike protein (1-1147)(A972C_R995C) Foldon construct

SEQ ID NO: 10512 - protein, 1177 aa, Artificial Sequence
  SARS-CoV-2/Iceland/238/2020__EPI_ISL_417566 spike protein (1-1147)(A972C_R995C) Foldon construct
MFVFLVLLPLVSSQCVNLTTRTQLPPAYTNSFTRGVYYPDKVFRSSVLHSTQDLFLPFFSNVTWFHAIHVSGTNGTKRFDNPVLPFNDGVYFASTEKSNIIRGWIFGTTLDSKTQSLLIVNNATNVVIKVCEFQFCNDPFLGVYYHKNNKSWMESEFRVYSSANNCTFEYVSQPFLMDLEGKQGNFKNLREFVFKNIDGYFKIYSKHTPINLVRDLPQGFSALEPLVDLPIGINITRFQTLLALHRSYLTPGDSSSGWTAGAAAYYVGYLQPRTFLLKYNENGTITDAVDCALDPLSETKCTLKSFTVEKGIYQTSNFRVQPTESIVRFPNITNLCPFGEVFNATRFASVYAWNRKRISNCVADYSVLYNSASFSTFKCYGVSPTKLNDLCFTNVYADSFVIRGDEVRQIAPGQTGKIADYNYKLPDDFTGCVIAWNSNNLDSKVGGNYNYLYRLFRKSNLKPFERDISTEIYQAGSTPCNGVEGFNCYFPLQSYGFQPTNGVGYQPYRVVVLSFELLHAPATVCGPKKSTNLVKNKCVNFNFNGLTGTGVLTESNKKFLPFQQFGRDIADTTDAVRDPQTLEILDITPCSFGGVSVITPGTNTSNQVAVLYQGVNCTEVPVAIHADQLTPTWRVYSTGSNVFQTRAGCLIGAEHVNNSYECDIPIGAGICASYQTQTNSPRRARSVASQSIIAYTMSLGAENSVAYSNNSIAIPTNFTISVTTEILPVSMTKTSVDCTMYICGDSTECSNLLLQYGSFCTQLNRALTGIAVEQDKNTQEVFAQVKQIYKTPPIKDFGGFNFSQILPDPSKPSKRSFIEDLLFNKVTLADVGFIKQYGDCLGDIAARDLICAQKFNGLTVLPPLLTDEMIAQYTSALLAGTITSGWTFGAGAALQIPFAMQMAYRFNGIGVTQNVLYENQKLIANQFNSAIGKIQDSLSSTASALGKLQDVVNQNAQALNTLVKQLSSNFGCISSVLNDILSRLDKVEAEVQIDCLITGRLQSLQTYVTQQLIRAAEIRASANLAATKMSECVLGQSKRVDFCGKGYHLMSFPQSAPHGVVFLHVTYVPAQEKNFTTAPAICHDGKAHFPREGVFVSNGTHWFVTQRNFYEPQIITTDNTFVSGNCDVVIGIVNNTVYDPLQPELDSGGSGYIPEAPRDGQAYVRKDGEWVLLSTFL

SEQ ID NO: 10513 - protein, 1177 aa, Artificial Sequence
  SARS-CoV-2/Greece/16/2020__EPI_ISL_418265 spike protein (1-1147)(A972C_R995C) Foldon construct
MFVFLVLLPLVSSQCVNLTTRTQLPPAYTNSFTRGVYYPDKVFRSSVLHSTQDLFLPFFSNVTWFHAIHVSGTNGTKRFDNPVLPFNDGVYFASTEKSNIIRGWIFGTTLDSKTQSLLIVNNATNVVIKVCEFQFCNDPFLGVYYHKNNKSWMESEFRVYSSANNCTFEYVSQPFLMDLEGKQGNFKNLREFVFKNVDGYFKIYSKHTPINLVRDLPQGFSALEPLVDLPIGINITRFQTLLALHRSYLTPGDSSSGWTAGAAAYYVGYLQPRTFLLKYNENGTITDAVDCALDPLSETKCTLKSFTVEKGIYQTSNFRVQPTESIVRFPNITNLCPFGEVFNATRFASVYAWNRKRISNCVADYSVLYNSASFSTFKCYGVSPTKLNDLCFTNVYADSFVIRGDEVRQIAPGQTGKIADYNYKLPDDFTGCVIAWNSNNLDSKVGGNYNYLYRLFRKSNLKPFERDISTEIYQAGSTPCNGVEGFNCYFPLQSYGFQPTNGVGYQPYRVVVLSFELLHAPATVCGPKKSTNLVKNKCVNFNFNGLTGTGVLTESNKKFLPFQQFGRDIADTTDAVRDPQTLEILDITPCSFGGVSVITPGTNTSNQVAVLYQDVNCTEVPVAIHADQLTPTWRVYSTGSNVFQTRAGCLIGAEHVNNSYECDIPIGAGICASYQTQTNSPRRARSVASQSIIAYTMSLGAENSVAYSNNSIAIPTNFTISVTTEILPVSMTKTSVDCTMYICGDSTECSNLLLQYGSFCTQLNRALTGIAVEQDKNTQEVFAQVKQIYKTPPIKDFGGFNFSQILPDPSKPSKRSFIEDLLFNKVTLADAGFIKQYGDCLGDIAARDLICAQKFNGLTVLPPLLTDEMIAQYTSALLAGTITSGWTFGAGAALQIPFAMQMAYRFNGIGVTQNVLYENQKLIANQFNSAIGKIQDSLSSTASALGKLQDVVNQNAQALNTLVKQLSSNFGCISSVLNDILSRLDKVEAEVQIDCLITGRLQSLQTYVTQQLIRAAEIRASANLAATKMSECVLGQSKRVDFCGKGYHLMSFPQSAPHGVVFLHVTYVPAQEKNFTTAPAICHDGKAHFPREGVFVSNGTHWFVTQRNFYEPQIITTDNTFVSGNCDVVIGIVNNTVYDPLQPELDSGGSGYIPEAPRDGQAYVRKDGEWVLLSTFL

SEQ ID NO: 10514 - protein, 1177 aa, Artificial Sequence
  SARS-CoV-2/Iceland/319/2020__EPI_ISL_417648 spike protein (1-1147)(A972C_R995C) Foldon construct
MFVFLVLLPLVSSQCVNLTTRTQLPPAYTNSFTRGVYYPDKVFRSSVLHSTQDLFLPFFSNVTWFHAIHVSGTNGTKRFDNPVLPFNDGVYFASTEKSNIIRGWIFGTTLDSKTQSLLIVNNATNVVIKVCEFQFCNDPFLGVYYHKNNKSWMESEFRVYSSANNCTFEYVSQPFLIDLEGKQGNFKNLREFVFKNIDGYFKIYSKHTPINLVRDLPQGFSALEPLVDLPIGINITRFQTLLALHRSYLTPGDSSSGWTAGAAAYYVGYLQPRTFLLKYNENGTITDAVDCALDPLSETKCTLKSFTVEKGIYQTSNFRVQPTESIVRFPNITNLCPFGEVFNATRFASVYAWNRKRISNCVADYSVLYNSASFSTFKCYGVSPTKLNDLCFTNVYADSFVIRGDEVRQIAPGQTGKIADYNYKLPDDFTGCVIAWNSNNLDSKVGGNYNYLYRLFRKSNLKPFERDISTEIYQAGSTPCNGVEGFNCYFPLQSYGFQPTNGVGYQPYRVVVLSFELLHAPATVCGPKKSTNLVKNKCVNFNFNGLTGTGVLTESNKKFLPFQQFGRDIADTTDAVRDPQTLEILDITPCSFGGVSVITPGTNTSNQVAVLYQGVNCTEVPVAIHADQLTPTWRVYSTGSNVFQTRAGCLIGAEHVNNSYECDIPIGAGICASYQTQTNSPRRARSVASQSIIAYTMSLGAENSVAYSNNSIAIPTNFTISVTTEILPVSMTKTSVDCTMYICGDSTECSNLLLQYGSFCTQLNRALTGIAVEQDKNTQEVFAQVKQIYKTPPIKDFGGFNFSQILPDPSKPSKRSFIEDLLFNKVTLADAGFIKQYGDCLGDIAARDLICAQKFNGLTVLPPLLTDEMIAQYTSALLAGTITSGWTFGAGAALQIPFAMQMAYRFNGIGVTQNVLYENQKLIANQFNSAIGKIQDSLSSTASALGKLQDVVNQNAQALNTLVKQLSSNFGCISSVLNDILSRLDKVEAEVQIDCLITGRLQSLQTYVTQQLIRAAEIRASANLAATKMSECVLGQSKRVDFCGKGYHLMSFPQSAPHGVVFLHVTYVPAQEKNFTTAPAICHDGKAHFPREGVFVSNGTHWFVTQRNFYEPQIITTDNTFVSGNCDVVIGIVNNTVYDPLQPELDSGGSGYIPEAPRDGQAYVRKDGEWVLLSTFL

SEQ ID NO: 10515 - protein, 1177 aa, Artificial Sequence
  SARS-CoV-2/Congo/94/2020__EPI_ISL_417947 spike protein (1-1147)(A972C_R995C) Foldon construct
MFVFLVLLPLVSSQCVNLTTRTQLPPAYTNSFTRGVYYPDKVFRSSVLHSTQDLFLPFFSNVTWFHAIHVSGTNGTKRFDNPVLPFNDGVYFASTEKSNIIRGWIFGTTLDSKTQSLLIVNNATNVVIKVCEFQFCNDPFLGVYYHKNNKSWMESEFRVYSSANNCTFEYVSQPFLMDLEGKQGNFKNLREFVFKNIDGYFKIYSKHTPINLVRDLPQGFSALEPLVDLPIGINITRFQTLLALHRSYLTPGDSSSGWTAGAAAYYVGYLQPRTFLLKYNENGTITDAVDCALDPLSETKCTLKSFTVEKGIYQTSNFRVQPTESIVRFPNITNLCPFGEVFNATRFASVYAWNRKRISNCVADYSVLYNSASFSTFKCYGVSPTKLNDLCFTNVYADSFVIRGDEVRQIAPGQTGKIADYNYKLPDDFTGCVIAWNSNNLDSKVGGNYNYLYRLFRKSNLKPFERDISTEIYQAGSTPCNGVEGFNCYFPLQSYGFQPTNGVGYQPYRVVVLSFELLHAPATVCGPKKSTNLVKNKCVNFNFNGLTGTGVLTESNKKFLPFQQFGRDIADTTDAVRDPQTLEILDITPCSFGGVSVITPGTNTSNQVAVLYQGVNCTEVPVAIHADQLTPTWRVYSTGSNVFQTRAGCLIGAEHVNNSYECDIPIGAGICASYQTQTNSPRRARSVASQSIIAYTMSLGAENSVAYSNNSIAIPTNFTISVTTEILPVSMTKTSVDCTMYICGDSTECSNLLLQYGSFCTQLNRALTGIAVEQDKNTQEVFAQVKQIYKTPPIKDFGGFNFSQILPDPSKPSKRSFIEDILFNKVTLADAGFIKQYGDCLGDIAARDLICAQKFNGLTVLPPLLTDEMIAQYTSALLAGTITSGWTFGAGAALQIPFAMQMAYRFNGIGVTQNVLYENQKLIANQFNSAIGKIQDSLSSTASALGKLQDVVNQNAQALNTLVKQLSSNFGCISSVLNDILSRLDKVEAEVQIDCLITGRLQSLQTYVTQQLIRAAEIRASANLAATKMSECVLGQSKRVDFCGKGYHLMSFPQSAPHGVVFLHVTYVPAQEKNFTTAPAICHDGKAHFPREGVFVSNGTHWFVTQRNFYEPQIITTDNTFVSGNCDVVIGIVNNTVYDPLQPELDSGGSGYIPEAPRDGQAYVRKDGEWVLLSTFL

SEQ ID NO: 10516 - protein, 1177 aa, Artificial Sequence
  SARS-CoV-2/Congo/158/2020__EPI_ISL_417950 spike protein (1-1147)(A972C_R995C) Foldon construct
MFVFLVLLPLVSSQCVNLTTRTQLPPAYTNSFTRGVYYPDKVFRSSVLHSTQDLFLPFFSNVTWFHAIHVSGTNGTKRFDNPVLPFNDGVYFASTEKSNIIRGWIFGTTLDSKTQSLLIVNNATNVVIKVCEFQFCNDPFLGVYYHKNNKSWMESEFRVYSSANNCTFEYVSQPFLMDLEGKQGNFKNLREFVFKNIDGYFKIYSKHTPINLVRDLPQGFSALEPLVDLPIGINITRFQTLLALHRSYLTPGDSSSGWTAGAAAYYVGYLQPRTFLLKYNENGTITDAVDCALDPLSETKCTLKSFTVEKGIYQTSNFRVQPTESIVRFPNITNLCPFGEVFNATRFASVYAWNRKRISNCVADYSVLYNSASFSTFKCYGVSPTKLNDLCFTNVYADSFVIRGDEVRQIAPGQTGKIADYNYKLPDDFTGCVIAWNSNNLDSKVGGNYNYLYRLFRKSNLKPFERDISTEIYQAGSTPCNGVEGFNCYFPLQSYGFQPTNGVGYQPYRVVVLSFELLHAPATVCGPKKSTNLVKNKCVNFNFNGLTGTGVLTESNKKFLPFQQFGRDIADTTDAVRDPQTLEILDITPCSFGGVSVITPGTNTSNQVAVLYQDVNCTEVPVAIHADQLTPTWRVYSTGSNVFQTRAGCLIGAEHVNNSYECDIPIGAGICASYQTQTNSPRRARSVASQSIIAYTMSLGAENSVAYSNNSIAIPTNFTISVTTEILPVSMTKTSVDCTMYICGDSTECSNLLLQYGSFCTQLNRALTGIAVEQDKNTQEVFAQVKQIYKTPPIKDFGGFNFSQILPDPSKPSKRSFIEDLLFNKVTLADAGFIKQYGDCLGDIAARDLICAQKFNGLTVLPPLLTDEMIAQYTSALLAGTITSGWTFGAGAALQIPFAMQMAYRFNGIGVTQNVLYENQKLIANQFNSAIGKIQDSLSSTASALGKLQDVVNQNAQALNTLVKQLSSNFGCISSVLNDILSRLDKVEAEVQIDCLITGRLQSLQTYVTQQLIRAAEIRASANLAATKMSECVLGQSKRVDFCGKGYHLMSFPQSAPHGVVFLHVTYVPAQEKNFTTAPAICHDGKAHFPREGVFVSNGTHWFVTQRNFYEPQIITTDNTFLSGNCDVVIGIVNNTVYDPLQPELDSGGSGYIPEAPRDGQAYVRKDGEWVLLSTFL

SEQ ID NO: 10517 - protein, 1177 aa, Artificial Sequence
  SARS-CoV-2/USA/UT-00034/2020__EPI_ISL_417977 spike protein (1-1147)(A972C_R995C) Foldon construct
MFVFLVLLPLVSSQCVNLTTRTQLPPAYTNSFTRGVYYPDKVFRSSVLHSTQDLFLPFFSNVTWFHAIHVSGTNGTKRFDNPVLPFNDGVYFASTEKSNIIRGWIFGTTLDSKTQSLLIVNNATNVVIKVCEFQFCNDPFLGVYYYKNNKSWMESEFRVYSSANNCTFEYVSQPFLMDLEGKQGNFKNLREFVFKNIDGYFKIYSKHTPINLVRDLPQGFSALEPLVDLPIGINITRFQTLLALHRSYLTPGDSSSGWTAGAAAYYVGYLQPRTFLLKYNENGTITDAVDCALDPLSETKCTLKSFTVEKGIYQTSNFRVQPTESIVRFPNITNLCPFGEVFNATRFASVYAWNRKRISNCVADYSVLYNSASFSTFKCYGVSPTKLNDLCFTNVYADSFVIRGDEVRQIAPGQTGKIADYNYKLPDDFTGCVIAWNSNNLDSKVGGNYNYLYRLFRKSNLKPFERDISTEIYQAGSTPCNGVEGFNCYFPLQSYGFQPTNGVGYQPYRVVVLSFELLHAPATVCGPKKSTNLVKNKCVNFNFNGLTGTGVLTESNKKFLPFQQFGRDIADTTDAVRDPQTLEILDITPCSFGGVSVITPGTNTSNQVAVLYQGVNCTEVPVAIHADQLTPTWRVYSTGSNVFQTRAGCLIGAEHVNNSYECDIPIGAGICASYQTQTNSPRRARSVASQSIIAYTMSLGAENSVAYSNNSIAIPTNFTISVTTEILPVSMTKTSVDCTMYICGDSTECSNLLLQYGSFCTQLNRALTGIAVEQDKNTQEVFAQVKQIYKTPPIKDFGGFNFSQILPDPSKPSKRSFIEDLLFNKVTLADAGFIKQYGDCLGDIAARDLICAQKFNGLTVLPPLLTDEMIAQYTSALLAGTITSGWTFGAGAALQIPFAMQMAYRFNGIGVTQNVLYENQKLIANQFNSAIGKIQDSLSSTASALGKLQDVVNQNAQALNTLVKQLSSNFGCISSVLNDILSRLDKVEAEVQIDCLITGRLQSLQTYVTQQLIRAAEIRASANLAATKMSECVLGQSKRVDFCGKGYHLMSFPQSAPHGVVFLHVTYVPAQEKNFTTAPAICHDGKAHFPREGVFVSNGTHWFVTQRNFYEPQIITTDNTFVSGNCDVVIGIVNNTVYDPLQPELDSGGSGYIPEAPRDGQAYVRKDGEWVLLSTFL

SEQ ID NO: 10518 - protein, 1177 aa, Artificial Sequence
  SARS-CoV-2/USA/UT-00033/2020__EPI_ISL_417976 spike protein (1-1147)(A972C_R995C) Foldon construct
MFVFLVLLPLVSSQCVNLTTRTQLPPAYTNSFTRGVYYPDKVFRSSVLHSTQDLFLPFFSNVTWFHAIHVSGTNGTKRFDNPVLPFNDGVYFASTEKSNIIRGWIFGTTLDSKTQSLLIVNNATNVVIKVCEFQFCNDPFLGVYYHKNNKSWMESEFRVYSSANNCTFEYVSQPFLMDLEGKQGNFKNLREFVFKNIDGYFKIYSKHTPINLVRDLPQGFSALEPLVDLPIGINITRFQTLLALHRSYLTPGDSSSGLTAGAAAYYVGYLQPRTFLLKYNENGTITDAVDCALDPLSETKCTLKSFTVEKGIYQTSNFRVQPTESIVRFPNITNLCPFGEVFNATRFASVYAWNRKRISNCVADYSVLYNSASFSTFKCYGVSPTKLNDLCFTNVYADSFVIRGDEVRQIAPGQTGKIADYNYKLPDDFTGCVIAWNSNNLDSKVGGNYNYLYRLFRKSNLKPFERDISTEIYQAGSTPCNGVEGFNCYFPLQSYGFQPTNGVGYQPYRVVVLSFELLHAPATVCGPKKSTNLVKNKCVNFNFNGLTGTGVLTESNKKFLPFQQFGRDIADTTDAVRDPQTLEILDITPCSFGGVSVITPGTNTSNQVAVLYQGVNCTEVPVAIHADQLTPTWRVYSTGSNVFQTRAGCLIGAEHVNNSYECDIPIGAGICASYQTQTNSPRRARSVASQSIIAYTMSLGAENSVAYSNNSIAIPTNFTISVTTEILPVSMTKTSVDCTMYICGDSTECSNLLLQYGSFCTQLNRALTGIAVEQDKNTQEVFAQVKQIYKTPPIKDFGGFNFSQILPDPSKPSKRSFIEDLLFNKVTLADAGFIKQYGDCLGDIAARDLICAQKFNGLTVLPPLLTDEMIAQYTSALLAGTITSGWTFGAGAALQIPFAMQMAYRFNGIGVTQNVLYENQKLIANQFNSAIGKIQDSLSSTASALGKLQDVVNQNAQALNTLVKQLSSNFGCISSVLNDILSRLDKVEAEVQIDCLITGRLQSLQTYVTQQLIRAAEIRASANLAATKMSECVLGQSKRVDFCGKGYHLMSFPQSAPHGVVFLHVTYVPAQEKNFTTAPAICHDGKAHFPREGVFVSNGTHWFVTQRNFYEPQIITTDNTFVSGNCDVVIGIVNNTVYDPLQPELDSGGSGYIPEAPRDGQAYVRKDGEWVLLSTFL

SEQ ID NO: 10519 - protein, 1177 aa, Artificial Sequence
  SARS-CoV-2/USA/WI-13/2020__EPI_ISL_417516 spike protein (1-1147)(A972C_R995C) Foldon construct
MFVFLVLLPLVSSQCVNLTTRTQLPPAYTNSFTRGVYYPDKVFRSSVLHSTQDLFLPFFSNVTWFHAIHVSGTNGTKRFDNPVLPFNDGVYFASTEKSNIIRGWIFGTTLDSKTQSLLIVNNATNVVIKVCEFQFCNDPFLGVYYHKNNKSWMESEFRVYSSANNCTFEYVSQPFLMDLEGKQGNFKNLREFVFKNIDGYFKIYSKHTPINLVRDLPQGFSALEPLVDLPIGINITRFQTLLALHRSYLTPGDSSSGWTAGAAAYYVGYLQPRTFLLKYNENGTITDAVDCALDPLSETKCTLKSFTVEKGIYQTSNFRVLPTESIVRFPNITNLCPFGEVFNATRFASVYAWNRKRISNCVADYSVLYNSASFSTFKCYGVSPTKLNDLCFTNVYADSFVIRGDEVRQIAPGQTGKIADYNYKLPDDFTGCVIAWNSNNLDSKVGGNYNYLYRLFRKSNLKPFERDISTEIYQAGSTPCNGVEGFNCYFPLQSYGFQPTNGVGYQPYRVVVLSFELLHAPATVCGPKKSTNLVKNKCVNFNFNGLTGTGVLTESNKKFLPFQQFGRDIADTTDAVRDPQTLEILDITPCSFGGVSVITPGTNTSNQVAVLYQGVNCTEVPVAIHADQLTPTWRVYSTGSNVFQTRAGCLIGAEHVNNSYECDIPIGAGICASYQTQTNSPRRARSVASQSIIAYTMSLGAENSVAYSNNSIAIPTNFTISVTTEILPVSMTKTSVDCTMYICGDSTECSNLLLQYGSFCTQLNRALTGIAVEQDKNTQEVFAQVKQIYKTPPIKDFGGFNFSQILPDPSKPSKRSFIEDLLFNKVTLADAGFIKQYGDCLGDIAARDLICAQKFNGLTVLPPLLTDEMIAQYTSALLAGTITSGWTFGAGAALQIPFAMQMAYRFNGIGVTQNVLYENQKLIANQFNSAIGKIQDSLSSTASALGKLQDVVNQNAQALNTLVKQLSSNFGCISSVLNDILSRLDKVEAEVQIDCLITGRLQSLQTYVTQQLIRAAEIRASANLAATKMSECVLGQSKRVDFCGKGYHLMSFPQSAPHGVVFLHVTYVPAQEKNFTTAPAICHDGKAHFPREGVFVSNGTHWFVTQRNFYEPQIITTDNTFVSGNCDVVIGIVNNTVYDPLQPELDSGGSGYIPEAPRDGQAYVRKDGEWVLLSTFL

SEQ ID NO: 10520 - protein, 1176 aa, Artificial Sequence
  SARS-CoV-2/India/1-27/2020__EPI_ISL_413522 spike protein (1-1146)(A971C_R994C) Foldon construct
MFVFLVLLPLVSSQCVNLTTRTQLPPAYTNSFTRGVYYPDKVFRSSVLHSTQDLFLPFFSNVTWFHAIHVSGTNGTKRFDNPVLPFNDGVYFASTEKSNIIRGWIFGTTLDSKTQSLLIVNNATNVVIKVCEFQFCNDPFLGVYHKNNKSWMESEFRVYSSANNCTFEYVSQPFLMDLEGKQGNFKNLREFVFKNIDGYFKIYSKHTPINLVRDLPQGFSALEPLVDLPIGINITRFQTLLALHRSYLTPGDSSSGWTAGAAAYYVGYLQPRTFLLKYNENGTITDAVDCALDPLSETKCTLKSFTVEKGIYQTSNFRVQPTESIVRFPNITNLCPFGEVFNATRFASVYAWNRKRISNCVADYSVLYNSASFSTFKCYGVSPTKLNDLCFTNVYADSFVIRGDEVIQIAPGQTGKIADYNYKLPDDFTGCVIAWNSNNLDSKVGGNYNYLYRLFRKSNLKPFERDISTEIYQAGSTPCNGVEGFNCYFPLQSYGFQPTNGVGYQPYRVVVLSFELLHAPATVCGPKKSTNLVKNKCVNFNFNGLTGTGVLTESNKKFLPFQQFGRDIADTTDAVRDPQTLEILDITPCSFGGVSVITPGTNTSNQVAVLYQDVNCTEVPVAIHADQLTPTWRVYSTGSNVFQTRAGCLIGAEHVNNSYECDIPIGAGICASYQTQTNSPRRARSVASQSIIAYTMSLGAENSVAYSNNSIAIPTNFTISVTTEILPVSMTKTSVDCTMYICGDSTECSNLLLQYGSFCTQLNRALTGIAVEQDKNTQEVFAQVKQIYKTPPIKDFGGFNFSQILPDPSKPSKRSFIEDLLFNKVTLADAGFIKQYGDCLGDIAARDLICAQKFNGLTVLPPLLTDEMIAQYTSALLAGTITSGWTFGAGAALQIPFAMQMAYRFNGIGVTQNVLYENQKLIANQFNSAIGKIQDSLSSTASALGKLQDVVNQNAQALNTLVKQLSSNFGCISSVLNDILSRLDKVEAEVQIDCLITGRLQSLQTYVTQQLIRAAEIRASANLAATKMSECVLGQSKRVDFCGKGYHLMSFPQSAPHGVVFLHVTYVPAQEKNFTTAPAICHDGKAHFPREGVFVSNGTHWFVTQRNFYEPQIITTDNTFVSGNCDVVIGIVNNTVYDPLQPELDSGGSGYIPEAPRDGQAYVRKDGEWVLLSTFL

SEQ ID NO: 10521 - protein, 1171 aa, Artificial Sequence
  SARS-CoV-2/pangolin/Guangxi/P4L/2017__EPI_ISL_410538 spike protein (1-1141)(A966C_R989C) Foldon construct
MFVFLFVLPLVSSQCVNLTTRTGIPPGYTNSSTRGVYYPDKVFRSSILHLTQDLFLPFFSNVTWFNTINYQGGFKKFDNPVLPFNDGVYFASTEKSNIIRGWIFGTTLDARTQSLLIVNNATNVVIKVCEFQFCTDPFLGVYYHNNNKTWVENEFRVYSSANNCTFEYISQPFLMDLEGKQGNFKNLREFVFKNVDGYFKIYSKHTPIDLVRDLPRGFAALEPLVDLPIGINITRFQTLLALHRSYLTPGNLESGWTTGAAAYYVGYLQQRTFLLSYNQNGTITDAVDCSLDPLSETKCTLKSLTVEKGIYQTSNFRVQPTISIVRFPNITNLCPFGEVFNASKFASVYAWNRKRISNCVADYSVLYNSTSFSTFKCYGVSPTKLNDLCFTNVYADSFVVKGDEVRQIAPGQTGVIADYNYKLPDDFTGCVIAWNSVKQDALTGGNYGYLYRLFRKSKLKPFERDISTEIYQAGSTPCNGQVGLNCYYPLERYGFHPTTGVNYQPFRVVVLSFELLNGPATVCGPKLSTTLVKDKCVNFNFNGLTGTGVLTTSKKQFLPFQQFGRDISDTTDAVRDPQTLEILDITPCSFGGVSVITPGTNTSNQVAVLYQDVNCTEVPMAIHAEQLTPAWRVYSAGANVFQTRAGCLVGAEHVNNSYECDIPVGAGICASYHSMSSLRSVNQRSIIAYTMSLGAENSVAYSNNSIAIPTNFTISVTTEILPVSMTKTSVDCTMYICGDSIECSNLLLQYGSFCTQLNRALTGIAVEQDKNTQEVFAQVKQIYKTPPIKDFGGFNFSQILPDPSKPSKRSFIEDLLFNKVTLADAGFIKQYGDCLGDIAARDLICAQKFNGLTVLPPLLTDEMIAQYTSALLAGTITSGWTFGAGAALQIPFAMQMAYRFNGIGVTQNVLYENQKLIANQFNSAIGKIQDSLSSTASALGKLQDVVNQNAQALNTLVKQLSSNFGCISSVLNDILSRLDKVEAEVQIDCLITGRLQSLQTYVTQQLIRAAEIRASANLAATKMSECVLGQSKRVDFCGKGYHLMSFPQSAPHGVVFLHVTYVPAQEKNFTTAPAICHEGKAHFPREGVFVSNGTHWFITQRNFYEPQIITTDNTFVSGSCDVVIGIVNNTVYDPLQPELDSGGSGYIPEAPRDGQAYVRKDGEWVLLSTFL

SEQ ID NO: 10522 - protein, 1171 aa, Artificial Sequence
  SARS-CoV-2/pangolin/Guangxi/P5L/2017__EPI_ISL_410540 spike protein (1-1141)(A966C_R989C) Foldon construct
MFVFLFVLPLVSSQCVNLTTRTGIPPGYTNSSTRGVYYPDKVFRSSILHLTQDLFLPFFSNVTWFNTINYQGGFKKFDNPVLPFNDGVYFASTEKSNIIRGWIFGTTLDARTQSLLIVNNATNVVIKVCEFQFCTDPFLGVYYHNNNKTWVENEFRVYSSANNCTFEYISQPFLMDLEGKQGNFKNLREFVFKNVDGYFKIYSKHTPIDLVRDLPRGFAALEPLVDLPIGINITRFQTLLALHRSYLTPGKLESGWTTGAAAYYVGYLQQRTFLLSYNQNGTITDAVDCSLDPLSETKCTLKSLTVEKGIYQTSNFRVQPTISIVRFPNITNLCPFGEVFNASKFASVYAWNRKRISNCVADYSVLYNSTSFSTFKCYGVSPTKLNDLCFTNVYADSFVVKGDEVRQIAPGQTGVIADYNYKLPDDFTGCVIAWNSVKQDALTGGNYGYLYRLFRKSKLKPFERDISTEIYQAGSTPCNGQVGLNCYYPLERYGFHPTTGVNYQPFRVVVLSFELLNGPATVCGPKLSTTLVKDKCVNFNFNGLTGTGVLTTSKKQFLPFQQFGRDISDTTDAVRDPQTLEILDITPCSFGGVSVITPGTNTSNQVAVLYQDVNCTEVPMAIHAEQLTPAWRVYSAGANVFQTRAGCLVGAEHVNNSYECDIPVGAGICASYHSMSSFRSVNQRSIIAYTMSLGAENSVAYSNNSIAIPTNFTISVTTEILPVSMTKTSVDCTMYICGDSIECSNLLLQYGSFCTQLNRALTGIAVEQDKNTQEVFAQVKQIYKTPPIKDFGGFNFSQILPDPSKPSKRSFIEDLLFNKVTLADAGFIKQYGDCLGDIAARDLICAQKFNGLTVLPPLLTDEMIAQYTSALLAGTITSGWTFGAGAALQIPFAMQMAYRFNGIGVTQNVLYENQKLIANQFNSAIGKIQDSLSSTASALGKLQDVVNQNAQALNTLVKQLSSNFGCISSVLNDILSRLDKVEAEVQIDCLITGRLQSLQTYVTQQLIRAAEIRASANLAATKMSECVLGQSKRVDFCGKGYHLMSFPQSAPHGVVFLHVTYVPAQEKNFTTAPAICHEGKAHFPREGVFVSNGTHWFITQRNFYEPQIITTDNTFVSGSCDVVIGIVNNTVYDPLQPELDSGGSGYIPEAPRDGQAYVRKDGEWVLLSTFL

SEQ ID NO: 10523 - protein, 1171 aa, Artificial Sequence
  SARS-CoV-2/pangolin/Guangxi/P5E/2017__EPI_ISL_410541 spike protein (1-1141)(A966C_R989C) Foldon construct
MFVFLFVLPLVSSQCVNLTTRTGIPPGYTNSSTRGVYYPDKVFRSSILHLTQDLFLPFFSNVTWFNTITYQGGSKKFDNPVLPFNDGVYFASTEKSNIIRGWIFGTTLDARTQSLLIVNNATNVVIKVCEFQFCTDPFLGVYYHNNNKTWVENEFRVYSSANNCTFEYISQPFLMDLEGKQGNFKNLREFVFKNVDGYFKIYSKHTPIDLVRDLPRGFAALEPLVDLPIGINITRFQTLLALHRSYLTPGKLESGWTTGAAAYYVGYLQQRTFLLSYNQNGTITDAVDCSLDPLSETKCTLKSLTVEKGIYQTSNFRVQPTISIVRFPNITNLCPFGEVFNASKFASVYAWNRKRISNCVADYSVLYNSTSFSTFKCYGVSPTKLNDLCFTNVYADSFVVKGDEVRQIAPGQTGVIADYNYKLPDDFTGCVIAWNSVKQDALTGDNYGYLYRLFRKSKLKPFERDISTEIYQAGSTPCNGQVGLNCYYPLERYGFHPTTGVNYQPFRVVVLSFELLNGPATVCGPKLSTTLVKDKCVNFNFNGLTGTGVLTTSKKQFLPFQQFGRDISDTTDAVRDPQTLEILDITPCSFGGVSVITPGTNTSNQVAVLYQDVNCTEVPMAIHAEQLTPAWRVYSAGANVFQTRAGCLVGAEHVNNSYECDIPVGAGICASYHSMSSFRSVNQRSIIAYTMSLGAENSVAYSNNSIAIPTNFTISVTTEILPVSMTKTSVDCTMYICGDSIECSNLLLQYGSFCTQLNRALTGIAVEQDKNTQEVFAQVKQIYKTPPIKDFGGFNFSQILPDPSKPSKRSFIEDLLFNKVTLADAGFIKQYGDCLGDIAARDLICAQKFNGLTVLPPLLTDEMIAQYTSALLAGTITSGWTFGAGAALQIPFAMQMAYRFNGIGVTQNVLYENQKLIANQFNSAIGKIQDSLSSTASALGKLQDVVNQNAQALNTLVKQLSSNFGCISSVLNDILSRLDKVEAEVQIDCLITGRLQSLQTYVTQQLIRAAEIRASANLAATKMSECVLGQSKRVDFCGKGYHLMSFPQSAPHGVVFLHVTYVPAQEKNFTTAPAICHEGKAHFPREGVFVSNGTHWFITQRNFYEPQIITTDNTFVSGSCDVVIGIVNNTVYDPLQPELDSGGSGYIPEAPRDGQAYVRKDGEWVLLSTFL

SEQ ID NO: 10524 - protein, 1169 aa, Artificial Sequence
  SARS-CoV-2/pangolin/Guangxi/P1E/2017__EPI_ISL_410539 spike protein (1-1139)(A964C_R987C) Foldon construct
MFVFLFVLPLVSSQCVNLTTRTGIQPGYTNSSTRGVYYPDKVFRSSILHLTQDLFLPFFSNVTWFNTINYQGGFKKFDNPVLPFNDGVYFASTEKSNIIRGWIFGTTLDARTQSLLIVNNATNVVIKVCEFQFCTDPFLGVYYHNNNKTWVENEFRVYSSANNCTFEYISQPFLMDLEGKQGNFKNLREFVFKNVDGYFKIYSKHTPIDLVRDLPRGFAALEPLVDLPIGINITRFQTLLALHRSYLTPGKLESGWTTGAAAYYVGYLQQRTFLLSYNQNGTITDAVDCSLDPLSETKCTLKSLTVEKGIYQTSNFRVQPTISIVRFPNITNLCPFGEVFNASKFASVYAWNRKRISNCVADYSVLYNSTSFSTFKCYGVSPTKLNDLCFTNVYADSFVVKGDEVRQIAPGQTGVIADYNYKLPDDFTGCVIAWNSVKQDALTGGNYLYRLFRKSKLKPFERDISTEIYQAGSTPCNGQVGLNCYYPLERYGFHPTTGVNYQPFRVVVLSFELLNGPATVCGPKLSTTLVKDKCVNFNFNGLTGTGVLTTSKKQFLPFQQFGRDISDTTDAVRDPQTLEILDITPCSFGGVSVITPGTNTSNQVAVLYQDVNCTEVPMAIHAEQLTPAWRVYSAGANVFQTRAGCLVGAEHVNNSYECDIPVGAGICASYHSMSSLRSVNQRSIIAYTMSLGAENSVAYSNNSIAIPTNFTISVTTEILPVSMTKTSVDCTMYICGDSIECSNLLLQYGSFCTQLNRALTGIAVEQDKNTQEVFAQVKQIYKTPPIKDFGGFNFSQILPDPSKPSKRSFIEDLLFNKVTLADAGFIKQYGDCLGDIAARDLICAQKFNGLTVLPPLLTDEMIAQYTSALLAGTITSGWTFGAGAALQIPFAMQMAYRFNGIGVTQNVLYENQKLIANQFNSAIGKIQDSLSSTASALGKLQDVVNQNAQALNTLVKQLSSNFGCISSVLNDILSRLDKVEAEVQIDCLITGRLQSLQTYVTQQLIRAAEIRASANLAATKMSECVLGQSKRVDFCGKGYHLMSFPQSAPHGVVFLHVTYVPAQEKNFTTAPAICHEGKAHFPREGVFVSNGTHWFITQRNFYEPQIITTDNTFVSGSCDVVIGIVNNTVYDPLQPELDSGGSGYIPEAPRDGQAYVRKDGEWVLLSTFL

SEQ ID NO: 10525 - protein, 1177 aa, Artificial Sequence
  SARS-CoV-2/Wuhan/WIV05/2019__EPI_ISL_402128 spike protein (1-1147)(A890C_V1040C) Foldon construct
MFVFLVLLPLVSSQCVNLTTRTQLPPAYTNSFTRGVYYPDKVFRSSVLHSTQDLFLPFFSNVTWFHAIHVSGTNGTKRFDNPVLPFNDGVYFASTEKSNIIRGWIFGTTLDSKTQSLLIVNNATNVVIKVCEFQFCNDPFLGVYYHKNNKSWMESEFRVYSSANNCTFEYVSQPFLMDLEGKQGNFKNLREFVFKNIDGYFKIYSKHTPINLVRDLPQGFSALEPLVDLPIGINITRFQTLLALHRSYLTPGDSSSGWTAGAAAYYVGYLQPRTFLLKYNENGTITDAVDCALDPLSETKCTLKSFTVEKGIYQTSNFRVQPTESIVRFPNITNLCPFGEVFNATRFASVYAWNRKRISNCVADYSVLYNSASFSTFKCYGVSPTKLNDLCFTNVYADSFVIRGDEVRQIAPGQTGKIADYNYKLPDDFTGCVIAWNSNNLDSKVGGNYNYLYRLFRKSNLKPFERDISTEIYQAGSTPCNGVEGFNCYFPLQSYGFQPTNGVGYQPYRVVVLSFELLHAPATVCGPKKSTNLVKNKCVNFNFNGLTGTGVLTESNKKFLPFQQFGRDIADTTDAVRDPQTLEILDITPCSFGGVSVITPGTNTSNQVAVLYQDVNCTEVPVAIHADQLTPTWRVYSTGSNVFQTRAGCLIGAEHVNNSYECDIPIGAGICASYQTQTNSPRRARSVASQSIIAYTMSLGAENSVAYSNNSIAIPTNFTISVTTEILPVSMTKTSVDCTMYICGDSTECSNLLLQYGSFCTQLNRALTGIAVEQDKNTQEVFAQVKQIYKTPPIKDFGGFNFSQILPDPSKPSKRSFIEDLLFNKVTLADAGFIKQYGDCLGDIAARDLICAQKFNGLTVLPPLLTDEMIAQYTSALLAGTITSGWTFGCGAALQIPFAMQMAYRFNGIGVTQNVLYENQKLIANQFNSAIGKIQDSLSSTASALGKLQDVVNQNAQALNTLVKQLSSNFGAISSVLNDILSRLDKVEAEVQIDRLITGRLQSLQTYVTQQLIRAAEIRASANLAATKMSECVLGQSKRCDFCGKGYHLMSFPQSAPHGVVFLHVTYVPAQEKNFTTAPAICHDGKAHFPREGVFVSNGTHWFVTQRNFYEPQIITTDNTFVSGNCDVVIGIVNNTVYDPLQPELDSGGSGYIPEAPRDGQAYVRKDGEWVLLSTFL

SEQ ID NO: 10526 - protein, 1173 aa, Artificial Sequence; identical to SEQ ID NO: 10258
  SARS-CoV-2/bat/Yunnan/RaTG13/2013__EPI_ISL_402131 spike protein (1-1143)(A886C_V1036C) Foldon construct

SEQ ID NO: 10527 - protein, 1177 aa, Artificial Sequence; identical to SEQ ID NO: 10259
  SARS-CoV-2/Wuhan/HBCDC-HB-01/2019__EPI_ISL_402132 spike protein (1-1147)(A890C_V1040C) Foldon construct

SEQ ID NO: 10528 - protein, 1177 aa, Artificial Sequence; identical to SEQ ID NO: 10260
  SARS-CoV-2/Guangdong/20SF028/2020__EPI_ISL_403936 spike protein (1-1147)(A890C_V1040C) Foldon construct

SEQ ID NO: 10529 - protein, 1177 aa, Artificial Sequence; identical to SEQ ID NO: 10261
  SARS-CoV-2/Shenzhen/SZTH-001/2020__EPI_ISL_406592 spike protein (1-1147)(A890C_V1040C) Foldon construct

SEQ ID NO: 10530 - protein, 1177 aa, Artificial Sequence; identical to SEQ ID NO: 10262
  SARS-CoV-2/Shenzhen/SZTH-004/2020__EPI_ISL_406595 spike protein (1-1147)(A890C_V1040C) Foldon construct

SEQ ID NO: 10531 - protein, 1177 aa, Artificial Sequence; identical to SEQ ID NO: 10263
  SARS-CoV-2/France/IDF0372/2020__EPI_ISL_406596 spike protein (1-1147)(A890C_V1040C) Foldon construct

SEQ ID NO: 10532 - protein, 1177 aa, Artificial Sequence; identical to SEQ ID NO: 10264
  SARS-CoV-2/Australia/VIC01/2020__EPI_ISL_406844 spike protein (1-1147)(A890C_V1040C) Foldon construct

SEQ ID NO: 10533 - protein, 1177 aa, Artificial Sequence; identical to SEQ ID NO: 10265
  SARS-CoV-2/Germany/BavPat1/2020__EPI_ISL_406862 spike protein (1-1147)(A890C_V1040C) Foldon construct

SEQ ID NO: 10534 - protein, 1177 aa, Artificial Sequence; identical to SEQ ID NO: 10266
  SARS-CoV-2/Wuhan/HBCDC-HB-02/2020__EPI_ISL_412978 spike protein (1-1147)(A890C_V1040C) Foldon construct

SEQ ID NO: 10535 - protein, 1177 aa, Artificial Sequence; identical to SEQ ID NO: 10267
  SARS-CoV-2/Australia/QLD02/2020__EPI_ISL_407896 spike protein (1-1147)(A890C_V1040C) Foldon construct

SEQ ID NO: 10536 - protein, 1177 aa, Artificial Sequence; identical to SEQ ID NO: 10268
  SARS-CoV-2/India/1-31/2020__EPI_ISL_413523 spike protein (1-1147)(A890C_V1040C) Foldon construct

SEQ ID NO: 10537 - protein, 1177 aa, Artificial Sequence; identical to SEQ ID NO: 10269
  SARS-CoV-2/Guangdong/GD2020087-P0008/2020__EPI_ISL_413863 spike protein (1-1147)(A890C_V1040C) Foldon construct

SEQ ID NO: 10538 - protein, 1177 aa, Artificial Sequence; identical to SEQ ID NO: 10270
  SARS-CoV-2/Sweden/01/2020__EPI_ISL_411951 spike protein (1-1147)(A890C_V1040C) Foldon construct

SEQ ID NO: 10539 - protein, 1177 aa, Artificial Sequence; identical to SEQ ID NO: 10271
  SARS-CoV-2/Tianmen/HBCDC-HB-07/2020__EPI_ISL_412983 spike protein (1-1147)(A890C_V1040C) Foldon construct

SEQ ID NO: 10540 - protein, 1177 aa, Artificial Sequence; identical to SEQ ID NO: 10272
  SARS-CoV-2/Hong Kong/case42_VM20002493/2020__EPI_ISL_414527 spike protein (1-1147)(A890C_V1040C) Foldon construct

SEQ ID NO: 10541 - protein, 1177 aa, Artificial Sequence; identical to SEQ ID NO: 10273
  SARS-CoV-2/USA/CruiseA-23/2020__EPI_ISL_414482 spike protein (1-1147)(A890C_V1040C) Foldon construct

SEQ ID NO: 10542 - protein, 1177 aa, Artificial Sequence; identical to SEQ ID NO: 10274
  SARS-CoV-2/Hong Kong/case85_VM20002868/2020__EPI_ISL_414519 spike protein (1-1147)(A890C_V1040C) Foldon construct

SEQ ID NO: 10543 - protein, 1177 aa, Artificial Sequence; identical to SEQ ID NO: 10265
  SARS-CoV-2/England/200990660/2020__EPI_ISL_414523 spike protein (1-1147)(A890C_V1040C) Foldon construct

SEQ ID NO: 10544 - protein, 1177 aa, Artificial Sequence; identical to SEQ ID NO: 10276
  SARS-CoV-2/Australia/NSW09/2020__EPI_ISL_413595 spike protein (1-1147)(A890C_V1040C) Foldon construct

SEQ ID NO: 10545 - protein, 1177 aa, Artificial Sequence; identical to SEQ ID NO: 10257
  SARS-CoV-2/Australia/NSW10/2020__EPI_ISL_413596 spike protein (1-1147)(A890C_V1040C) Foldon construct

SEQ ID NO: 10546 - protein, 1177 aa, Artificial Sequence; identical to SEQ ID NO: 10278
  SARS-CoV-2/Switzerland/1000477797/2020__EPI_ISL_413023 spike protein (1-1147)(A890C_V1040C) Foldon construct

SEQ ID NO: 10547 - protein, 1177 aa, Artificial Sequence; identical to SEQ ID NO: 10279
  SARS-CoV-2/Belgium/BA-02291/2020__EPI_ISL_415159 spike protein (1-1147)(A890C_V1040C) Foldon construct

SEQ ID NO: 10548 - protein, 1177 aa, Artificial Sequence; identical to SEQ ID NO: 10280
  SARS-CoV-2/USA/WA8-UW5/2020__EPI_ISL_413486 spike protein (1-1147)(A890C_V1040C) Foldon construct

SEQ ID NO: 10549 - protein, 1177 aa, Artificial Sequence; identical to SEQ ID NO: 10281
  SARS-CoV-2/England/20102000506/2020__EPI_ISL_415147 spike protein (1-1147)(A890C_V1040C) Foldon construct

SEQ ID NO: 10550 - protein, 1177 aa, Artificial Sequence; identical to SEQ ID NO: 10282
  SARS-CoV-2/Belgium/VAG-03013/2020__EPI_ISL_415155 spike protein (1-1147)(A890C_V1040C) Foldon construct

SEQ ID NO: 10551 - protein, 1177 aa, Artificial Sequence; identical to SEQ ID NO: 10283
  SARS-CoV-2/Belgium/BC-03016/2020__EPI_ISL_415157 spike protein (1-1147)(A890C_V1040C) Foldon construct

SEQ ID NO: 10552 - protein, 1177 aa, Artificial Sequence; identical to SEQ ID NO: 10284
  SARS-CoV-2/Germany/BavPat3/2020__EPI_ISL_414521 spike protein (1-1147)(A890C_V1040C) Foldon construct

SEQ ID NO: 10553 - protein, 1177 aa, Artificial Sequence; identical to SEQ ID NO: 10285
  SARS-CoV-2/France/HF1805/2020__EPI_ISL_414628 spike protein (1-1147)(A890C_V1040C) Foldon construct

SEQ ID NO: 10554 - protein, 1177 aa, Artificial Sequence; identical to SEQ ID NO: 10286
  SARS-CoV-2/Netherlands/ZuidHolland_9/2020__EPI_ISL_414445 spike protein (1-1147)(A890C_V1040C) Foldon construct

SEQ ID NO: 10555 - protein, 1177 aa, Artificial Sequence; identical to SEQ ID NO: 10287
  SARS-CoV-2/Finland/FIN03032020A/2020__EPI_ISL_413602 spike protein (1-1147)(A890C_V1040C) Foldon construct

SEQ ID NO: 10556 - protein, 1177 aa, Artificial Sequence; identical to SEQ ID NO: 10288
  SARS-CoV-2/France/GE1977/2020__EPI_ISL_414632 spike protein (1-1147)(A890C_V1040C) Foldon construct

SEQ ID NO: 10557 - protein, 1177 aa, Artificial Sequence; identical to SEQ ID NO: 10289
  SARS-CoV-2/Finland/FIN-313/2020__EPI_ISL_414641 spike protein (1-1147)(A890C_V1040C) Foldon construct

SEQ ID NO: 10558 - protein, 1177 aa, Artificial Sequence; identical to SEQ ID NO: 10290
  SARS-CoV-2/Netherlands/ZuidHolland_2/2020__EPI_ISL_414556 spike protein (1-1147)(A890C_V1040C) Foldon construct

SEQ ID NO: 10559 - protein, 1177 aa, Artificial Sequence; identical to SEQ ID NO: 10291
  SARS-CoV-2/USA/WA-UW31/2020__EPI_ISL_414618 spike protein (1-1147)(A890C_V1040C) Foldon construct

SEQ ID NO: 10560 - protein, 1177 aa, Artificial Sequence; identical to SEQ ID NO: 10292
  SARS-CoV-2/South Korea/SNU01/2020__EPI_ISL_411929 spike protein (1-1147)(A890C_V1040C) Foldon construct

SEQ ID NO: 10561 - protein, 1177 aa, Artificial Sequence; identical to SEQ ID NO: 10293
  SARS-CoV-2/China/WF0004/2020__EPI_ISL_413694 spike protein (1-1147)(A890C_V1040C) Foldon construct

SEQ ID NO: 10562 - protein, 1177 aa, Artificial Sequence; identical to SEQ ID NO: 10294
  SARS-CoV-2/China/WF0028/2020__EPI_ISL_413791 spike protein (1-1147)(A890C_V1040C) Foldon construct

SEQ ID NO: 10563 - protein, 1177 aa, Artificial Sequence; identical to SEQ ID NO: 10295
  SARS-CoV-2/2019-nCoV/USA-CruiseA-18/2020__MT159716.1 spike protein (1-1147)(A890C_V1040C) Foldon construct

SEQ ID NO: 10564 - protein, 1177 aa, Artificial Sequence; identical to SEQ ID NO: 10296
  SARS-CoV-2/SARS-CoV-2/Yunnan-01/human/2020/CHN__MT049951.1 spike protein (1-1147)(A890C_V1040C) Foldon construct

SEQ ID NO: 10565 - protein, 1177 aa, Artificial Sequence; identical to SEQ ID NO: 10297
  SARS-CoV-2/USA/WA-UW292/2020__EPI_ISL_418077 spike protein (1-1147)(A890C_V1040C) Foldon construct

SEQ ID NO: 10566 - protein, 1177 aa, Artificial Sequence; identical to SEQ ID NO: 10298
  SARS-CoV-2/Iceland/192/2020__EPI_ISL_417819 spike protein (1-1147)(A890C_V1040C) Foldon construct

SEQ ID NO: 10567 - protein, 1177 aa, Artificial Sequence; identical to SEQ ID NO: 10299
  SARS-CoV-2/Belgium/ULG-6939/2020__EPI_ISL_417020 spike protein (1-1147)(A890C_V1040C) Foldon construct

SEQ ID NO: 10568 - protein, 1177 aa, Artificial Sequence; identical to SEQ ID NO: 10300
  SARS-CoV-2/France/HF2496/2020__EPI_ISL_418231 spike protein (1-1147)(A890C_V1040C) Foldon construct

SEQ ID NO: 10569 - protein, 1177 aa, Artificial Sequence; identical to SEQ ID NO: 10301
  SARS-CoV-2/USA/WA-UW291/2020__EPI_ISL_418076 spike protein (1-1147)(A890C_V1040C) Foldon construct

SEQ ID NO: 10570 - protein, 1177 aa, Artificial Sequence; identical to SEQ ID NO: 10265
  SARS-CoV-2/Portugal/PT0034/2020__EPI_ISL_418019 spike protein (1-1147)(A890C_V1040C) Foldon construct

SEQ ID NO: 10571 - protein, 1177 aa, Artificial Sequence; identical to SEQ ID NO: 10257
  SARS-CoV-2/Iceland/202/2020__EPI_ISL_417750 spike protein (1-1147)(A890C_V1040C) Foldon construct

SEQ ID NO: 10572 - protein, 1177 aa, Artificial Sequence; identical to SEQ ID NO: 10304
  SARS-CoV-2/USA/WA-UW261/2020__EPI_ISL_418046 spike protein (1-1147)(A890C_V1040C) Foldon construct

SEQ ID NO: 10573 - protein, 1177 aa, Artificial Sequence; identical to SEQ ID NO: 10305
  SARS-CoV-2/Portugal/PT0035/2020__EPI_ISL_418020 spike protein (1-1147)(A890C_V1040C) Foldon construct

SEQ ID NO: 10574 - protein, 1177 aa, Artificial Sequence; identical to SEQ ID NO: 10306
  SARS-CoV-2/USA/NY-NYUMC7/2020__EPI_ISL_418192 spike protein (1-1147)(A890C_V1040C) Foldon construct

SEQ ID NO: 10575 - protein, 1177 aa, Artificial Sequence; identical to SEQ ID NO: 10307
  SARS-CoV-2/Iceland/189/2020__EPI_ISL_417709 spike protein (1-1147)(A890C_V1040C) Foldon construct

SEQ ID NO: 10576 - protein, 1177 aa, Artificial Sequence; identical to SEQ ID NO: 10308
  SARS-CoV-2/Australia/NSW56/2020__EPI_ISL_417408 spike protein (1-1147)(A890C_V1040C) Foldon construct

SEQ ID NO: 10577 - protein, 1177 aa, Artificial Sequence; identical to SEQ ID NO: 10309
  SARS-CoV-2/Iceland/280/2020__EPI_ISL_417608 spike protein (1-1147)(A890C_V1040C) Foldon construct

SEQ ID NO: 10578 - protein, 1177 aa, Artificial Sequence; identical to SEQ ID NO: 10265
  SARS-CoV-2/Iceland/247/2020__EPI_ISL_417575 spike protein (1-1147)(A890C_V1040C) Foldon construct

SEQ ID NO: 10579 - protein, 1177 aa, Artificial Sequence; identical to SEQ ID NO: 10311
  SARS-CoV-2/Iceland/238/2020__EPI_ISL_417566 spike protein (1-1147)(A890C_V1040C) Foldon construct

SEQ ID NO: 10580 - protein, 1177 aa, Artificial Sequence; identical to SEQ ID NO: 10312
  SARS-CoV-2/Greece/16/2020__EPI_ISL_418265 spike protein (1-1147)(A890C_V1040C) Foldon construct

SEQ ID NO: 10581 - protein, 1177 aa, Artificial Sequence; identical to SEQ ID NO: 10313
  SARS-CoV-2/Iceland/319/2020__EPI_ISL_417648 spike protein (1-1147)(A890C_V1040C) Foldon construct

SEQ ID NO: 10582 - protein, 1177 aa, Artificial Sequence; identical to SEQ ID NO: 10314
  SARS-CoV-2/Congo/94/2020__EPI_ISL_417947 spike protein (1-1147)(A890C_V1040C) Foldon construct

SEQ ID NO: 10583 - protein, 1177 aa, Artificial Sequence; identical to SEQ ID NO: 10315
  SARS-CoV-2/Congo/158/2020__EPI_ISL_417950 spike protein (1-1147)(A890C_V1040C) Foldon construct

SEQ ID NO: 10584 - protein, 1177 aa, Artificial Sequence; identical to SEQ ID NO: 10316
  SARS-CoV-2/USA/UT-00034/2020__EPI_ISL_417977 spike protein (1-1147)(A890C_V1040C) Foldon construct

SEQ ID NO: 10585 - protein, 1177 aa, Artificial Sequence; identical to SEQ ID NO: 10317
  SARS-CoV-2/USA/UT-00033/2020__EPI_ISL_417976 spike protein (1-1147)(A890C_V1040C) Foldon construct

SEQ ID NO: 10586 - protein, 1177 aa, Artificial Sequence; identical to SEQ ID NO: 10318
  SARS-CoV-2/USA/WI-13/2020__EPI_ISL_417516 spike protein (1-1147)(A890C_V1040C) Foldon construct

SEQ ID NO: 10587 - protein, 1176 aa, Artificial Sequence; identical to SEQ ID NO: 10319
  SARS-CoV-2/India/1-27/2020__EPI_ISL_413522 spike protein (1-1146)(A889C_V1039C) Foldon construct

SEQ ID NO: 10588 - protein, 1171 aa, Artificial Sequence; identical to SEQ ID NO: 10320
  SARS-CoV-2/pangolin/Guangxi/P4L/2017__EPI_ISL_410538 spike protein (1-1141)(A884C_V1034C) Foldon construct

SEQ ID NO: 10589 - protein, 1171 aa, Artificial Sequence; identical to SEQ ID NO: 10321
  SARS-CoV-2/pangolin/Guangxi/P5L/2017__EPI_ISL_410540 spike protein (1-1141)(A884C_V1034C) Foldon construct

SEQ ID NO: 10590 - protein, 1171 aa, Artificial Sequence; identical to SEQ ID NO: 10322
  SARS-CoV-2/pangolin/Guangxi/P5E/2017__EPI_ISL_410541 spike protein (1-1141)(A884C_V1034C) Foldon construct

SEQ ID NO: 10591 - protein, 1169 aa, Artificial Sequence; identical to SEQ ID NO: 10323
  SARS-CoV-2/pangolin/Guangxi/P1E/2017__EPI_ISL_410539 spike protein (1-1139)(A882C_V1032C) Foldon construct

SEQ ID NO: 10592 - protein, 1177 aa, Artificial Sequence
  SARS-CoV-2/Wuhan/WIV05/2019__EPI_ISL_402128 spike protein (1-1147)(T874C_S1055C) Foldon construct
MFVFLVLLPLVSSQCVNLTTRTQLPPAYTNSFTRGVYYPDKVFRSSVLHSTQDLFLPFFSNVTWFHAIHVSGTNGTKRFDNPVLPFNDGVYFASTEKSNIIRGWIFGTTLDSKTQSLLIVNNATNVVIKVCEFQFCNDPFLGVYYHKNNKSWMESEFRVYSSANNCTFEYVSQPFLMDLEGKQGNFKNLREFVFKNIDGYFKIYSKHTPINLVRDLPQGFSALEPLVDLPIGINITRFQTLLALHRSYLTPGDSSSGWTAGAAAYYVGYLQPRTFLLKYNENGTITDAVDCALDPLSETKCTLKSFTVEKGIYQTSNFRVQPTESIVRFPNITNLCPFGEVFNATRFASVYAWNRKRISNCVADYSVLYNSASFSTFKCYGVSPTKLNDLCFTNVYADSFVIRGDEVRQIAPGQTGKIADYNYKLPDDFTGCVIAWNSNNLDSKVGGNYNYLYRLFRKSNLKPFERDISTEIYQAGSTPCNGVEGFNCYFPLQSYGFQPTNGVGYQPYRVVVLSFELLHAPATVCGPKKSTNLVKNKCVNFNFNGLTGTGVLTESNKKFLPFQQFGRDIADTTDAVRDPQTLEILDITPCSFGGVSVITPGTNTSNQVAVLYQDVNCTEVPVAIHADQLTPTWRVYSTGSNVFQTRAGCLIGAEHVNNSYECDIPIGAGICASYQTQTNSPRRARSVASQSIIAYTMSLGAENSVAYSNNSIAIPTNFTISVTTEILPVSMTKTSVDCTMYICGDSTECSNLLLQYGSFCTQLNRALTGIAVEQDKNTQEVFAQVKQIYKTPPIKDFGGFNFSQILPDPSKPSKRSFIEDLLFNKVTLADAGFIKQYGDCLGDIAARDLICAQKFNGLTVLPPLLTDEMIAQYCSALLAGTITSGWTFGAGAALQIPFAMQMAYRFNGIGVTQNVLYENQKLIANQFNSAIGKIQDSLSSTASALGKLQDVVNQNAQALNTLVKQLSSNFGAISSVLNDILSRLDKVEAEVQIDRLITGRLQSLQTYVTQQLIRAAEIRASANLAATKMSECVLGQSKRVDFCGKGYHLMSFPQCAPHGVVFLHVTYVPAQEKNFTTAPAICHDGKAHFPREGVFVSNGTHWFVTQRNFYEPQIITTDNTFVSGNCDVVIGIVNNTVYDPLQPELDSGGSGYIPEAPRDGQAYVRKDGEWVLLSTFL

SEQ ID NO: 10593 - protein, 1173 aa, Artificial Sequence
  SARS-CoV-2/bat/Yunnan/RaTG13/2013__EPI_ISL_402131 spike protein (1-1143)(T870C_S1051C) Foldon construct
MFVFLVLLPLVSSQCVNLTTRTQLPPAYTNSSTRGVYYPDKVFRSSVLHLTQDLFLPFFSNVTWFHAIHVSGTNGIKRFDNPVLPFNDGVYFASTEKSNIIRGWIFGTTLDSKTQSLLIVNNATNVVIKVCEFQFCNDPFLGVYYHKNNKSWMESEFRVYSSANNCTFEYVSQPFLMDLEGKQGNFKNLREFVFKNIDGYFKIYSKHTPINLVRDLPPGFSALEPLVDLPIGINITRFQTLLALHRSYLTPGDSSSGWTAGAAAYYVGYLQPRTFLLKYNENGTITDAVDCALDPLSETKCTLKSFTVEKGIYQTSNFRVQPTDSIVRFPNITNLCPFGEVFNATTFASVYAWNRKRISNCVADYSVLYNSTSFSTFKCYGVSPTKLNDLCFTNVYADSFVITGDEVRQIAPGQTGKIADYNYKLPDDFTGCVIAWNSKHIDAKEGGNFNYLYRLFRKANLKPFERDISTEIYQAGSKPCNGQTGLNCYYPLYRYGFYPTDGVGHQPYRVVVLSFELLNAPATVCGPKKSTNLVKNKCVNFNFNGLTGTGVLTESNKKFLPFQQFGRDIADTTDAVRDPQTLEILDITPCSFGGVSVITPGTNASNQVAVLYQDVNCTEVPVAIHADQLTPTWRVYSTGSNVFQTRAGCLIGAEHVNNSYECDIPIGAGICASYQTQTNSRSVASQSIIAYTMSLGAENSVAYSNNSIAIPTNFTISVTTEILPVSMTKTSVDCTMYICGDSTECSNLLLQYGSFCTQLNRALTGIAVEQDKNTQEVFAQVKQIYKTPPIKDFGGFNFSQILPDPSKPSKRSFIEDLLFNKVTLADAGFIKQYGDCLGDIAARDLICAQKFNGLTVLPPLLTDEMIAQYCSALLAGTITSGWTFGAGAALQIPFAMQMAYRFNGIGVTQNVLYENQKLIANQFNSAIGKIQDSLSSTASALGKLQDVVNQNAQALNTLVKQLSSNFGAISSVLNDILSRLDKVEAEVQIDRLITGRLQSLQTYVTQQLIRAAEIRASANLAATKMSECVLGQSKRVDFCGKGYHLMSFPQCAPHGVVFLHVTYVPAQEKNFTTAPAICHDGKAHFPREGVFVSNGTHWFVTQRNFYEPQIITTDNTFVSGSCDVVIGIVNNTVYDPLQPELDSGGSGYIPEAPRDGQAYVRKDGEWVLLSTFL

SEQ ID NO: 10594 - protein, 1177 aa, Artificial Sequence
  SARS-CoV-2/Wuhan/HBCDC-HB-01/2019__EPI_ISL_402132 spike protein (1-1147)(T874C_S1055C) Foldon construct
MFVFLVLLPLVSSQCVNLTTRTQLPPAYTNSITRGVYYPDKVFRSSVLHSTQDLFLPFFSNVTWFHAIHVSGTNGTKRFDNPVLPFNDGVYFASTEKSNIIRGWIFGTTLDSKTQSLLIVNNATNVVIKVCEFQFCNDPFLGVYYHKNNKSWMESEFRVYSSANNCTFEYVSQPFLMDLEGKQGNFKNLREFVFKNIDGYFKIYSKHTPINLVRDLPQGFSALEPLVDLPIGINITRFQTLLALHRSYLTPGDSSSGWTAGAAAYYVGYLQPRTFLLKYNENGTITDAVDCALDPLSETKCTLKSFTVEKGIYQTSNFRVQPTESIVRFPNITNLCPFGEVFNATRFASVYAWNRKRISNCVADYSVLYNSASFSTFKCYGVSPTKLNDLCFTNVYADSFVIRGDEVRQIAPGQTGKIADYNYKLPDDFTGCVIAWNSNNLDSKVGGNYNYLYRLFRKSNLKPFERDISTEIYQAGSTPCNGVEGFNCYFPLQSYGFQPTNGVGYQPYRVVVLSFELLHAPATVCGPKKSTNLVKNKCVNFNFNGLTGTGVLTESNKKFLPFQQFGRDIADTTDAVRDPQTLEILDITPCSFGGVSVITPGTNTSNQVAVLYQDVNCTEVPVAIHADQLTPTWRVYSTGSNVFQTRAGCLIGAEHVNNSYECDIPIGAGICASYQTQTNSPRRARSVASQSIIAYTMSLGAENSVAYSNNSIAIPTNFTISVTTEILPVSMTKTSVDCTMYICGDSTECSNLLLQYGSFCTQLNRALTGIAVEQDKNTQEVFAQVKQIYKTPPIKDFGGFNFSQILPDPSKPSKRSFIEDLLFNKVTLADAGFIKQYGDCLGDIAARDLICAQKFNGLTVLPPLLTDEMIAQYCSALLAGTITSGWTFGAGAALQIPFAMQMAYRFNGIGVTQNVLYENQKLIANQFNSAIGKIQDSLSSTASALGKLQDVVNQNAQALNTLVKQLSSNFGAISSVLNDILSRLDKVEAEVQIDRLITGRLQSLQTYVTQQLIRAAEIRASANLAATKMSECVLGQSKRVDFCGKGYHLMSFPQCAPHGVVFLHVTYVPAQEKNFTTAPAICHDGKAHFPREGVFVSNGTHWFVTQRNFYEPQIITTDNTFVSGNCDVVIGIVNNTVYDPLQPELDSGGSGYIPEAPRDGQAYVRKDGEWVLLSTFL

SEQ ID NO: 10595 - protein, 1177 aa, Artificial Sequence
  SARS-CoV-2/Guangdong/20SF028/2020__EPI_ISL_403936 spike protein (1-1147)(T874C_S1055C) Foldon construct
MFVFLVLLPLVSSQCVNLTTRTQLPPAYTNSFTRGVYYPDKVFRSSVLYSTQDLFLPFFSNVTWFHAIHVSGTNGTKRFDNPVLPFNDGVYFASTEKSNIIRGWIFGTTLDSKTQSLLIVNNATNVVIKVCEFQFCNDPFLGVYYHKNNKSWMESEFRVYSSANNCTFEYVSQPFLMDLEGKQGNFKNLREFVFKNIDGYFKIYSKHTPINLVRDLPQGFSALEPLVDLPIGINITRFQTLLALHRSYLTPGDSSSGWTAGAAAYYVGYLQPRTFLLKYNENGTITDAVDCALDPLSETKCTLKSFTVEKGIYQTSNFRVQPTESIVRFPNITNLCPFGEVFNATRFASVYAWNRKRISNCVADYSVLYNSASFSTFKCYGVSPTKLNDLCFTNVYADSFVIRGDEVRQIAPGQTGKIADYNYKLPDDFTGCVIAWNSNNLDSKVGGNYNYLYRLFRKSNLKPFERDISTEIYQAGSTPCNGVEGFNCYFPLQSYGFQPTNGVGYQPYRVVVLSFELLHAPATVCGPKKSTNLVKNKCVNFNFNGLTGTGVLTESNKKFLPFQQFGRDIADTTDAVRDPQTLEILDITPCSFGGVSVITPGTNTSNQVAVLYQDVNCTEVPVAIHADQLTPTWRVYSTGSNVFQTRAGCLIGAEHVNNSYECDIPIGAGICASYQTQTNSPRRARSVASQSIIAYTMSLGAENSVAYSNNSIAIPTNFTISVTTEILPVSMTKTSVDCTMYICGDSTECSNLLLQYGSFCTQLNRALTGIAVEQDKNTQEVFAQVKQIYKTPPIKDFGGFNFSQILPDPSKPSKRSFIEDLLFNKVTLADAGFIKQYGDCLGDIAARDLICAQKFNGLTVLPPLLTDEMIAQYCSALLAGTITSGWTFGAGAALQIPFAMQMAYRFNGIGVTQNVLYENQKLIANQFNSAIGKIQDSLSSTASALGKLQDVVNQNAQALNTLVKQLSSNFGAISSVLNDILSRLDKVEAEVQIDRLITGRLQSLQTYVTQQLIRAAEIRASANLAATKMSECVLGQSKRVDFCGKGYHLMSFPQCAPHGVVFLHVTYVPAQEKNFTTAPAICHDGKAHFPREGVFVSNGTHWFVTQRNFYEPQIITTDNTFVSGNCDVVIGIVNNTVYDPLQPELDSGGSGYIPEAPRDGQAYVRKDGEWVLLSTFL

SEQ ID NO: 10596 - protein, 1177 aa, Artificial Sequence
  SARS-CoV-2/Shenzhen/SZTH-001/2020__EPI_ISL_406592 spike protein (1-1147)(T874C_S1055C) Foldon construct
MFVFLVLLPLVSSQCVNLTTRTQLPPAYTNSFTRGVYYPDKVFRSSVLHSTQDLFLPFFSNVTWFHAIHVSGTNGTKRFDNPVLPFNDGVYFASTEKSNIIRGWIFGTTLDSKTQSLLIVNNATNVVIKVCEFQFCNDPFLGVYYHKNNKSWMESEFRVYSSANNCTFEYVSQPFLMDLEGKQGNFKNLREFVFKNIDGYFKIYSKHTPINLVRDLPQGFSALEPLVDLPIGINITRFQTLLALHRSYLTPGDSSSGWTAGAAAYYVGYLQPRTFLLKYNENGTITDAVDCALDPLSETKCTLKSFTVEKGIYQTSNFRVQPTESIVRFPNITNLCPFGEVFNATRFASVYAWNRKRISNCVADYSVLYNSASFSTFKCYGVSPTKLNDLCFTNVYADSFVIRGDEVRQIAPGQTGKIADYNYKLPDDFTGCVIAWNSNNLDSKVGGNYNYLYRLFRKSNLKPFERDISTEIYQAGSTPCNGVEGFNCYFPLQSYGFQPTNGVGYQPYRVVVLSFELLHAPATVCGPKKSTNLVKNKCVNFNFNGLTGTGVLTESNKKFLPFQQFGRDIADTTDAVRDPQTLEILDITPCSFGGVSVITPGTNTSNQVAVLYQDVNCTEVPVAIHADQLTPTWRVYSTGSNVFQTRAGCLIGAEHVNNSYECDIPIGAGICASYQTQTNSPRRARSVASQSIIAYTMSLGAENSVAYSNNSIAIPTNFTISVTTEILPVSMTKTSVDCTMYICGDSTECSNLLLQYGSFCTQLNRALTGIAVEQDKNTQEVFAQVKQIYKTPPIKDFGGFNFSQILPDPSKPSKRSFIEDLLFNKVTLADAGFIKQYGDCLGDIAARDLICAQKFNGLTVLPPLLTDEMIAQYCSALLAGTITSGWTFGAGAALQIPFAMQMAYRFNGIGVTQNVLYENQKLIANQFNSAIGKIQDSLSSTASALGKLQDVVNQNAQALNTLVKQLSSNFGAISSVLNDILSRLDKVEAEVQIDRLITGRLQSLQTYVTQQLIRAAEIRASANLAATKMSECVLGQSKRVDFCGKGYHLMSFPQCAPHGVVFLHVTYVPAQEKNFTTAPAICHDGKAHFPREGVFVSNGTHWFVTQRNFYEPQIITTDNTFVSGNCDVLIGIVNNTVYDPLQPELDSGGSGYIPEAPRDGQAYVRKDGEWVLLSTFL

SEQ ID NO: 10597 - protein, 1177 aa, Artificial Sequence
  SARS-CoV-2/Shenzhen/SZTH-004/2020__EPI_ISL_406595 spike protein (1-1147)(T874C_S1055C) Foldon construct
MFVFLVLLPLVSSQCVNLTTRTQLPPAYTNSFTRGVYYPDKVFRSSVLHSTQDLFLPFFSNVTWFHAIHVSGTNGTKRFDNPVLPFNDGVYFASTEKSNIIRGWIFGTTLDSKTQSLLIVNNATNVVIKVCEFQFCNDPFLGVYYHKNNKSWMESEFRVYSSANNCTFEYVSQPFLMDLEGKQGNFKNLREFVFKNIDGYFKIYSKHTPINLVRDLPQGFSALEPLVDLPIGINITRFQTLLALHRSYLTPGDSSSGWTAGAAAYYVGYLQPRTFLLKYNENGTITDAVDCALDPLSETKCTLKSFTVEKGIYQTSNFRVQPTESIVRFPNITNLCPFGEVFNATRFASVYAWDRKRISNCVAYYSVLYNSASFSTFKCYGVSPTKLNDLCFTNVYADSFVIRGDEVRQIAPGQTGKIADYNYKLPDDFTGCVIAWNSNNLDSKVGGNYNYLYRLFRKSNLKPFERDISTEIYQAGSTPCNGVEGFNCYFPLQSYGFQPTNGVGYQPYRVVVLSFELLHAPATVCGPKKSTNLVKNKCVNFNFNGLTGTGVLTESNKKFLPFQQFGRDIADTTDAVRDPQTLEILDITPCSFGGVSVITPGTNTSNQVAVLYQDVNCTEVPVAIHADQLTPTWRVYSTGSNVFQTRAGCLIGAEHVNNSYECDIPIGAGICASYQTQTNSPRRARSVASQSIIAYTMSLGAENSVAYSNNSIAIPTNFTISVTTEILPVSMTKTSVDCTMYICGDSTECSNLLLQYGSFCTQLNRALTGIAVEQDKNTQEVFAQVKQIYKTPPIKDFGGFNFSQILPDPSKPSKRSFIEDLLFNKVTLADAGFIKQYGDCLGDIAARDLICAQKFNGLTVLPPLLTDEMIAQYCSALLAGTITSGWTFGAGAALQIPFAMQMAYRFNGIGVTQNVLYENQKLIANQFNSAIGKIQDSLSSTASALGKLQDVVNQNAQALNTLVKQLSSNFGAISSVLNDILSRLDKVEAEVQIDRLITGRLQSLQTYVTQQLIRAAEIRASANLAATKMSECVLGQSKRVDFCGKGYHLMSFPQCAPHGVVFLHVTYVPAQEKNFTTAPAICHDGKAHFPREGVFVSNGTHWFVTQRNFYEPQIITTDNTFVSGNCDVVIGIVNNTVYDPLQPELDSGGSGYIPEAPRDGQAYVRKDGEWVLLSTFL

SEQ ID NO: 10598 - protein, 1177 aa, Artificial Sequence
  SARS-CoV-2/France/IDF0372/2020__EPI_ISL_406596 spike protein (1-1147)(T874C_S1055C) Foldon construct
MFVFLVLLPLVSSQCVNLTTRTQLPPAYTNSFTRGVYYPDKVFRSSVLHSTQDLFLPFFSNVTWFHAIHVSGTNGTKRFDNPVLPFNDGVYFASTEKSNIIRGWIFGTTLDSKTQSLLIVNNATNVVIKVCEFQFCNDPFLGVYYHKNNKSWMESEFRVYSSANNCTFEYVSQPFLMDLEGKQGNFKNLREFVFKNIDGYFKIYSKHTPINLVRDLPQGFSALEPLVDLPIGINITRFQTLLALHRSYLTPGDSSSGWTAGAAAYYVGYLQPRTFLLKYNENGTITDAVDCALDPLSETKCTLKSFTVEKGIYQTSNFRVQPTESIVRFPNITNLCPFGEVFNATRFASVYAWNRKRISNCVADYSFLYNSASFSTFKCYGVSPTKLNDLCFTNVYADSFVIRGDEVRQIAPGQTGKIADYNYKLPDDFTGCVIAWNSNNLDSKVGGNYNYLYRLFRKSNLKPFERDISTEIYQAGSTPCNGVEGFNCYFPLQSYGFQPTNGVGYQPYRVVVLSFELLHAPATVCGPKKSTNLVKNKCVNFNFNGLTGTGVLTESNKKFLPFQQFGRDIADTTDAVRDPQTLEILDITPCSFGGVSVITPGTNTSNQVAVLYQDVNCTEVPVAIHADQLTPTWRVYSTGSNVFQTRAGCLIGAEHVNNSYECDIPIGAGICASYQTQTNSPRRARSVASQSIIAYTMSLGAENSVAYSNNSIAIPTNFTISVTTEILPVSMTKTSVDCTMYICGDSTECSNLLLQYGSFCTQLNRALTGIAVEQDKNTQEVFAQVKQIYKTPPIKDFGGFNFSQILPDPSKPSKRSFIEDLLFNKVTLADAGFIKQYGDCLGDIAARDLICAQKFNGLTVLPPLLTDEMIAQYCSALLAGTITSGWTFGAGAALQIPFAMQMAYRFNGIGVTQNVLYENQKLIANQFNSAIGKIQDSLSSTASALGKLQDVVNQNAQALNTLVKQLSSNFGAISSVLNDILSRLDKVEAEVQIDRLITGRLQSLQTYVTQQLIRAAEIRASANLAATKMSECVLGQSKRVDFCGKGYHLMSFPQCAPHGVVFLHVTYVPAQEKNFTTAPAICHDGKAHFPREGVFVSNGTHWFVTQRNFYEPQIITTDNTFVSGNCDVVIGIVNNTVYDPLQPELDSGGSGYIPEAPRDGQAYVRKDGEWVLLSTFL

SEQ ID NO: 10599 - protein, 1177 aa, Artificial Sequence
  SARS-CoV-2/Australia/VIC01/2020__EPI_ISL_406844 spike protein (1-1147)(T874C_S1055C) Foldon construct
MFVFLVLLPLVSSQCVNLTTRTQLPPAYTNSFTRGVYYPDKVFRSSVLHSTQDLFLPFFSNVTWFHAIHVSGTNGTKRFDNPVLPFNDGVYFASTEKSNIIRGWIFGTTLDSKTQSLLIVNNATNVVIKVCEFQFCNDPFLGVYYHKNNKSWMESEFRVYSSANNCTFEYVSQPFLMDLEGKQGNFKNLREFVFKNIDGYFKIYSKHTPINLVRDLPQGFSALEPLVDLPIGINITRFQTLLALHRRYLTPGDSSSGWTAGAAAYYVGYLQPRTFLLKYNENGTITDAVDCALDPLSETKCTLKSFTVEKGIYQTSNFRVQPTESIVRFPNITNLCPFGEVFNATRFASVYAWNRKRISNCVADYSVLYNSASFSTFKCYGVSPTKLNDLCFTNVYADSFVIRGDEVRQIAPGQTGKIADYNYKLPDDFTGCVIAWNSNNLDSKVGGNYNYLYRLFRKSNLKPFERDISTEIYQAGSTPCNGVEGFNCYFPLQSYGFQPTNGVGYQPYRVVVLSFELLHAPATVCGPKKSTNLVKNKCVNFNFNGLTGTGVLTESNKKFLPFQQFGRDIADTTDAVRDPQTLEILDITPCSFGGVSVITPGTNTSNQVAVLYQDVNCTEVPVAIHADQLTPTWRVYSTGSNVFQTRAGCLIGAEHVNNSYECDIPIGAGICASYQTQTNSPRRARSVASQSIIAYTMSLGAENSVAYSNNSIAIPTNFTISVTTEILPVSMTKTSVDCTMYICGDSTECSNLLLQYGSFCTQLNRALTGIAVEQDKNTQEVFAQVKQIYKTPPIKDFGGFNFSQILPDPSKPSKRSFIEDLLFNKVTLADAGFIKQYGDCLGDIAARDLICAQKFNGLTVLPPLLTDEMIAQYCSALLAGTITSGWTFGAGAALQIPFAMQMAYRFNGIGVTQNVLYENQKLIANQFNSAIGKIQDSLSSTASALGKLQDVVNQNAQALNTLVKQLSSNFGAISSVLNDILSRLDKVEAEVQIDRLITGRLQSLQTYVTQQLIRAAEIRASANLAATKMSECVLGQSKRVDFCGKGYHLMSFPQCAPHGVVFLHVTYVPAQEKNFTTAPAICHDGKAHFPREGVFVSNGTHWFVTQRNFYEPQIITTDNTFVSGNCDVVIGIVNNTVYDPLQPELDSGGSGYIPEAPRDGQAYVRKDGEWVLLSTFL

SEQ ID NO: 10600 - protein, 1177 aa, Artificial Sequence
  SARS-CoV-2/Germany/BavPat1/2020__EPI_ISL_406862 spike protein (1-1147)(T874C_S1055C) Foldon construct
MFVFLVLLPLVSSQCVNLTTRTQLPPAYTNSFTRGVYYPDKVFRSSVLHSTQDLFLPFFSNVTWFHAIHVSGTNGTKRFDNPVLPFNDGVYFASTEKSNIIRGWIFGTTLDSKTQSLLIVNNATNVVIKVCEFQFCNDPFLGVYYHKNNKSWMESEFRVYSSANNCTFEYVSQPFLMDLEGKQGNFKNLREFVFKNIDGYFKIYSKHTPINLVRDLPQGFSALEPLVDLPIGINITRFQTLLALHRSYLTPGDSSSGWTAGAAAYYVGYLQPRTFLLKYNENGTITDAVDCALDPLSETKCTLKSFTVEKGIYQTSNFRVQPTESIVRFPNITNLCPFGEVFNATRFASVYAWNRKRISNCVADYSVLYNSASFSTFKCYGVSPTKLNDLCFTNVYADSFVIRGDEVRQIAPGQTGKIADYNYKLPDDFTGCVIAWNSNNLDSKVGGNYNYLYRLFRKSNLKPFERDISTEIYQAGSTPCNGVEGFNCYFPLQSYGFQPTNGVGYQPYRVVVLSFELLHAPATVCGPKKSTNLVKNKCVNFNFNGLTGTGVLTESNKKFLPFQQFGRDIADTTDAVRDPQTLEILDITPCSFGGVSVITPGTNTSNQVAVLYQGVNCTEVPVAIHADQLTPTWRVYSTGSNVFQTRAGCLIGAEHVNNSYECDIPIGAGICASYQTQTNSPRRARSVASQSIIAYTMSLGAENSVAYSNNSIAIPTNFTISVTTEILPVSMTKTSVDCTMYICGDSTECSNLLLQYGSFCTQLNRALTGIAVEQDKNTQEVFAQVKQIYKTPPIKDFGGFNFSQILPDPSKPSKRSFIEDLLFNKVTLADAGFIKQYGDCLGDIAARDLICAQKFNGLTVLPPLLTDEMIAQYCSALLAGTITSGWTFGAGAALQIPFAMQMAYRFNGIGVTQNVLYENQKLIANQFNSAIGKIQDSLSSTASALGKLQDVVNQNAQALNTLVKQLSSNFGAISSVLNDILSRLDKVEAEVQIDRLITGRLQSLQTYVTQQLIRAAEIRASANLAATKMSECVLGQSKRVDFCGKGYHLMSFPQCAPHGVVFLHVTYVPAQEKNFTTAPAICHDGKAHFPREGVFVSNGTHWFVTQRNFYEPQIITTDNTFVSGNCDVVIGIVNNTVYDPLQPELDSGGSGYIPEAPRDGQAYVRKDGEWVLLSTFL

SEQ ID NO: 10601 - protein, 1177 aa, Artificial Sequence
  SARS-CoV-2/Wuhan/HBCDC-HB-02/2020__EPI_ISL_412978 spike protein (1-1147)(T874C_S1055C) Foldon construct
MFVFLVLLPLVSSQCVNLTTRTQLPPAYTNSFTRGVYYPDKVFRSSVLHSTQDLFLPFFSNVTWFHAIHVSGTNGTKRFDNPVLPFNDGVYFASTEKSNIIRGWIFGTTLDSKTQSLLIVNNATNVVIKVCEFQFCNDPFLGVYYHKNNKSWMESEFRVYSSANNCTFEYVSQPFLMDLEGKQGNFKNLREFVFKNIDGYFKIYSKHTPINLVRDLPQGFSALEPLVDLPIGINITRFQTLLALHRSYLTPGDSSSGWTAGAAAYYVGYLQPRTFLLKYNENGTITDAVDCALDPLSETKCTLKSFTVEKGIYQTSNFRVQPTESIVRFPNITNLCPFGEVFNATRFASVYAWNRKRISNCVADYSVLYNSASFSTFKCYGVSPTKLNDLCFTNVYADSFVIRGDEVRQIAPGQTGKIADYNYKLPDDFTGCVIAWNSNNLDSKVGGNYNYLYRLFRKSNLKPFERDISTEIYQAGSTPCNGVEGFNCYFPLQSYGFQPTNGVGYQPYRVVVLSFELLHAPATVCGPKKSTNLVKNKCVNFNFNGLTGTGVLTESNKKFLPFQQFGRDIADTTDAVRDPQTLEILDITPCSFGGVSVITPGTNTSNQVAVLYQDVNCTEVPVAIHADQLTPTWRVYSTGSNVFQTRAGCLIGAEHVNNSYECDIPIGAGICASYQTQTNSPRRARSVASQSIIAYTMSLGAENSVAYSNNSIAIPTNFTISVTTEILPVSMTKTSVDCTMYICGDSTECSNFLLQYGSFCTQLNRALTGIAVEQDKNTQEVFAQVKQIYKTPPIKDFGGFNFSQILPDPSKPSKRSFIEDLLFNKVTLADAGFIKQYGDCLGDIAARDLICAQKFNGLTVLPPLLTDEMIAQYCSALLAGTITSGWTFGAGAALQIPFAMQMAYRFNGIGVTQNVLYENQKLIANQFNSAIGKIQDSLSSTASALGKLQDVVNQNAQALNTLVKQLSSNFGAISSVLNDILSRLDKVEAEVQIDRLITGRLQSLQTYVTQQLIRAAEIRASANLAATKMSECVLGQSKRVDFCGKGYHLMSFPQCAPHGVVFLHVTYVPAQEKNFTTAPAICHDGKAHFPREGVFVSNGTHWFVTQRNFYEPQIITTDNTFVSGNCDVVIGIVNNTVYDPLQPELDSGGSGYIPEAPRDGQAYVRKDGEWVLLSTFL

SEQ ID NO: 10602 - protein, 1177 aa, Artificial Sequence
  SARS-CoV-2/Australia/QLD02/2020__EPI_ISL_407896 spike protein (1-1147)(T874C_S1055C) Foldon construct
MFVFLVLLPLVSSQCVNLTTRTQLPPAYTNSFTRGVYYPDKVFRSSVLHSTQDLFLPFFSNVTWFHAIHVSGTNGTKRFDNPVLPFNDGVYFASTEKSNIIRGWIFGTTLDSKTQSLLIVNNATNVVIKVCEFQFCNDPFLGVYYHKNNKSWMESEFRVYSSANNCTFEYVSQPFLMDLEGKQGNFKNLREFVFKNIDGYFKIYSKHTPINLVRDLPQGFSALEPLVDLPIGINITRFQTLLALHRSYLTPGDSSSGWTAGAAAYYVGYLQPRTFLLKYNENGTITDAVDCALDPLSETKCTLKSFTVEKGIYQTSNFRVQPTESIVRFPNITNLCPFGEVFNATRFASVYAWNRKRISNCVADYSVLYNSASFSTFKCYGVSPTKLNDLCFTNVYADSFVIRGDEVRQIAPGQTGKIADYNYKLPDDFTGCVIAWNSNNLDSKVGGNYNYLYRLFRKSNLKPFERDISTEIYQAGSTPCNGVEGFNCYFPLQSYGFQPTNGVGYQPYRVVVLSFELLHAPATVCGPKKSTNLVKNKCVNFNFNGLTGTGVLTESNKKFLPFQQFGRDIADTTDAVRDPQTLEILDITPCSFGGVSVITPGTNTSNQVAVLYQDVNCTEVPVAIHADQLTPTWRVYSTGSNVFQTRAGCLIGAEHVNNSYECDIPIGAGICASYQTQTNSPRRARSVASQSIIAYTMSLGAENSVAYSNNSIAIPTNFTISVTTEILPVSMTKTSVDCTMYICGDSTECSNLLLQYGSFCTQLNRALTGIAVEQDKNTQEVFAQVKQIYKTPPIKDFGGFNFSQILPDPSKPSKRSFIEDLLFNKVTLADAGFIKQYGDCLGDIAARDLICAQKFNGLTVLPPLLTDEMIAQYCSALLAGTITSGWTFGAGAALQIPFAMQMAYRFNGIGVTQNVLYENQKLIANQFNSAIGKIQDSLSSTASALGKLQDVVNQNAQALNTLVKQLSSNFGAISSVLNDILSRLDKVEAEVQIDRLITGRLQSLQTYVTQQLIRAAEIRASANLAATKMSECVLGQSKRVDFCGKGYHLMSFPQCAPHGVVFLHVTYVPAQEKNFTTAPAICHDGKAHFPREGVFVSNGTHWFVTQRNFYEPQIITTDNTFVSGNCDVVIGIVNNTVYDPLQLELDSGGSGYIPEAPRDGQAYVRKDGEWVLLSTFL

SEQ ID NO: 10603 - protein, 1177 aa, Artificial Sequence
  SARS-CoV-2/India/1-31/2020__EPI_ISL_413523 spike protein (1-1147)(T874C_S1055C) Foldon construct
MFVFLVLLPLVSSQCVNLTTRTQLPPAYTNSFTRGVYYPDKVFRSSVLHSTQDLFLPFFSNVTWFHAIHVSGTNGTKRFDNPVLPFNDGVYFASTEKSNIIRGWIFGTTLDSKTQSLLIVNNATNVVIKVCEFQFCNDPFLGVYYHKNNKSWMESEFRVYSSANNCTFEYVSQPFLMDLEGKQGNFKNLREFVFKNIDGYFKIYSKHTPINLVRDLPQGFSALEPLVDLPIGINITRFQTLLALHRSYLTPGDSSSGWTAGAAAYYVGYLQPRTFLLKYNENGTITDAVDCALDPLSETKCTLKSFTVEKGIYQTSNFRVQPTESIVRFPNITNLCPFGEVFNATRFASVYAWNRKRISNCVADYSVLYNSASFSTFKCYGVSPTKLNDLCFTNVYADSFVIRGDEVRQIAPGQTGKIADYNYKLPDDFTGCVIAWNSNNLDSKVGGNYNYLYRLFRKSNLKPFERDISTEIYQAGSTPCNGVEGFNCYFPLQSYGFQPTNGVGYQPYRVVVLSFELLHAPATVCGPKKSTNLVKNKCVNFNFNGLTGTGVLTESNKKFLPFQQFGRDIADTTDAVRDPQTLEILDITPCSFGGVSVITPGTNTSNQVAVLYQDVNCTEVPVAIHADQLTPTWRVYSTGSNVFQTRAGCLIGAEHVNNSYECDIPIGAGICASYQTQTNSPRRARSVASQSIIAYTMSLGAENSVAYSNNSIAIPTNFTISVTTEILPVSMTKTSVDCTMYICGDSTECSNLLLQYGSFCTQLNRALTGIAVEQDKNTQEVFAQVKQIYKTPPIKDFGGFNFSQILPDPSKPSKRSFIEDLLFNKVTLADAGFIKQYGDCLGDIAARDLICAQKFNGLTVLPPLLTDEMIAQYCSALLAGTITSGWTFGAGAALQIPFAMQMAYRFNGIGVTQNVLYENQKLIANQFNSVIGKIQDSLSSTASALGKLQDVVNQNAQALNTLVKQLSSNFGAISSVLNDILSRLDKVEAEVQIDRLITGRLQSLQTYVTQQLIRAAEIRASANLAATKMSECVLGQSKRVDFCGKGYHLMSFPQCAPHGVVFLHVTYVPAQEKNFTTAPAICHDGKAHFPREGVFVSNGTHWFVTQRNFYEPQIITTDNTFVSGNCDVVIGIVNNTVYDPLQPELDSGGSGYIPEAPRDGQAYVRKDGEWVLLSTFL

SEQ ID NO: 10604 - protein, 1177 aa, Artificial Sequence
  SARS-CoV-2/Guangdong/GD2020087-P0008/2020__EPI_ISL_413863 spike protein (1-1147)(T874C_S1055C) Foldon construct
MFVFLVLLPLVSSQCVNLTTRTQLPPAYTNSFTRGVYYPDKVFRSSVLHSTQDLFLPFFSNVTWFHAIHVSGTNGTKRFDNPVLPFNDGVYFASTEKSNIIRGWIFGTTLDSKTQSLLIVNNATNVVIKVCEFQFCNDPFLGVYYHKNNKSWMESEFRVYSSANNCTFEYVSQPFLMDLEGKQGNFKNLREFVFKNIDGYFKIYSKHTPINLVRDLPQGFSALEPLVDLPIGINITRFQTLLALHRSYLTPGDSSSGWTAGAAAYYVGYLQPRTFLLKYNENGTITDAVDCALDPLSETKCTLKSFTVEKGIYQTSNFRVQPTESIVRFPNITNLCPFGEVFNATRFASVYAWNRKRISNCVADYSVLYNSASFSTFKCYGVSPTKLNDLCFTNVYADSFVIRGDEVREIAPGQTGKIADYNYKLPDDFTGCVIAWNSNNLDSKVGGNYNYLYRLFRKSNLKPFERDISTEIYQAGSTPCNGVEGFNCYFPLQSYGFQPTNGVGYQPYRVVVLSFELLHAPATVCGPKKSTNLVKNKCVNFNFNGLTGTGVLTESNKKFLPFQQFGRDIADTTDAVRDPQTLEILDITPCSFGGVSVITPGTNTSNQVAVLYQDVNCTEVPVAIHADQLTPTWRVYSTGSNVFQTRAGCLIGAEHVNNSYECDIPIGAGICASYQTQTNSPRRARSVASQSIIAYTMSLGAENSVAYSNNSIAIPTNFTISVTTEILPVSMTKTSVDCTMYICGDSTECSNLLLQYGSFCTQLNRALTGIAVEQDKNTQEVFAQVKQIYKTPPIKDFGGFNFSQILPDPSKPSKRSFIEDLLFNKVTLADAGFIKQYGDCLGDIAARDLICAQKFNGLTVLPPLLTDEMIAQYCSALLAGTITSGWTFGAGAALQIPFAMQMAYRFNGIGVTQNVLYENQKLIANQFNSAIGKIQDSLSSTASALGKLQDVVNQNAQALNTLVKQLSSNFGAISSVLNDILSRLDKVEAEVQIDRLITGRLQSLQTYVTQQLIRAAEIRASANLAATKMSECVLGQSKRVDFCGKGYHLMSFPQCAPHGVVFLHVTYVPAQEKNFTTAPAICHDGKAHFPREGVFVSNGTHWFVTQRNFYEPQIITTDNTFVSGNCDVVIGIVNNTVYDPLQPELDSGGSGYIPEAPRDGQAYVRKDGEWVLLSTFL

SEQ ID NO: 10605 - protein, 1177 aa, Artificial Sequence
  SARS-CoV-2/Sweden/01/2020__EPI_ISL_411951 spike protein (1-1147)(T874C_S1055C) Foldon construct
MFVFLVLLPLVSSQCVNLTTRTQLPPAYTNSFTRGVYYPDKVFRSSVLHSTQDLFLPFFSNVTWFHAIHVSGTNGTKRFDNPVLPFNDGVYFASTEKSNIIRGWIFGTTLDSKTQSLLIVNNATNVVIKVCEFQFCNDPFLGVYYHKNNKSWMESEFRVYSSANNCTFEYVSQPFLMDLEGKQGNFKNLREFVFKNIDGYFKIYSKHTPINLVRDLPQGFSALEPLVDLPIGINITRFQTLLALHRSYLTPGDSSSGWTAGAAAYYVGYLQPRTFLLKYNENGTITDAVDCALDPLSETKCTLKSFTVEKGIYQTSNFRVQPTESIVRFPNITNLCPFGEVFNATRFASVYAWNRKRISNCVADYSVLYNSASFSTFKCYGVSPTKLNDLCFTNVYADSFVIRGDEVRQIAPGQTGKIADYNYKLPDDFTGCVIAWNSNNLDSKVGGNYNYLYRLFRKSNLKPFERDISTEIYQAGSTPCNGVEGFNCYFPLQSYGFQPTNGVGYQPYRVVVLSFELLHAPATVCGPKKSTNLVKNKCVNFNFNGLTGTGVLTESNKKFLPFQQFGRDIADTTDAVRDPQTLEILDITPCSFGGVSVITPGTNTSNQVAVLYQDVNCTEVPVAIHADQLTPTWRVYSTGSNVFQTRAGCLIGAEHVNNSYECDIPIGAGICASYQTQTNSPRRARSVASQSIIAYTMSLGAENSVAYSNNSIAIPTNFTISVTTEILPVSMTKTSVDCTMYICGDSTECSNLLLQYGSFCTQLNRALTGIAVEQDKNTQEVFAQVKQIYKTPPIKDCGGFNFSQILPDPSKPSKRSFIEDLLFNKVTLADAGFIKQYGDCLGDIAARDLICAQKFNGLTVLPPLLTDEMIAQYCSALLAGTITSGWTFGAGAALQIPFAMQMAYRFNGIGVTQNVLYENQKLIANQFNSAIGKIQDSLSSTASALGKLQDVVNQNAQALNTLVKQLSSNFGAISSVLNDILSRLDKVEAEVQIDRLITGRLQSLQTYVTQQLIRAAEIRASANLAATKMSECVLGQSKRVDFCGKGYHLMSFPQCAPHGVVFLHVTYVPAQEKNFTTAPAICHDGKAHFPREGVFVSNGTHWFVTQRNFYEPQIITTDNTFVSGNCDVVIGIVNNTVYDPLQPELDSGGSGYIPEAPRDGQAYVRKDGEWVLLSTFL

SEQ ID NO: 10606 - protein, 1177 aa, Artificial Sequence
  SARS-CoV-2/Tianmen/HBCDC-HB-07/2020__EPI_ISL_412983 spike protein (1-1147)(T874C_S1055C) Foldon construct
MFVFLVLLPLVSSQCVNLTTRTQLPPAYTNSFTRGVYYPDKVFRSSVLHSTQDLFLPFFSNVTWFHAIHVSGTNGTKRFDNPVLPFNDGVYFASTEKSNIIRGWIFGTTLDSKTQSLLIVNNATNVVIKVCEFQFCNDPFLGVYYHKNNKSWMESEFRVYSSANNCTFEYVSQPFLMDLEGKQGNFKNLREFVFKNIDGYFKIYSKHTPINLVRDLPQGFSALEPLVDLPIGINITRFQTLLALHRSYLTPGDSSSGWTAGAAAYYVGYLQPRTFLLKYNENGTITDAVDCALDPLSETKCTLKSFTVEKGIYQTSNFRVQPTESIVRFPNITNLCPFGEVFNATRFASVYAWNRKRISNCVADYSVLYNSASFSTFKCYGVSPTKLNDLCFTNVYADSFVIRGDEVRQIAPGQTGKIADYNYKLPDDFTGCVIAWNSNNLDSKVGGNYNYLYRLFRKSNLKPFERDISTEIYQAGSTPCNGVEGFNCYFPLQSYGFQPTNGVGYQPYRVVVLSFELLHAPATVCGPKKSTNLVKNKCVNFNFNGLTGTGVLTESNKKFLPFQQFGRDIADTTDAVRDPQTLEILDITPCSFGGVSVITPGTNTSNQVAVLYQDLNCTEVPVAIHADQLTPTWRVYSTGSNVFQTRAGCLIGAEHVNNSYECDIPIGAGICASYQTQTNSPRRARSVASQSIIAYTMSLGAENSVAYSNNSIAIPTNFTISVTTEILPVSMTKTSVDCTMYICGDSTECSNLLLQYGSFCTQLNRALTGIAVEQDKNTQEVFAQVKQIYKTPPIKDFGGFNFSQILPDPSKPSKRSFIEDLLFNKVTLADAGFIKQYGDCLGDIAARDLICAQKFNGLTVLPPLLTDEMIAQYCSALLAGTITSGWTFGAGAALQIPFAMQMAYRFNGIGVTQNVLYENQKLIANQFNSAIGKIQDSLSSTASALGKLQDVVNQNAQALNTLVKQLSSNFGAISSVLNDILSRLDKVEAEVQIDRLITGRLQSLQTYVTQQLIRAAEIRASANLAATKMSECVLGQSKRVDFCGKGYHLMSFPQCAPHGVVFLHVTYVPAQEKNFTTAPAICHDGKAHFPREGVFVSNGTHWFVTQRNFYEPQIITTDNTFVSGNCDVVIGIVNNTVYDPLQPELDSGGSGYIPEAPRDGQAYVRKDGEWVLLSTFL

SEQ ID NO: 10607 - protein, 1177 aa, Artificial Sequence
  SARS-CoV-2/Hong Kong/case42_VM20002493/2020__EPI_ISL_414527 spike protein (1-1147)(T874C_S1055C) Foldon construct
MFVFLVLLPLVSSQCVNLTTRTQLPPAYTNSFTRGVYYPDKVFRSSVLHSTQDLFLPFFSNVTWFHAIHVSGTNGTKRFDNPVLPFNDGVYFASTEKSNIIRGWIFGTTLDSKTQSLLIVNNATNVVIKVCEFQFCNDPFLGVYYHKNNKSWMESEFRVYSSANNCTFEYVSQPFLMDLEGKQGNFKNLREFVFKNIDGYFKIYSKHTPINLVRDLPQGFSALEPLVDLPIGINITRFQTLLALHRSYLTPGDSSSGWTAGAAAYYVGYLQPRTFLLKYNENGTITDAVDCALDPLSETKCTLKSFTVEKGIYQTSNFRVQPTESIVRFPNITNLCPFGEVFNATRFASVYAWNRKRISNCVADYSVLYNSASFSTFKCYGVSPTKLNDLCFTNVYADSFVIRGDEVRQIAPGQTGKIADYNYKLPDDFTGCVIAWNSNNLDSKVGGNYNYLYRLFRKSNLKPFERDISTEIYQAGSTPCNGVEGFNCYFPLQSYGFQPTNGVGYQPYRVVVLSFELLHAPATVCGPKKSTNLVKNKCVNFNFNGLTGTGVLTESNKKFLPFQQFGRDIADTTDAVRDPQTLEILDITPCSFGGVSVITPGTNTSNQVAVLYQDVNCTEVPVAIHADQLTPTWRVYSTGSNVFQTRAGCLIGAEHVNNSYECDIPIGAGICASYQTQTNSPRRARSVASQSIIAYTMSLGAENSVAYSNNSIAIPTNFAISVTTEILPVSMTKTSVDCTMYICGDSTECSNLLLQYGSFCTQLNRALTGIAVEQDKNTQEVFAQVKQIYKTPPIKDFGGFNFSQILPDPSKPSKRSFIEDLLFNKVTLADAGFIKQYGDCLGDIAARDLICAQKFNGLTVLPPLLTDEMIAQYCSALLAGTITSGWTFGAGAALQIPFAMQMAYRFNGIGVTQNVLYENQKLIANQFNSAIGKIQDSLSSTASALGKLQDVVNQNAQALNTLVKQLSSNFGAISSVLNDILSRLDKVEAEVQIDRLITGRLQSLQTYVTQQLIRAAEIRASANLAATKMSECVLGQSKRVDFCGKGYHLMSFPQCAPHGVVFLHVTYVPAQEKNFTTAPAICHDGKAHFPREGVFVSNGTHWFVTQRNFYEPQIITTDNTFVSGNCDVVIGIVNNTVYDPLQPELDSGGSGYIPEAPRDGQAYVRKDGEWVLLSTFL

SEQ ID NO: 10608 - protein, 1177 aa, Artificial Sequence
  SARS-CoV-2/USA/CruiseA-23/2020__EPI_ISL_414482 spike protein (1-1147)(T874C_S1055C) Foldon construct
MFVFLVLLPLVSSQCVNLTTRTQLPPAYTNSFTRGVYYPDKVFRSSVLHSTQDLFLPFFSNVTWFHAIHVSGTNGTKRFDNPVLPFNDGVYFASTEKSNIIRGWIFGTTLDSKTQSLLIVNNATNVVIKVCEFQFCNDPFLGVYYHKNNKSWMESEFRVYSSANNCTFEYVSQPFLMDLEVKQGNFKNLREFVFKNIDGYFKIYSKHTPINLVRDLPQGFSALEPLVDLPIGINITRFQTLLALHRSYLTPGDSSSGWTAGAAAYYVGYLQPRTFLLKYNENGTITDAVDCALDPLSETKCTLKSFTVEKGIYQTSNFRVQPTESIVRFPNITNLCPFGEVFNATRFASVYAWNRKRISNCVADYSVLYNSASFSTFKCYGVSPTKLNDLCFTNVYADSFVIRGDEVRQIAPGQTGKIADYNYKLPDDFTGCVIAWNSNNLDSKVGGNYNYLYRLFRKSNLKPFERDISTEIYQAGSTPCNGVEGFNCYFPLQSYGFQPTNGVGYQPYRVVVLSFELLHAPATVCGPKKSTNLVKNKCVNFNFNGLTGTGVLTESNKKFLPFQQFGRDIADTTDAVRDPQTLEILDITPCSFGGVSVITPGTNTSNQVAVLYQDVNCTEVPVAIHADQLTPTWRVYSTGSNVFQTRAGCLIGAEHVNNSYECDIPIGAGICASYQTQTNSPRRARSVASQSIIAYTMSLGAENSVAYSNNSIAIPTNFTISVTTEILPVSMTKTSVDCTMYICGDSTECSNLLLQYGSFCTQLNRALTGIAVEQDKNTQEVFAQVKQIYKTPPIKDFGGFNFSQILPDPSKPSKRSFIEDLLFNKVTLADAGFIKQYGDCLGDIAARDLICAQKFNGLTVLPPLLTDEMIAQYCSALLAGTITSGWTFGAGAALQIPFAMQMAYRFNGIGVTQNVLYENQKLIANQFNSAIGKIQDSLSSTASALGKLQDVVNQNAQALNTLVKQLSSNFGAISSVLNDILSRLDKVEAEVQIDRLITGRLQSLQTYVTQQLIRAAEIRASANLAATKMSECVLGQSKRVDFCGKGYHLMSFPQCAPHGVVFLHVTYVPAQEKNFTTAPAICHDGKAHFPREGVFVSNGTHWFVTQRNFYEPQIITTDNTFVSGNCDVVIGIVNNTVYDPLQPELDSGGSGYIPEAPRDGQAYVRKDGEWVLLSTFL

SEQ ID NO: 10609 - protein, 1177 aa, Artificial Sequence
  SARS-CoV-2/Hong Kong/case85_VM20002868/2020__EPI_ISL_414519 spike protein (1-1147)(T874C_S1055C) Foldon construct
MFVFLVLVPLVSSQCVNLTTRTQLPPAYTNSFTRGVYYPDKVFRSSVLHSTQDLFLPFFSNVTWFHAIHVSGTNGTKRFDNPVLPFNDGVYFASTEKSNIIRGWIFGTTLDSKTQSLLIVNNATNVVIKVCEFQFCNDPFLGVYYHKNNKSWMESEFRVYSSANNCTFEYVSQPFLMDLEGKQGNFKNLREFVFKNIDGYFKIYSKHTPINLVRDLPQGFSALEPLVDLPIGINITRFQTLLALHRSYLTPGDSSSGWTAGAAAYYVGYLQPRTFLLKYNENGTITDAVDCALDPLSETKCTLKSFTVEKGIYQTSNFRVQPTESIVRFPNITNLCPFGEVFNATRFASVYAWNRKRISNCVADYSVLYNSASFSTFKCYGVSPTKLNDLCFTNVYADSFVIRGDEVRQIAPGQTGKIADYNYKLPDDFTGCVIAWNSNNLDSKVGGNYNYLYRLFRKSNLKPFERDISTEIYQAGSTPCNGVEGFNCYFPLQSYGFQPTNGVGYQPYRVVVLSFELLHAPATVCGPKKSTNLVKNKCVNFNFNGLTGTGVLTESNKKFLPFQQFGRDIADTTDAVRDPQTLEILDITPCSFGGVSVITPGTNTSNQVAVLYQDVNCTEVPVAIHADQLTPTWRVYSTGSNVFQTRAGCLIGAEHVNNSYECDIPIGAGICASYQTQTNSPRRARSVASQSIIAYTMSLGAENSVAYSNNSIAIPTNFTISVTTEILPVSMTKTSVDCTMYICGDSTECSNLLLQYGSFCTQLNRALTGIAVEQDKNTQEVFAQVKQIYKTPPIKDFGGFNFSQILPDPSKPSKRSFIEDLLFNKVTLADAGFIKQYGDCLGDIAARDLICAQKFNGLTVLPPLLTDEMIAQYCSALLAGTITSGWTFGAGAALQIPFAMQMAYRFNGIGVTQNVLYENQKLIANQFNSAIGKIQDSLSSTASALGKLQDVVNQNAQALNTLVKQLSSNFGAISSVLNDILSRLDKVEAEVQIDRLITGRLQSLQTYVTQQLIRAAEIRASANLAATKMSECVLGQSKRVDFCGKGYHLMSFPQCAPHGVVFLHVTYVPAQEKNFTTAPAICHDGKAHFPREGVFVSNGTHWFVTQRNFYEPQIITTDNTFVSGNCDVVIGIVNNTVYDPLQPELDSGGSGYIPEAPRDGQAYVRKDGEWVLLSTFL

SEQ ID NO: 10610 - protein, 1177 aa, Artificial Sequence; identical to SEQ ID NO: 10600
  SARS-CoV-2/England/200990660/2020__EPI_ISL_414523 spike protein (1-1147)(T874C_S1055C) Foldon construct

SEQ ID NO: 10611 - protein, 1177 aa, Artificial Sequence
  SARS-CoV-2/Australia/NSW09/2020__EPI_ISL_413595 spike protein (1-1147)(T874C_S1055C) Foldon construct
MFVFLVLLPLVSSQCVNLTTRTQLPPAYTNSFTRGVYYPDKVFRSSVLHSTQDLFLPFFSNVTWFHAIHVSGTNGTKRFDNPVLPFNDGVYFASTEKSNIIRGWIFGTTLDSKTQSLLIVNNATNVVIKVCEFQFCNDPFLGVYYHKNNKSWMESEFRVYSSANNCTFEYVSQPFLMDLEGKQGNFKNLREFVFKNIDGYFKIYSKHTPINLVRDLPQGFSALEPLVDLPIGINITRFQTLLALHRSYLTPGDSSSGWTAGAAAYYVGYLQPRTFLLKYNENGTITDAVDCALDPLSETKCTLKSFTVEKGIYQTSNFRVQPTESIVRFPNITNLCPFGEVFNATRFASVYAWNRKRISNCVADYSVLYNSASFSTFKCYGVSPTKLNDLCFTNVYADSFVIRGDEVRQIAPGQTGKIADYNYKLPDDFTGCVIAWNSNNLDSKVGGNYNYLYRLFRKSNLKPFERDISTEIYQAGSTPCNGVEGFNCYFPLQSYGFQPTNGVGYQPYRVVVLSFELLHAPATVCGPKKSTNLVKNKCVNFNFNGLTGTGVLTESNKKFLPFQQFGRDIADTTDAVRDPQTLEILDITPCSFGGVSVITPGTNTSNQVAVLYQDVNCTEVPVAIHADQLTPTWRVYSTGSNVFQTRAGCLIGAEHVNNSYECDIPIGAGICASYQTQTNSPRRARSVASQSIIAYTMSLGAENSVAYSNNSIAIPTNFTISVTTEILPVSMTKTSVDCTMYICGDSTECSNLLLQYGSFCTQLNRALTGIAVEQDKNTQEVFAQVKQIYKTPPIKDFGGFNFSQILPDPSKPSKRSFIEDLLFNKVTLADAGFIKQYGDCLGDIAARDLICAQKFNGLTVLPPLLTDEMIAQYCSALLAGTITSGWTFGAGAALQIPFAMQMAYRFNGIGVTQNVLYENQKLIANQFNSAIGKIQDSLSFTASALGKLQDVVNQNAQALNTLVKQLSSNFGAISSVLNDILSRLDKVEAEVQIDRLITGRLQSLQTYVTQQLIRAAEIRASANLAATKMSECVLGQSKRVDFCGKGYHLMSFPQCAPHGVVFLHVTYVPAQEKNFTTAPAICHDGKAHFPREGVFVSNGTHWFVTQRNFYEPQIITTDNTFVSGNCDVVIGIVNNTVYDPLQPELDSGGSGYIPEAPRDGQAYVRKDGEWVLLSTFL

SEQ ID NO: 10612 - protein, 1177 aa, Artificial Sequence; identical to SEQ ID NO: 10592
  SARS-CoV-2/Australia/NSW10/2020__EPI_ISL_413596 spike protein (1-1147)(T874C_S1055C) Foldon construct

SEQ ID NO: 10613 - protein, 1177 aa, Artificial Sequence
  SARS-CoV-2/Switzerland/1000477797/2020__EPI_ISL_413023 spike protein (1-1147)(T874C_S1055C) Foldon construct
MFVFLVLLPLVSSQCVNLTTRTQLPPAYTNSFTRGVYYPDKVFRSSVLHSTQDLFLPFFSNVTWFHAIHVSGTNGTKRFDNPVLPFNDGVYFASTEKSNIIRGWIFGTTLDSKTQSLLIVNNATNVVIKVCEFQFCNDPFLGVYYHKNNKSWMESEFRVYSSANNCTFEYVSQPFLMDLEGKQGNFKNLREFVFKNIDGYFNIYSKHTPINLVRDLPQGFSALEPLVDLPIGINITRFQTLLALHRSYLTPGDSSSGWTAGAAAYYVGYLQPRTFLLKYNENGTITDAVDCALDPLSETKCTLKSFTVEKGIYQTSNFRVQPTESIVRFPNITNLCPFGEVFNATRFASVYAWNRKRISNCVADYSVLYNSASFSTFKCYGVSPTKLNDLCFTNVYADSFVIRGDEVRQIAPGQTGKIADYNYKLPDDFTGCVIAWNSNNLDSKVGGNYNYLYRLFRKSNLKPFERDISTEIYQAGSTPCNGVEGFNCYFPLQSYGFQPTNGVGYQPYRVVVLSFELLHAPATVCGPKKSTNLVKNKCVNFNFNGLTGTGVLTESNKKFLPFQQFGRDIADTTDAVRDPQTLEILDITPCSFGGVSVITPGTNTSNQVAVLYQGVNCTEVPVAIHADQLTPTWRVYSTGSNVFQTRAGCLIGAEHVNNSYECDIPIGAGICASYQTQTNSPRRARSVASQSIIAYTMSLGAENSVAYSNNSIAIPTNFTISVTTEILPVSMTKTSVDCTMYICGDSTECSNLLLQYGSFCTQLNRALTGIAVEQDKNTQEVFAQVKQIYKTPPIKDFGGFNFSQILPDPSKPSKRSFIEDLLFNKVTLADAGFIKQYGDCLGDIAARDLICAQKFNGLTVLPPLLTDEMIAQYCSALLAGTITSGWTFGAGAALQIPFAMQMAYRFNGIGVTQNVLYENQKLIANQFNSAIGKIQDSLSSTASALGKLQDVVNQNAQALNTLVKQLSSNFGAISSVLNDILSRLDKVEAEVQIDRLITGRLQSLQTYVTQQLIRAAEIRASANLAATKMSECVLGQSKRVDFCGKGYHLMSFPQCAPHGVVFLHVTYVPAQEKNFTTAPAICHDGKAHFPREGVFVSNGTHWFVTQRNFYEPQIITTDNTFVSGNCDVVIGIVNNTVYDPLQPELDSGGSGYIPEAPRDGQAYVRKDGEWVLLSTFL

SEQ ID NO: 10614 - protein, 1177 aa, Artificial Sequence
  SARS-CoV-2/Belgium/BA-02291/2020__EPI_ISL_415159 spike protein (1-1147)(T874C_S1055C) Foldon construct
MFVFLVLLPLVSSQCVNLTTRTQLPPAYTNSFTRGVYYPDKVFRSSVLHSTQDLFLPFFSNVTWFHAIHVSGTNGTKRFDNPVLPFNDGVYFASTEKSNIIRGWIFGTTLDSKTQSLLIVNNATNVVIKVCEFQFCNDPFLGVYYHKNNKSWMESEFRVYSSANNCTFEYVSQPFLMDLEGKQGNFKNLREFVFKNIDGYFKIYSKHTPINLVRDLPQGFSALEPLVDLPIGINITRFQTLLALHRSYLTPGDSSSGWTAGAAAYYVGYLQPRTFLLKYNENGTITDAVDCALDPLSETKCTLKSFTVEKGIYQTSNFRVQPTESIVRFPNITNLCPFGEVFNATRFASVYAWNRKRISNCVADYSVLYNSASFSTFKCYGVSPTKLNDLCFTNVYADSFVIRGDEVRQIAPGQTGKIADYNYKLPDDFTGCVIAWNSNNLDSKVGGNYNYLYRLFRRSNLKPFERDISTEIYQAGSTPCNGVEGFNCYFPLQSYGFQPTNGVGYQPYRVVVLSFELLPAPATVCGPKKSTNLVKNKCVNFNFNGLTGTGVLTESNKKFLPFQQFGRDIADTTDAVRDPQTLEILDITPCSFGGVSVITPGTNTSNQVAVLYQGVNCTEVPVAIHADQLTPTWRVYSTGSNVFQTRAGCLIGAEHVNNSYECDIPIGAGICASYQTQTNSPRRARSVASQSIIAYTMSLGAENSVAYSNNSIAIPTNFTISVTTEILPVSMTKTSVDCTMYICGDSTECSNLLLQYGSFCTQLNRALTGIAVEQDKNTQEVFAQVKQIYKTPPIKDFGGFNFSQILPDPSKPSKRSFIEDLLFNKVTLADAGFIKQYGDCLGDIAARDLICAQKFNGLTVLPPLLTDEMIAQYCSALLAGTITSGWTFGAGAALQIPFAMQMAYRFNGIGVTQNVLYENQKLIANQFNSAIGKIQDSLSSAAPALGKLQDVVNQNAQALNTLVKQLSSNFGAISSVLNDILSRLDKVEAEVQIDRLITGRLQSLQTYVTQQLIRAAEIRASANLAATKMSECVLGQSKRVDFCGKGYHLMSFPQCAPHGVVFLHVTYVPAQEKNFTTAPAICHDGKAHFPREGVFVSNGTHWFVTQRNFYEPQIITTDNTFVSGNCDVVIGIVNNTVYDPLQPELDSGGSGYIPEAPRDGQAYVRKDGEWVLLSTFL

SEQ ID NO: 10615 - protein, 1177 aa, Artificial Sequence
  SARS-CoV-2/USA/WA8-UW5/2020__EPI_ISL_413486 spike protein (1-1147)(T874C_S1055C) Foldon construct
MFVFLVLLPLVSSQCVNLTTRTQLPPAYTNSFTRGVYYPDKVFRSSVLHSTQDLFLPFFSNVTWFHAIHVSGTNGTKRFDNPVLPFNDGVYFASTEKSNIIRGWIFGTTLDSKTQSLLIVNNATNVVIKVCEFQFCNDPFLGVYYHKNNKSWMESEFRVYSSANNCTFEYVSQPFLMDLEGKQGNFKNLREFVFKNIDGYFKIYSKHTPINLVRDLPQGFSALEPLVDLPIGINITRFQTLLALHRSYLTPGDSSSGWTAGAAAYYVGYLQPRTFLLKYNENGTITDAVDCALDPLSETKCTLKSFTVEKGIYQTSNFRVQPTESIVRFPNITNLCPFGEVFNATRFASVYAWNRKRISNCVADYSVLYNSASFSTFKCYGVSPTKLNDLCFTNVYADSFVIRGDEVRQIAPGQTGKIADYNYKLPDDFTGCVIAWNSNNLDSKVGGNYNYLYRLFRKSNLKPFERDISTEIYQAGSTPCNGVEGFNCYFPLQSYGFQPTNGVGYQPYRVVVLSFELLHAPATVCGPKKSTNLVKNKCVNFNFNGLTGTGVLTESNKKFLPFQQFGRDIADTTDAVRDPQTLEILDITPCSFGGVSVITPGTNTSNQVAVLYQDVNCTEVPVAIHADQLTPTWRVYSTGSNVFQTRAGCLIGAEYVNNSYECDIPIGAGICASYQTQTNSPRRARSVASQSIIAYTMSLGAENSVAYSNNSIAIPTNFTISVTTEILPVSMTKTSVDCTMYICGDSTECSNLLLQYGSFCTQLNRALTGIAVEQDKNTQEVFAQVKQIYKTPPIKDFGGFNFSQILPDPSKPSKRSFIEDLLFNKVTLADAGFIKQYGDCLGDIAARDLICAQKFNGLTVLPPLLTDEMIAQYCSALLAGTITSGWTFGAGAALQIPFAMQMAYRFNGIGVTQNVLYENQKLIANQFNSAIGKIQDSLSSTASALGKLQDVVNQNAQALNTLVKQLSSNFGAISSVLNDILSRLDKVEAEVQIDRLITGRLQSLQTYVTQQLIRAAEIRASANLAATKMSECVLGQSKRVDFCGKGYHLMSFPQCAPHGVVFLHVTYVPAQEKNFTTAPAICHDGKAHFPREGVFVSNGTHWFVTQRNFYEPQIITTDNTFVSGNCDVVIGIVNNTVYDPLQPELDSGGSGYIPEAPRDGQAYVRKDGEWVLLSTFL

SEQ ID NO: 10616 - protein, 1177 aa, Artificial Sequence
  SARS-CoV-2/England/20102000506/2020__EPI_ISL_415147 spike protein (1-1147)(T874C_S1055C) Foldon construct
MFVFLVLLPLVSSQCVNLTTRTQLPPAYTNSFTRGVYYPDKVFRSSVLHSTQDLFLPFFSNVTWFHAIHVSGTNGTKRFDNPVLPFNDGVYFASTEKSNIIRGWIFGTTLDSKTQSLLIVNNATNVVIKVCEFQFCNDPFLGVYYHKNNKSWMESEFRVYSSANNCTFEYVSQPFLMDLEGKQGNFKNLREFVFKNIDGYFKIYSKHTPINLVRDLPQGFSALEPLVDLPIGINITRFQTLLALHRSYLTPGDSSSGWTAGAAAYYVGYLQPRTFLLKYNENGTITDAVDCALDPLSETKCTLKSFTVEKGIYQTSNFRVQPTESIVRFPNITNLCPFGEVFNATRFASVYAWNRKRISNCVADYSVLYNSASFSTFKCYGVSPTKLNDLCFTNVYADSFVIRGDEVRQIAPGQTGKIADYNYKLPDDFTGCVIAWNSNNLDSKVGGNYNYLYRLFRKSNLKPFERDISTEIYQAGSTPCNGVEGFNCYFPLQSYGFQPTNGVGYQPYRVVVLSFELLHAPATVCGPKKSTNLVKNKCVNFNFNGLTGTGVLTESNKKFLPFQQFGRDIADTTDAVRDPQTLEILDITPCSFGGVSVITPGTNTSNQVAVLYQGVNCTEVPVAIHADQLTPTWRVYSTGSNVFQTRAGCLIGAEHVNNSYECDIPIGAGICASYQTQTNSPRRARSVASQSIIAYTMSLGAENSVAYSNNSIAIPTNFTISVTTEILPVSMTKTSVDCTMYICGDSTECSNLLLQYGSFCTQLNRALTGIAVEQDKNTQEVFAQVKQIYKTPPIKDFGGFNFSQILPDPSKPSKRSFIEDLLFNKVTLADAGFIKQYGYCLGDIAARDLICAQKFNGLTVLPPLLTDEMIAQYCSALLAGTITSGWTFGAGAALQIPFAMQMAYRFNGIGVTQNVLYENQKLIANQFNSAIGKIQDSLSSTASALGKLQDVVNQNAQALNTLVKQLSSNFGAISSVLNDILSRLDKVEAEVQIDRLITGRLQSLQTYVTQQLIRAAEIRASANLAATKMSECVLGQSKRVDFCGKGYHLMSFPQCAPHGVVFLHVTYVPAQEKNFTTAPAICHDGKAHFPREGVFVSNGTHWFVTQRNFYEPQIITTDNTFVSGNCDVVIGIVNNTVYDPLQPELDSGGSGYIPEAPRDGQAYVRKDGEWVLLSTFL

SEQ ID NO: 10617 - protein, 1177 aa, Artificial Sequence
  SARS-CoV-2/Belgium/VAG-03013/2020__EPI_ISL_415155 spike protein (1-1147)(T874C_S1055C) Foldon construct
MFVFLVLLPLVSSQCVNLTTRTQLPPAYTNSFTRGVYYPDKVFRSSVLHSTQDLFLPFFSNVTWFHAIHVSGTNGTKRFDNPVLPFNDGVYFASTEKSNIIRGWIFGTTLDSKTQSLLIVNNATNVVIKVCEFQFCNDPFLGVYYHKNNKSWMESEFRVYSSANNCTFEYVSQPFLMDLEGKQGNFKNLREFVFKNIDGYFKIYSKHTPINLVRDLPQGFSALEPLVDLPIGINITRFQTLLALHRSYLTPGDSSSGWTAGAAAYYVGYLQPRTFLLKYNENGTITDAVDCALDPLSETKCTLKSFTVEKGIYQTSNFRVQPTESIVRFPNITNLCPFGEVFNATRFASVYAWNRKRISNCVADYSVLYNSASFSTFKCYGVSPTKLNDLCFTNVYADSFVIRGDEVRQIAPGQTGKIADYNYKLPDDFTGCVIAWNSNNLDSKVGGNYNYLYRLFRKSNLKPFERDISTEIYQAGSTPCNGVEGFNCYFPLQSYGFQPTNGVGYQPYRVVVLSFELLHAPATVCGPKKSTNLVKNKCVNFNFNGLTGTGVLTESNKKFLPFQQFGRDIADTTDAVRDPQTLEILDITPCSFGGVSVITPGTNTSNQVAVLYQGVNCTEVPVAIHADQLTPTWRVYSTGSNVFQTRAGCLIGAEHVNNSYECDIPIGAGICASYQTQTNSPRRARSVASQSIIAYTMSLGAENSVAYSNNSIAIPTNFTISVTTEILPVSMTKTSVDCTMYICGDSTECSNLLLQYGSFCTQLNRALTGIAVEQDKNTQEVFAQVKQIYKTPPIKDFGGFNFSQILPDPSKPSKRSFIEDLLFNKVTLADAGFIKQYGDCLGDIAARDLICAQKFNGLTVLPPLLTDEMIAQYCSALLAGTITSGWTFGAGAALQIPFAMQMAYRFNGIGVTQNVLYENQKLIANQFNSAIGKIQDSLSSTATALGKLQDVVNQNAQALNTLVKQLSSNFGAISSVLNDILSRLDKVEAEVQIDRLITGRLQSLQTYVTQQLIRAAEIRASANLAATKMSECVLGQSKRVDFCGKGYHLMSFPQCAPHGVVFLHVTYVPAQEKNFTTAPAICHDGKAHFPREGVFVSNGTHWFVTQRNFYEPQIITTDNTFVSGNCDVVIGIVNNTVYDPLQPELDSGGSGYIPEAPRDGQAYVRKDGEWVLLSTFL

SEQ ID NO: 10618 - protein, 1177 aa, Artificial Sequence
  SARS-CoV-2/Belgium/BC-03016/2020__EPI_ISL_415157 spike protein (1-1147)(T874C_S1055C) Foldon construct
MFVFLVLLPLVSSQCVNLTTRTQLPPAYTNSFTRGVYYPDKVFRSSVLHSTQDLFLPFFSNVTWFHAIHVSGTNGTKRFDNPVLPFNDGVYFASTEKSNIIRGWIFGTTLDSKTQSLLIVNNATNVVIKVCEFQFCNDPFLGVYYHKNNKSWMESEFRVYSSANNCTFEYVSQPFLMDLEGKQGNFKNLREFVFKNIDGYFKIYSKHTPINLVRDLPQGFSALEPLVDLPIGINITRFQTLLALHRSYLTPGDSSSGWTAGAAAYYVGYLQPRTFLLKYNENGTITDAVDCALDPLSETKCTLKSFTVEKGIYQTSNFRVQPTESIVRFPNITNLCPFGEVFNATRFASVYAWNRKRISNCVADYSVLYNSASFSTFKCYGVSPTKLNDLCFTNVYADSFVIRGDEVRQIAPGQTGKIADYNYKLPDDFTGCVIAWNSNNLDSKVGGNYNYLYRLFRKSNLKPFERDISTEIYQAGSTPCNGVEGFNCYFPLQSYGFQPTNGVGYQPYRVVVLSFELLHAPATVCGPKKSTNLVKNKCVNFNFNGLTGTGVLTESNKKFLPFQQFGRDIADTTDAVRDPQTLEILDITPCSFGGVSVITPGTNTSNQVAVLYQGVNCTEVPVAIHADQLTPTWRVYSTGSNVFQTRAGCLIGAEHVNNSYECDIPIGAGICASYQTQTNSPRRARSVASQSIIAYTMSLGAENSVAYSNNSIAIPTNFTISVTTEILPVSMTKTSVDCTMYICGDSTECSNLLLQYGSFCTQLNRALTGIAVEQDKNTQEVFAQVKQIYKTPPIKDFGGFNFSQILPDPSKPSKRSFIEDLLFNKVTLADAGFIKQYGDCLGDIAARDLICAQKFNGLTVLPPLLTDEMIAQYCSALLAGTITSGWTFGAGAALQIPFAMQMAYRFNGIGVTQNVLYENQKLIANQFNSAIGKIQDSLSSTAPALGKLQDVVNQNAQALNTLVKQLSSNFGAISSVLNDILSRLDKVEAEVQIDRLITGRLQSLQTYVTQQLIRAAEIRASANLAATKMSECVLGQSKRVDFCGKGYHLMSFPQCAPHGVVFLHVTYVPAQEKNFTTAPAICHDGKAHFPREGVFVSNGTHWFVTQRNFYEPQIITTDNTFVSGNCDVVIGIVNNTVYDPLQPELDSGGSGYIPEAPRDGQAYVRKDGEWVLLSTFL

SEQ ID NO: 10619 - protein, 1177 aa, Artificial Sequence
  SARS-CoV-2/Germany/BavPat3/2020__EPI_ISL_414521 spike protein (1-1147)(T874C_S1055C) Foldon construct
MFVFLVLLPLVSSQCVNLTTRTQLPPAYTNSFTRGVYYPDKVFRSSVLHSTQDLFLPFFSNVTWFHAIHVSGTNGTKRFDNPVLPFNDGVYFASTEKSNIIRGWIFGTTLDSKTQSLLIVNNATNVVIKVCEFQFCNDPFLGVYYHKNNKSWMESEFRVYSSANNCTFEYVSQPFLMDLEGKQGNFKNLREFVFKNIDGYFKIYSKHTPINLVRDLPQGFSALEPLVDLPIGINITRFQTLLALHRSYLTPGDSSSGWTAGAAAYYVGYLQPRTFLLKYNENGTITDAVDCALDPLSETKCTLKSFTVEKGIYQTSNFRVQPTESIVRFPNITNLCPFGEVFNATRFASVYAWNRKRISNCVADYSVLYNSASFSTFKCYGVSPTKLNDLCFTNVYADSFVIRGDEVRQIAPGQTGKIADYNYKLPDDFTGCVIAWNSNNLDSKVGGNYNYLYRLFRKSNLKPFERDISTEIYQAGSTPCNGVEGFNCYFPLQSYGFQPTNGVGYQPYRVVVLSFELLHAPATVCGPKKSTNLVKNKCVNFNFNGLTGTGVLTESNKKFLPFQQFGRDIADTTDAVRDPQTLEILDITPCSFGGVSVITPGTNTSNQVAVLYQDVNCTEVPVAIHADQLTPTWRVYSTGSNVFQTRAGCLIGAEHVNNSYECDIPIGAGICASYQTQTNSPRRARSVASQSIIAYTMSLGAENSVAYSNNSIAIPTNFTISVTTEILPVSMTKTSVDCTMYICGDSTECSNLLLQYGSFCTQLNRALTGIAVEQDKNTQQVFAQVKQIYKTPPIKDFGGFNFSQILPDPSKPSKRSFIEDLLFNKVTLADAGFIKQYGDCLGDIAARDLICAQKFNGLTVLPPLLTDEMIAQYCSALLAGTITSGWTFGAGAALQIPFAMQMAYRFNGIGVTQNVLYENQKLIANQFNSAIGKIQDSLSSTASALGKLQDVVNQNAQALNTLVKQLSSNFGAISSVLNDILSRLDKVEAEVQIDRLITGRLQSLQTYVTQQLIRAAEIRASANLAATKMSECVLGQSKRVDFCGKGYHLMSFPQCAPHGVVFLHVTYVPAQEKNFTTAPAICHDGKAHFPREGVFVSNGTHWFVTQRNFYEPQIITTDNTFVSGNCDVVIGIVNNTVYDPLQPELDSGGSGYIPEAPRDGQAYVRKDGEWVLLSTFL

SEQ ID NO: 10620 - protein, 1177 aa, Artificial Sequence
  SARS-CoV-2/France/HF1805/2020__EPI_ISL_414628 spike protein (1-1147)(T874C_S1055C) Foldon construct
MFVFLVLLPLVSSQCVNLTTRTQLPPAYTNSFTRGVYYPDKVFRSSVLHSTQDLFLPFFSNVTWFHAIHVSGTNGTKRFDNPVLPFNDGVYFASTEKSNIIRGWIFGTTLDSKTQSLLIVNNATNVVIKVCEFQFCNDPFLGVYYHKNNKSWMESEFRVYSSANNCTFEYVSQPFLMDLEGKQGNFKNLREFVFKNIDGYFKIYSKHTPINLVRDLPQGFSALEPLVDLPIGINITRFQTLLALHRSYLTPGDSSSGWTAGAAAYYVGYLQPRTFLLKYNENGTITDAVDCALDPLSETKCTLKSFTVEKGIYQTSNFRVQPTESIVRFPNITNLCPFGEVFNATRFASVYAWNRKRISNCVADYSVLYNSASFSTFKCYGVSPTKLNDLCFTNVYADSFVIRGDEVRQIAPGQTGKIADYNYKLPDDFTGCVIAWNSNNLDSKVGGNYNYLYRLFRKSNLKPFERDISTEIYQAGSTPCNGVEGFNCYFPLQSYGFQPTNGVGYQPYRVVVLSFELLHAPATVCGPKKSTNLVKNKCVNFNFNGLTGTGVLTESNKKFLPFQQFGRDIADTTDAVRDPQTLEILDITPCSFGGVSVITPGTNTSNQVAVLYQGVNCTEVPVAIHADQLTPTWRVYSTGSNVFQTRAGCLIGAEHVNNSYECDIPIGAGICASYQTQTNSPRRARSVASQSIIAYTMSLGAENSVAYSNNSIAIPTNFTISVTTEILPVSMTKTSVDCTMYICGDSTECSNLLLQYGSFCTQLNRALTGIAVEQDKNTQEVFAQVKQIYKTPPIKDFGGFNFSQILPDPSKPSKRSFIEDLLFNKVTLADAGFIKQYGDCLGDIAARDLICAQKFNGLTVLPPLLTDEMIAQYCSALLAGTITSGWTFGAGAALQIPFAMQMAYRFNGIGVTQNVLYENQKLIANQFNSAIGKIQDSLSSTASALGKLQDVVNQNAQALNTLVKQLSSNFGAISSVLNDILSRLDKVEAEVQIDRLITGRLQSLQTYVTQQLIRAAEIRASANLAATKMSECVLGQSKRVDFCGKGYHLMSFPQCAPHGVVFLHVTYVPAQEKNFTTAPAICHDGKAHFPREGVFVSNGTHWFVTQRNFYEPQIITTDNTFVSGNCDVVIGVVNNTVYDPLQPELDSGGSGYIPEAPRDGQAYVRKDGEWVLLSTFL

SEQ ID NO: 10621 - protein, 1177 aa, Artificial Sequence
  SARS-CoV-2/Netherlands/ZuidHolland_9/2020__EPI_ISL_414445 spike protein (1-1147)(T874C_S1055C) Foldon construct
MFVFLVLLPLVSSQCVNLTTRTQLPPAYTNSFTRGVYYPDKVFRSSVLHSTQDLFLPFFSNVTWFHAIHVSGTNGTKRFDNPVLPFNDGVYFASTEKSNIIRGWIFGTTLDSKTQSLLIVNNATNVVIKVCEFQFCNDPFLGVYYHKNNKSWMESEFRVYSSANNCTFEYVSQPFLMDLEGKQGNFKNLREFVFKNIDGYFKIYSKHTPINLVRDLPQGFSALEPLVDLPIGINITRFQTLLALHRSYLTPGDSSSGWTAGAAAYYVGYLQPRTFLLKYNENGTITDAVDCALDPLSETKCTLKSFTVEKGIYQTSNFRVQPTESIVRFPNITNLCPFGEVFNATRFASVYAWNRKRISNCVADYSVLYNSASFSTFKCYGVSPTKLNDLCFTNVYADSFVIRGDEVRQIAPGQTGKIADYNYKLPDDFTGCVIAWNSNNLDSKVGGNYNYLYRLFRKSNLKPFERDISTEIYQAGSTPCNGVEGFNCYFPLQSYGFQPTNGVGYQPYRVVVLSFELLHAPATVCGPKKSTNLVKNKCVNFNFNGLTGTGVLTESNKKFLPFQQFGRDIADTTDAVRDPQTLEILDITPCSFGGVSVITPGTNTSNQVAVLYQGVNCTEVPVAIHADQLTPTWRVYSTGSNVFQTRAGCLIGAEHVNNSYECDIPIGAGICASYQTQTNSPRRARSVASQSIIAYTMSLGAENSVAYSNNSIAIPTNFTISVTTEILPVSMTKTSVDCTMYICGDSTECSNLLLQYGSFCTQLNRALTGIAVEQDKNTQEVFAQVKQIYKTPPIKDFGGFNFSQILPDPSKPSKRSFIEDLLFNKVTLADAGFIKQYGDCLGDIAARDLICVQKFNGLTVLPPLLTDEMIAQYCSALLAGTITSGWTFGAGAALQIPFAMQMAYRFNGIGVTQNVLYENQKLIANQFNSAIGKIQDSLSSTASALGKLQDVVNQNAQALNTLVKQLSSNFGAISSVLNDILSRLDKVEAEVQIDRLITGRLQSLQTYVTQQLIRAAEIRASANLAATKMSECVLGQSKRVDFCGKGYHLMSFPQCAPHGVVFLHVTYVPAQEKNFTTAPAICHDGKAHFPREGVFVSNGTHWFVTQRNFYEPQIITTDNTFVSGNCDVVIGIVNNTVYDPLQPELDSGGSGYIPEAPRDGQAYVRKDGEWVLLSTFL

SEQ ID NO: 10622 - protein, 1177 aa, Artificial Sequence
  SARS-CoV-2/Finland/FIN03032020A/2020__EPI_ISL_413602 spike protein (1-1147)(T874C_S1055C) Foldon construct
MFVFLVLLPLVSSQCVNLTTRTQLPPAYTNSFTRGVYYPDKVFRSSVLHSTQDLFLPFFSNVTWFHAIHVSGTNGTKRFDNPVLPFNDGVYFASTEKSNIIRGWIFGTTLDSKTQSLLIVNNATNVVIKVCEFQFCNDPFLGVYYHKNNKSWMESEFRVYSSANNCTFEYVSQPFLMDLEGKQGNFKNLREFVFKNIDGYFKIYSKHTPINLVRDLPQGFSALEPLVDLPIGINITRFQTLLALHRSYLTPGDSSSGWTAGAAAYYVGYLQPRTFLLKYNENGTITDAVDCALDPLSETKCTLKSFTVEKGIYQTSNFRVQPTESIVRFPNITNLCPFGEVFNATRFASVYAWNRKRISNCVADYSVLYNSASFSTFKCYGVSPTKLNDLCFTNVYADSFVIRGDEVRQIAPGQTGKIADYNYKLPDDFTGCVISWNSNNLDSKVGGNYNYLYRLFRKSNLKPFERDISTEIYQAGSTPCNGVEGFNCYFPLQSYGFQPTNGVGYQPYRVVVLSFELLHAPATVCGPKKSTNLVKNKCVNFNFNGLTGTGVLTESNKKFLPFQQFGRDIADTTDAVRDPQTLEILDITPCSFGGVSVITPGTNTSNQVAVLYQGVNCTEVPVAIHADQLTPTWRVYSTGSNVFQTRAGCLIGAEHVNNSYECDIPIGAGICASYQTQTNSPRRARSVASQSIIAYTMSLGAENSVAYSNNSIAIPTNFTISVTTEILPVSMTKTSVDCTMYICGDSTECSNLLLQYGSFCTQLNRALTGIAVEQDKNTQEVFAQVKQIYKTPPIKDFGGFNFSQILPDPSKPSKRSFIEDLLFNKVTLADAGFIKQYGDCLGDIAARDLICAQKFNGLTVLPPLLTDEMIAQYCSALLAGTITSGWTFGAGAALQIPFAMQMAYRFNGIGVTQNVLYENQKLIANQFNSAIGKIQDSLSSTASALGKLQDVVNQNAQALNTLVKQLSSNFGAISSVLNDILSRLDKVEAEVQIDRLITGRLQSLQTYVTQQLIRAAEIRASANLAATKMSECVLGQSKRVDFCGKGYHLMSFPQCAPHGVVFLHVTYVPAQEKNFTTAPAICHDGKAHFPREGVFVSNGTHWFVTQRNFYEPQIITTDNTFVSGNCDVVIGIVNNTVYDPLQPELDSGGSGYIPEAPRDGQAYVRKDGEWVLLSTFL

SEQ ID NO: 10623 - protein, 1177 aa, Artificial Sequence
  SARS-CoV-2/France/GE1977/2020__EPI_ISL_414632 spike protein (1-1147)(T874C_S1055C) Foldon construct
MFVFLVLLPLVSSQCVNLTTRTQLPPAYTNSFTRGVYYPDKVFRSSVLHSTQDLFLPFFSNVTWFHAIHVSGTNGTKRFDNPVLPFNDGVYFASTEKSNIIRGWIFGTTLDSKTQSLLIVNNATNVVIKVCEFQFCNDPFLGVYYHKNNKSWMESEFRVYSSANNCTFEYVSQPFLMDLEGKQGNFKNLREFVFKNIDGYFKIYSKHTPINLVRDLPQGFSALEPLVDLPIGINITRFQTLLALHRSYLTPGDSSSGWTAGAAAYYVGYLQPRTFLLKYNENGTITDAVDCALDPLSETKCTLKSFTVEKGIYQTSNFRVQPTESIVRFPNITNLCPFGEVFNATRFASVYAWNRKRISNCVADYSVLYNSASFSTFKCYGVSPTKLNDLCFTNVYADSFVIRGDEVRQIAPGQTGKIADYNYKLPDDFTGCVIAWNSNNLDSKVGGNYNYLYRLFRKSNLKPFERDISTEIYQAGSTPCNGVEGFNCYFPLQSYGFQPTNGVGYQPYRVVVLSFELLHAPATVCGPKKSTNLVKNKCVNFNFNGLTGTGVLTESNKKFLPFQQFGRDIADTTDAVRDPQTLEILDITPCSFGGVSVITPGTNTSNQVAVLYQGVNCTEVPVAIHADQLTPTWRVYSTGSNVFQTRAGCLIGAEHVNNSYECDIPIGAGICASYQTQTNSPRRARSVASQSIIAYTMSLGAENSVAYSNNSIAIPTNFTISVTTEILPVSMTKTSVDCTMYICGDSTECSNLLLQYGSFCTQLNRALTGIAVEQDKNTQEVFAQVKQIYKTPPIKDFGGFNFSQILPDPSKPSKRSFIEDLLFNKVTLADAGFIKQYGDCLGDIAARDLICAQKFNGLTVLPPLLTDEMIAQYCSALLAGTITSGWTFGAGAALQIPFAMQMAYRFNGIGVTQNVLYENQKLIANQFNSAIGKIQDSLFSTASALGKLQDVVNQNAQALNTLVKQLSSNFGAISSVLNDILSRLDKVEAEVQIDRLITGRLQSLQTYVTQQLIRAAEIRASANLAATKMSECVLGQSKRVDFCGKGYHLMSFPQCAPHGVVFLHVTYVPAQEKNFTTAPAICHDGKAHFPREGVFVSNGTHWFVTQRNFYEPQIITTDNTFVSGNCDVVIGIVNNTVYDPLQPELDSGGSGYIPEAPRDGQAYVRKDGEWVLLSTFL

SEQ ID NO: 10624 - protein, 1177 aa, Artificial Sequence
  SARS-CoV-2/Finland/FIN-313/2020__EPI_ISL_414641 spike protein (1-1147)(T874C_S1055C) Foldon construct
MFVFLVLLPLVSSQCVNLTTRTQLPPAYTNSFTRGVYYPDKVFRSSVLHSTQDLFLPFFSNVTWFHAIHVSGTNGTKRFDNPVLPFNDGVYFASTEKSNIIRGWIFGTTLDSKTQSLLIVNNATNVVIKVCEFQFCNDPFLGVYYHKNNKSWMESEFRVYSSANNCTFEYVSQPFLMDLEGKQGNFKNLREFVFKNIDGYFKIYSKHTPINLVRDLPQGFSALEPLVDLPIGINITRFKTLLALHRSYLTPGDSSSGWTAGAAAYYVGYLQPRTFLLKYNENGTITDAVDCALDPLSETKCTLKSFTVEKGIYQTSNFRVQPTESIVRFPNITNLCPFGEVFNATRFASVYAWNRKRISNCVADYSVLYNSASFSTFKCYGVSPTKLNDLCFTNVYADSFVIRGDEVRQIAPGQTGKIADYNYKLPDDFTGCVIAWNSNNLDSKVGGNYNYLYRLFRKSNLKPFERDISTEIYQAGSTPCNGVEGFNCYFPLQSYGFQPTNGVGYQPYRVVVLSFELLHAPATVCGPKKSTNLVKNKCVNFNFNGLTGTGVLTESNKKFLPFQQFGRDIADTTDAVRDPQTLEILDITPCSFGGVSVITPGTNTSNQVAVLYQGVNCTEVPVAIHADQLTPTWRVYSTGSNVFQTRAGCLIGAEHVNNSYECDIPIGAGICASYQTQTNSPRRARSVASQSIIAYTMSLGAENSVAYSNNSIAIPTNFTISVTTEILPVSMTKTSVDCTMYICGDSTECSNLLLQYGSFCTQLNRALTGIAVEQDKNTQEVFAQVKQIYKTPPIKDFGGFNFSQILPDPSKPSKRSFIEDLLFNKVTLADAGFIKQYGDCLGDIAARDLICAQKFNGLTVLPPLLTDEMIAQYCSALLAGTITSGWTFGAGAALQIPFAMQMAYRFNGIGVTQNVLYENQKLIANQFNSAIGKIQDSLSSTASALGKLQDVVNQNAQALNTLVKQLSSNFGAISSVLNDILSRLDKVEAEVQIDRLITGRLQSLQTYVTQQLIRAAEIRASANLAATKMSECVLGQSKRVDFCGKGYHLMSFPQCAPHGVVFLHVTYVPAQEKNFTTAPAICHDGKAHFPREGVFVSNGTHWFVTQRNFYEPQIITTDNTFVSGNCDVVIGIVNNTVYDPLQPELDSGGSGYIPEAPRDGQAYVRKDGEWVLLSTFL

SEQ ID NO: 10625 - protein, 1177 aa, Artificial Sequence
  SARS-CoV-2/Netherlands/ZuidHolland_2/2020__EPI_ISL_414556 spike protein (1-1147)(T874C_S1055C) Foldon construct
MFVFLVLLPLVSSQCVNLTTRTQLPPAYTNSFTRGVYYPDKVFRSSVLHSTQDLFLPFFSNVTWFHAIHVSGTNGTKRFDNPVLPFNDGVYFASTEKSNIIRGWIFGTTLDSKTQSLLIVNNATNVVIKVCEFQFCNDPFLGVYYHKNNKSWMESEFRVYSSANNCTFEYVSQPFLMDLEGKQGNFKNLREFVFKNIDGYFKIYSKHTPINLVRDLPQGFSALEPLVDLPIGINITRFQTLLALHRSYLTPGDSSSGWTAGAAAYYVGYLQPRTFLLKYNENGTITDAVDCALDPLSETKCTLKSFTVEKGIYQTSNFRVQPTESIVRFPNITNLCPFGEVFNATRFASVYAWNRKRISNCVADYSVLYNSASFSTFKCYGVSPTKLNDLCFTNVYADSFVIRGDEVRQIAPGQTGKIADYNYKLPDDFTGCVIAWNSNNLDSKVGGNYNYLYRLFRKSNLKPFERDISTEIYQAGSTPCNGVEGFNCYFPLQSYGFQPTNGVGYQPYRVVVLSFELLHAPATVCGPKKSTNLVKNKCVNFNFNGLTGTGVLTESNKKFLPFQQFGRDIADTTDAVRDPQTLEILDITPCSFGGVSVITPGTNTSNQVAVLYQGVNCTEVPVAIHADQLTPTWRVYSTGSNVFQTRAGCLIGAEHVNNSYECDIPIGAGICASYQTQTNSPRRARSVASQSIIAYTMSLGAENSVAYSNNSIAIPTNFTISVTTEILPVSMTKTSVDCTMYICGDSTECSNLLLQYGSFCTQLNRALTGIALEQDKNTQEVFAQVKQIYKTPPIKDFGGFNFSQILPDPSKPSKRSFIEDLLFNKVTLADAGFIKQYGDCLGDIAARDLICAQKFNGLTVLPPLLTDEMIAQYCSALLAGTITSGWTFGAGAALQIPFAMQMAYRFNGIGVTQNVLYENQKLIANQFNSAIGKIQDSLSSTASALGKLQDVVNQNAQALNTLVKQLSSNFGAISSVLNDILSRLDKVEAEVQIDRLITGRLQSLQTYVTQQLIRAAEIRASANLAATKMSECVLGQSKRVDFCGKGYHLMSFPQCAPHGVVFLHVTYVPAQEKNFTTAPAICHDGKAHFPREGVFVSNGTHWFVTQRNFYEPQIITTDNTFVSGNCDVVIGIVNNTVYDPLQPELDSGGSGYIPEAPRDGQAYVRKDGEWVLLSTFL

SEQ ID NO: 10626 - protein, 1177 aa, Artificial Sequence
  SARS-CoV-2/USA/WA-UW31/2020__EPI_ISL_414618 spike protein (1-1147)(T874C_S1055C) Foldon construct
MFVFLVLLPLVSSQCVNLTTRTQLPPAYTNSFTRGVYYPDKVFRSSVLHSTQDLFLPFFSNVTWFHAIHVSGTNGTKRFDNPVLPFNDGVYFASTEKSNIIRGWIFGTTLDSKTQSLLIVNNATNVVIKVCEFQFCNDPFLGVYYHKNNKSWMESEFRVYSSANNCTFEYVSQPFLMDLEGKQGNFKNLREFVFKNIDGYFKIYSKHTPINLVRDLPQGFSALEPLVDLPIGINITRFQTLLALHRSYLTPGDSSSGWTAGAAAYYVGYLQPRTFLLKYNENGTITDAVDCALDPLSETKCTLKSFTVEKGIYQTSNFRVQPTESIVRFPNITNLCPFGEVFNATRFASVYAWNRKRISNCVADYSVLYNSASFSTFKCYGVSPTKLNDLCFTNVYADSFVIRGDEVRQIAPGQTGKIADYNYKLPDDFTGCVIAWNSNNLDSKVGGNYNYLYRLFRKSNLKPFERDISTEIYQAGSTPCNGAEGFNCYFPLQSYGFQPTNGVGYQPYRVVVLSFELLHAPATVCGPKKSTNLVKNKCVNFNFNGLTGTGVLTESNKKFLPFQQFGRDIADTTDAVRDPQTLEILDITPCSFGGVSVITPGTNTSNQVAVLYQDVNCTEVPVAIHADQLTPTWRVYSTGSNVFQTRAGCLIGAEHVNNSYECDIPIGAGICASYQTQTNSPRRARSVASQSIIAYTMSLGAENSVAYSNNSIAIPTNFTISVTTEILPVSMTKTSVDCTMYICGDSTECSNLLLQYGSFCTQLNRALTGIAVEQDKNTQEVFAQVKQIYKTPPIKDFGGFNFSQILPDPSKPSKRSFIEDLLFNKVTLADAGFIKQYGDCLGDIAARDLICAQKFNGLTVLPPLLTDEMIAQYCSALLAGTITSGWTFGAGAALQIPFAMQMAYRFNGIGVTQNVLYENQKLIANQFNSAIGKIQDSLSSTASALGKLQDVVNQNAQALNTLVKQLSSNFGAISSVLNDILSRLDKVEAEVQIDRLITGRLQSLQTYVTQQLIRAAEIRASANLAATKMSECVLGQSKRVDFCGKGYHLMSFPQCAPHGVVFLHVTYVPAQEKNFTTAPAICHDGKAHFPREGVFVSNGTHWFVTQRNFYEPQIITTDNTFVSGNCDVVIGIVNNTVYDPLQPELDSGGSGYIPEAPRDGQAYVRKDGEWVLLSTFL

SEQ ID NO: 10627 - protein, 1177 aa, Artificial Sequence
  SARS-CoV-2/South Korea/SNU01/2020__EPI_ISL_411929 spike protein (1-1147)(T874C_S1055C) Foldon construct
MFVFLVLLPLVSSQCVNLTTRTQLPPAYTNSFTRGVYYPDKVFRSSVLHSTQDLFLPFFSNVTWFHAIHVSGTNGTKRFDNPVLPFNDGVYFASTEKSNIIRGWIFGTTLDSKTQSLLIVNNATNVVIKVCEFQFCNDPFLGVYYHKNNKSWMESEFRVYSSANNCTFEYVSQPFLMDLEGKQGNFKNLREFVFKNIDGYFKIYSKHTPINLVRDLPQGFWALEPLVDLPIGINITRFQTLLALHRSYLTPGDSSSGWTAGAAAYYVGYLQPRTFLLKYNENGTITDAVDCALDPLSETKCTLKSFTVEKGIYQTSNFRVQPTESIVRFPNITNLCPFGEVFNATRFASVYAWNRKRISNCVADYSVLYNSASFSTFKCYGVSPTKLNDLCFTNVYADSFVIRGDEVRQIAPGQTGKIADYNYKLPDDFTGCVIAWNSNNLDSKVGGNYNYLYRLFRKSNLKPFERDISTEIYQAGSTPCNGVEGFNCYFPLQSYGFQPTNGVGYQPYRVVVLSFELLHAPATVCGPKKSTNLVKNKCVNFNFNGLTGTGVLTESNKKFLPFQQFGRDIADTTDAVRDPQTLEILDITPCSFGGVSVITPGTNTSNQVAVLYQDVNCTEVPVAIHADQLTPTWRVYSTGSNVFQTRAGCLIGAEHVNNSYECDIPIGAGICASYQTQTNSPRRARSVASQSIIAYTMSLGAENSVAYSNNSIAIPTNFTISVTTEILPVSMTKTSVDCTMYICGDSTECSNLLLQYGSFCTQLNRALTGIAVEQDKNTQEVFAQVKQIYKTPPIKDFGGFNFSQILPDPSKPSKRSFIEDLLFNKVTLADAGFIKQYGDCLGDIAARDLICAQKFNGLTVLPPLLTDEMIAQYCSALLAGTITSGWTFGAGAALQIPFAMQMAYRFNGIGVTQNVLYENQKLIANQFNSAIGKIQDSLSSTASALGKLQDVVNQNAQALNTLVKQLSSNFGAISSVLNDILSRLDKVEAEVQIDRLITGRLQSLQTYVTQQLIRAAEIRASANLAATKMSECVLGQSKRVDFCGKGYHLMSFPQCAPHGVVFLHVTYVPAQEKNFTTAPAICHDGKAHFPREGVFVSNGTHWFVTQRNFYEPQIITTDNTFVSGNCDVVIGIVNNTVYDPLQPELDSGGSGYIPEAPRDGQAYVRKDGEWVLLSTFL

SEQ ID NO: 10628 - protein, 1177 aa, Artificial Sequence
  SARS-CoV-2/China/WF0004/2020__EPI_ISL_413694 spike protein (1-1147)(T874C_S1055C) Foldon construct
MFVFLVLLPLVSSQCVNLTTRTQLPPAYTNSFTRGVYYPDKVFRSSVLHSTQDLFLPFFSNVTWFHAIHVSGTNGTKRFDNPVLPFNDGVYFASTEKSNIIRGWIFGTTLDSKTQSLLIVNNATNVVIKVCEFQFCNDPFLGVYYHKNNKSWTESEFRVYSSANNCTFEYVSQPFLMDLEGKQGNFKNLREFVFKNIDGYFKIYSKHTPINLVRDLPQGFSALEPLVDLPIGINITRFQTLLALHRSYLTPGDSSSGWTAGAAAYYVGYLQPRTFLLKYNENGTITDAVDCALDPLSETKCTLKSFTVEKGIYQTSNFRVQPTESIVRFPNITNLCPFGEVFNATRFASVYAWNRKRISNCVADYSVLYNSASFSTFKCYGVSPTKLNDLCFTNVYADSFVIRGDEVRQIAPGQTGKIADYNYKLPDDFTGCVIAWNSNNLDSKVGGNYNYLYRLFRKSNLKPFERDISTEIYQAGSTPCNGVEGFNCYFPLQSYGFQPTNGVGYQPYRVVVLSFELLHAPATVCGPKKSTNLVKNKCVNFNFNGLTGTGVLTESNKKFLPFQQFGRDIADTTDAVRDPQTLEILDITPCSFGGVSVITPGTNTSNQVAVLYQDVNCTEVPVAIHADQLTPTWRVYSTGSNVFQTRAGCLIGAEHVNNSYECDIPIGAGICASYQTQTNSPRRARSVASQSIIAYTMSLGAENSVAYSNNSIAIPTNFTISVTTEILPVSMTKTSVDCTMYICGDSTECSNLLLQYGSFCTQLNRALTGIAVEQDKNTQEVFAQVKQIYKTPPIKDFGGFNFSQILPDPSKPSKRSFIEDLLFNKVTLADAGFIKQYGDCLGDIAARDLICAQKFNGLTVLPPLLTDEMIAQYCSALLAGTITSGWTFGAGAALQIPFAMQMAYRFNGIGVTQNVLYENQKLIANQFNSAIGKIQDSLSSTASALGKLQDVVNQNAQALNTLVKQLSSNFGAISSVLNDILSRLDKVEAEVQIDRLITGRLQSLQTYVTQQLIRAAEIRASANLAATKMSECVLGQSKRFDFCGKGYHLMSFPQCAPHGVVFLHVTYVPAQEKNFTTAPAICHDGKAHFPREGVFVSNGTHWFVTQRNFYEPQIITTDNTFVSGNCDVVIGIVNNTVYDPLQPELDSGGSGYIPEAPRDGQAYVRKDGEWVLLSTFL

SEQ ID NO: 10629 - protein, 1177 aa, Artificial Sequence
  SARS-CoV-2/China/WF0028/2020__EPI_ISL_413791 spike protein (1-1147)(T874C_S1055C) Foldon construct
MFVFLVLLPLVSSQCVNLTTRTQLPPAYTNSFTRGVYYPDKVFRSSVLHSTQDLFLPFFSNVTWFHAIHVSGTNGTKRFDNPVLPFNDGVYFASTEKSNIIRGWIFGTTLDSKTQSLLIVNNATNVVIKVCEFQFCNDPFLGVYYHKNNKSWMESEFRVYSSANNCTFEYVSQPFLMDLEGKQGNFKNLREFVFKNIDGYFKIYSKHTPINLVRDLPQGFSALEPLVDLPIGINITRFQTLLALHRSYLTPGDSSSGWTAGAAAYYVGYLQPRTFLLKYNENGTITDAVDCALDPLSETKCTLKSFTVEKGIYQTSNFRVQPTESIVRFPNITNLCPFGEVFNATRFASVYAWNRKRISNCVADYSVLYNSASFSTFKCYGVSPTKLNDLCFTNVYADSFVIRGDEVRQIAPGQTGKIADYNYKLPDDFTGCVIAWNSNNLDSKVGGNYNYLYRLFRKSNLKPFERDISTEIYQAGSTPCNGVEGFNCYFPLQSYGFQPTNGVGYQPYRVVVLSFELLHAPATVCGPKKSTNLVKNKCVNFNFNGLTGTGVLTESNKKFLPFQQFGRDIADTTDAVRDPQTLEILDITPCSFGGVSVITPGTNTSNQVAVLYQDVNCTEVPVAIHADQLTPTWRVYSTGSNVFQTRAGCLIGAEHVNNSYECDIPIGAGICASYQTQTNSPRRARSVASQSIIAYTMSLGAENSVAYSNNSIAIPTNFTISVTTEILPVSMTKTSVDCTMYICGDSTECSNLLLQYGSFCTQLNRALTGIAVEQDKNTQEVFAQVKQIYKTPPIKDFGGFNFSQILPDPSKPSKRSFIEDLLFNKVTLADAGFIKQYGDCLGDIAARDLICAQKFNGLTVLPPLLTDEMIAQYCSALLAGTITSGWTFGAGAALQIPFAMQMAYRFNGIGVTQNVLYENQKLIANQFNSAIGKIQDSLSSTASALGKLQDVVNQNAQALNTLVKQLSSNFGAISSVLNDILSRLDKVEAEVQIDRLITGRLQSLQTYVTQQLIRAAEIRASANLAATKMSECVLGQSKRVDFCGKGYHLMSFPQCAPHGVVFLHVTYVPAQEKNFTTAPAICHDGKAHFPREGVFVSNGTHWFVTQRNFYEPQIITTDNTFVSGNCDVVIGIVNNTVYDPLQPELESGGSGYIPEAPRDGQAYVRKDGEWVLLSTFL

SEQ ID NO: 10630 - protein, 1177 aa, Artificial Sequence
  SARS-CoV-2/2019-nCoV/USA-CruiseA-18/2020__MT159716.1 spike protein (1-1147)(T874C_S1055C) Foldon construct
MFVFLVLLPLVSSQCVNLTTRTQLPPAYTNSFTRGVYYPDKVFRSSVLHSTQDLFLPFFSNVTWFHAIHVSGTNGTKRFDNPVLPFNDGVYFASTEKSNIIRGWIFGTTLDSKTQSLLIVNNATNVVIKVCEFQFCNDPFLGVYYHKNNKSWMESELRVYSSANNCTFEYVSQPFLMDLEGKQGNFKNLREFVFKNIDGYFKIYSKHTPINLVRDLPQGFSALEPLVDLPIGINITRFQTLLALHRSYLTPGDSSSGWTAGAAAYYVGYLQPRTFLLKYNENGTITDAVDCALDPLSETKCTLKSFTVEKGIYQTSNFRVQPTESIVRFPNITNLCPFGEVFNATRFASVYAWNRKRISNCVADYSVLYNSASFSTFKCYGVSPTKLNDLCFTNVYADSFVIRGDEVRQIAPGQTGKIADYNYKLPDDFTGCVIAWNSNNLDSKVGGNYNYLYRLFRKSNLKPFERDISTEIYQAGSTPCNGVEGFNCYFPLQSYGFQPTNGVGYQPYRVVVLSFELLHAPATVCGPKKSTNLVKNKCVNFNFNGLTGTGVLTESNKKFLPFQQFGRDIADTTDAVRDPQTLEILDITPCSFGGVSVITPGTNTSNQVAVLYQDVNCTEVPVAIHADQLTPTWRVYSTGSNVFQTRAGCLIGAEHVNNSYECDIPIGAGICASYQTQTNSPRRARSVASQSIIAYTMSLGAENSVAYSNNSIAIPTNFTISVTTEILPVSMTKTSVDCTMYICGDSTECSNLLLQYGSFCTQLNRALTGIAVEQDKNTQEVFAQVKQIYKTPPIKDFGGFNFSQILPDPSKPSKRSFIEDLLFNKVTLADAGFIKQYGDCLGDIAARDLICAQKFNGLTVLPPLLTDEMIAQYCSALLAGTITSGWTFGAGAALQIPFAMQMAYRFNGIGVTQNVLYENQKLIANQFNSAIGKIQDSLSSTASALGKLQDVVNQNAQALNTLVKQLSSNFGAISSVLNDILSRLDKVEAEVQIDRLITGRLQSLQTYVTQQLIRAAEIRASANLAATKMSECVLGQSKRVDFCGKGYHLMSFPQCAPHGVVFLHVTYVPAQEKNFTTAPAICHDGKAHFPREGVFVSNGTHWFVTQRNFYEPQIITTDNTFVSGNCDVVIGIVNNTVYDPLQPELDSGGSGYIPEAPRDGQAYVRKDGEWVLLSTFL

SEQ ID NO: 10631 - protein, 1177 aa, Artificial Sequence
  SARS-CoV-2/SARS-CoV-2/Yunnan-01/human/2020/CHN__MT049951.1 spike protein (1-1147)(T874C_S1055C) Foldon construct
MFVFLVLLPLVSSQCVNLTTRTQLPPANTNSFTRGVYYPDKVFRSSVLHSTQDLFLPFFSNVTWFHAIHVSGTNGTKRFDNPVLPFNDGVYFASTEKSNIIRGWIFGTTLDSKTQSLLIVNNATNVVIKVCEFQFCNDPFLGVYYHKNNKSWMESEFRVYSSANNCTFEYVSQPFLMDLEGKQGNFKNLREFVFKNIDGYFKIYSKHTPINLVRDLPQGFSALEPLVDLPIGINITRFQTLLALHRSYLTPGDSSSGWTAGAAAYYVGYLQPRTFLLKYNENGTITDAVDCALDPLSETKCTLKSFTVEKGIYQTSNFRVQPTESIVRFPNITNLCPFGEVFNATRFASVYAWNRKRISNCVADYSVLYNSASFSTFKCYGVSPTKLNDLCFTNVYADSFVIRGDEVRQIAPGQTGKIADYNYKLPDDFTGCVIAWNSNNLDSKVGGNYNYLYRLFRKSNLKPFERDISTEIYQAGSTPCNGVEGFNCYFPLQSYGFQPTNGVGYQPYRVVVLSFELLHAPATVCGPKKSTNLVKNKCVNFNFNGLTGTGVLTESNKKFLPFQQFGRDIADTTDAVRDPQTLEILDITPCSFGGVSVITPGTNTSNQVAVLYQDVNCTEVPVAIHADQLTPTWRVYSTGSNVFQTRAGCLIGAEHVNNSYECDIPIGAGICASYQTQTNSPRRARSVASQSIIAYTMSLGAENSVAYSNNSIAIPTNFTISVTTEILPVSMTKTSVDCTMYICGDSTECSNLLLQYGSFCTQLNRALTGIAVEQDKNTQEVFAQVKQIYKTPPIKDFGGFNFSQILPDPSKPSKRSFIEDLLFNKVTLADAGFIKQYGDCLGDIAARDLICAQKFNGLTVLPPLLTDEMIAQYCSALLAGTITSGWTFGAGAALQIPFAMQMAYRFNGIGVTQNVLYENQKLIANQFNSAIGKIQDSLSSTASALGKLQDVVNQNAQALNTLVKQLSSNFGAISSVLNDILSRLDKVEAEVQIDRLITGRLQSLQTYVTQQLIRAAEIRASANLAATKMSECVLGQSKRVDFCGKGYHLMSFPQCAPHGVVFLHVTYVPAQEKNFTTAPAICHDGKAHFPREGVFVSNGTHWFVTQRNFYEPQIITTDNTFVSGNCDVVIGIVNNTVYDPLQPELDSGGSGYIPEAPRDGQAYVRKDGEWVLLSTFL

SEQ ID NO: 10632 - protein, 1177 aa, Artificial Sequence
  SARS-CoV-2/USA/WA-UW292/2020__EPI_ISL_418077 spike protein (1-1147)(T874C_S1055C) Foldon construct
MFVFLVLLPLVSSQCVNLTTRTQLPPAYTNSFTRGVYYPDKVFRSSVLHSTQDLFLPFFSNVTWFHAIHVSGTNGTKRFDNPVLPFNDGVYFASTEKSNIIRGWIFGTTLDSKTQSLLIVNNATNVVIKVCEFQFCNDPFLGVYYHKNNKSWMESEFRVYSSANNCTFEYVSQPFLMDLEGKQGNFKNLREFVFKNIDGYFKIYSKHTPINLVRDLPQGFSALEPLVDLPIGINITRFQTLLALHRSYLTPGDSSSGWTAGAAAYYVGYLQPRTFLLKYNENGTITDAVDCALDPLSETKCTLKSFTVEKGIYQTSNFRVQPTESIVRFPNITNLCPFGEVFNATRFASVYAWNRKRISNCVADYSVLYNSASFSTFKCYGVSPTKLNDLCFTNVYADSFVIRGDEVRQIAPGQTGKIADYNYKLPDDFTGCVIAWNSNNLDSKVGGNYNYLYRLFRKSNLKPFERDISTEIYQASSTPCNGVEGFNCYFPLQSYGFQPTNGVGYQPYRVVVLSFELLHAPATVCGPKKSTNLVKNKCVNFNFNGLTGTGVLTESNKKFLPFQQFGRDIADTTDAVRDPQTLEILDITPCSFGGVSVITPGTNTSNQVAVLYQDVNCTEVPVAIHADQLTPTWRVYSTGSNVFQTRAGCLIGAEHVNNSYECDIPIGAGICASYQTQTNSPRRARSVASQSIIAYTMSLGAENSVAYSNNSIAIPTNFTISVTTEILPVSMTKTSVDCTMYICGDSTECSNLLLQYGSFCTQLNRALTGIAVEQDKNTQEVFAQVKQIYKTPPIKDFGGFNFSQILPDPSKPSKRSFIEDLLFNKVTLADAGFIKQYGDCLGDIAARDLICAQKFNGLTVLPPLLTDEMIAQYCSALLAGTITSGWTFGAGAALQIPFAMQMAYRFNGIGVTQNVLYENQKLIANQFNSAIGKIQDSLSSTASALGKLQDVVNQNAQALNTLVKQLSSNFGAISSVLNDILSRLDKVEAEVQIDRLITGRLQSLQTYVTQQLIRAAEIRASANLAATKMSECVLGQSKRVDFCGKGYHLMSFPQCAPHGVVFLHVTYVPAQEKNFTTAPAICHDGKAHFPREGVFVSNGTHWFVTQRNFYEPQIITTDNTFVSGNCDVVIGIVNNTVYDPLQPELDSGGSGYIPEAPRDGQAYVRKDGEWVLLSTFL

SEQ ID NO: 10633 - protein, 1177 aa, Artificial Sequence
  SARS-CoV-2/Iceland/192/2020__EPI_ISL_417819 spike protein (1-1147)(T874C_S1055C) Foldon construct
MFVFFVLLPLVSSQCVNLTTRTQLPPAYTNSFTRGVYYPDKVFRSSVLHSTQDLFLPFFSNVTWFHAIHVSGTNGTKRFDNPVLPFNDGVYFASTEKSNIIRGWIFGTTLDSKTQSLLIVNNATNVVIKVCEFQFCNDPFLGVYYHKNNKSWMESEFRVYSSANNCTFEYVSQPFLMDLEGKQGNFKNLREFVFKNIDGYFKIYSKHTPINLVRDLPQGFSALEPLVDLPIGINITRFQTLLALHRSYLTPGDSSSGWTAGAAAYYVGYLQPRTFLLKYNENGTITDAVDCALDPLSETKCTLKSFTVEKGIYQTSNFRVQPTESIVRFPNITNLCPFGEVFNATRFASVYAWNRKRISNCVADYSVLYNSASFSTFKCYGVSPTKLNDLCFTNVYADSFVIRGDEVRQIAPGQTGKIADYNYKLPDDFTGCVIAWNSNNLDSKVGGNYNYLYRLFRKSNLKPFERDISTEIYQAGSTPCNGVEGFNCYFPLQSYGFQPTNGVGYQPYRVVVLSFELLHAPATVCGPKKSTNLVKNKCVNFNFNGLTGTGVLTESNKKFLPFQQFGRDIADTTDAVRDPQTLEILDITPCSFGGVSVITPGTNTSNQVAVLYQGVNCTEVPVAIHADQLTPTWRVYSTGSNVFQTRAGCLIGAEHVNNSYECDIPIGAGICASYQTQTNSPRRARSVASQSIIAYTMSLGAENSVAYSNNSIAIPTNFTISVTTEILPVSMTKTSVDCTMYICGDSTECSNLLLQYGSFCTQLNRALTGIAVEQDKNTQEVFAQVKQIYKTPPIKDFGGFNFSQILPDPSKPSKRSFIEDLLFNKVTLADAGFIKQYGDCLGDIAARDLICAQKFNGLTVLPPLLTDEMIAQYCSALLAGTITSGWTFGAGAALQIPFAMQMAYRFNGIGVTQNVLYENQKLIANQFNSAIGKIQDSLSSTASALGKLQDVVNQNAQALNTLVKQLSSNFGAISSVLNDILSRLDKVEAEVQIDRLITGRLQSLQTYVTQQLIRAAEIRASANLAATKMSECVLGQSKRVDFCGKGYHLMSFPQCAPHGVVFLHVTYVPAQEKNFTTAPAICHDGKAHFPREGVFVSNGTHWFVTQRNFYEPQIITTDNTFVSGNCDVVIGIVNNTVYDPLQPELDSGGSGYIPEAPRDGQAYVRKDGEWVLLSTFL

SEQ ID NO: 10634 - protein, 1177 aa, Artificial Sequence
  SARS-CoV-2/Belgium/ULG-6939/2020__EPI_ISL_417020 spike protein (1-1147)(T874C_S1055C) Foldon construct
MFVFLVLLPLVSSQCVNLTTRTQLPPAYTNSFTRGVYYPDKVFRSSVLHSTQDLFLPFFSNVTWFHAIHVSGTNGTKRFDNPVLPFNDGVYFASTEKSNIIRGWIFGTTLDSKTQSLLIVNNATNVVIKVCEFQFCNDPFLGVYYHKNNKSWMESEFRVYSSANNCTFEYVSQPFLMDLEGKQGNFKNLREFVFKNIDGYFKIYSKHTPINLVRDLPQGFSALEPLVDLPIGINITRFQTLLALHRSYLTPGDSSSGWTAGAAAYYVGYLQPRTFLLKYNENGTITDAVDCALDPLSETKCTLKSFTVEKGIYQTSNFRVQPTESIVRFPNITNLCPFGEVFNATRFASVYAWNRKRISNCVADYSVLYNSASFSTFKCYGVSPTKLNDLCFTNVYADSFVIRGDEVRQIAPGQTGKIADYNYKLPDDFTGCVIAWNSNNLDSKVGGNYNYLYRLFRKSNLKPFERDISTEIYQAGSTPCNGVEGFNCYFPLQSYGFQPTNGVGYQPYRVVVLSFELLHAPATVCGPKKSTNLVKNKCVNFNFNGLTGTGVLTESNKKFLPFQQFGRDIADTTDAVRDPQTLEILDITPCSFGGVSVITPGTNTSNQVAVLYQGVNCTEVPVAIHADQLTPTWRVYSTGSNVFQTRAGCLIGAEHVNNSYECDIPIGAGICASYQTQTNSPRRARSVASQSIIAYTMSLGAENSVVYSNNSIAIPTNFTISVTTEILPVSMTKTSVDCTMYICGDSTECSNLLLQYGSFCTQLNRALTGIAVEQDKNTQEVFAQVKQIYKTPPIKDFGGFNFSQILPDPSKPSKRSFIEDLLFNKVTLADAGFIKQYGDCLGDIAARDLICAQKFNGLTVLPPLLTDEMIAQYCSALLAGTITSGWTFGAGAALQIPFAMQMAYRFNGIGVTQNVLYENQKLIANQFNSAIGKIQDSLSSTASALGKLQDVVNQNAQALNTLVKQLSSNFGAISSVLNDILSRLDKVEAEVQIDRLITGRLQSLQTYVTQQLIRAAEIRASANLAATKMSECVLGQSKRVDFCGKGYHLMSFPQCAPHGVVFLHVTYVPAQEKNFTTAPAICHDGKAHFPREGVFVSNGTHWFVTQRNFYEPQIITTDNTFVSGNCDVVIGIVNNTVYDPLQPELDSGGSGYIPEAPRDGQAYVRKDGEWVLLSTFL

SEQ ID NO: 10635 - protein, 1177 aa, Artificial Sequence
  SARS-CoV-2/France/HF2496/2020__EPI_ISL_418231 spike protein (1-1147)(T874C_S1055C) Foldon construct
MFVFLVLLPLVSSQCVNLTTRTQLPPAYTNSFTRGVYYPDKVFRSSVLHSTQDLFLPFFSNVTWFHAIHVSGTNGTKRFDNPVLPFNDGVYFASTEKSNIIRGWIFGTTLDSKTQSLLIVNNATNVVIKVCEFQFCNDPFLGVYYHKNNKSWMESEFRVYSSANNCTFEYVSQPFLMDLEGKQGNFKNLREFVFKNIDGYFKIYSKHTPINLVRDLPQGFSALEPLVDLPIGINITRFQTLLALHRSYLTPGDSSSGWTAGAAAYYVGYLQPRTFLLKYNENGTITDAVDCALDPLSETKCTLKSFTVEKGIYQTSNFRVQPTESIVRFPNITNLCPFGEVFNATRFASVYAWNRKRISNCVADYSVLYNSASFSTFKCYGVSPTKLNDLCFTNVYADSFVIRGDEVRQIAPGQTGKIADYNYKLPDDFTGCVIAWNSNNLDSKVGGNYNYLYRLFRKSNLKPFERDISTEIYQAGSTPCNGVEGFNCYFPLQSYGFQPTNGVGYQPYRVVVLSFELLHAPATVCGPKKSTNLVKNKCVNFNFNGLTGTGVLTESNKKFLPFQQFGRDIADTTDAVRDPQTLEILDITPCSFGGVSVITPGTNTSNQVAVLYQGVNCTEVPVAIHADQLTPTWRVYSTGSNVFQTRAGCLIGAEHVNNSYECDIPIGAGICASYQTQTNSPRRARSVASQSIIAYTMSLGAENSVAYSNNSIAIPTNFTISVTTEILPVSMTKTSVDCTMYICGDSTECSNLLLQYGSFCTQLNRALTGIAVEQDKNTQEVFAQVKQIYKTPPIKDFGGFNFSQILPDPSKPSKRSFIEDLLFNKVTLADAGFIKQYGDCLGDIVARDLICAQKFNGLTVLPPLLTDEMIAQYCSALLAGTITSGWTFGAGAALQIPFAMQMAYRFNGIGVTQNVLYENQKLIANQFNSAIGKIQDSLSSTASALGKLQDVVNQNAQALNTLVKQLSSNFGAISSVLNDILSRLDKVEAEVQIDRLITGRLQSLQTYVTQQLIRAAEIRASANLAATKMSECVLGQSKRVDFCGKGYHLMSFPQCAPHGVVFLHVTYVPAQEKNFTTAPAICHDGKAHFPREGVFVSNGTHWFVTQRNFYEPQIITTDNTFVSGNCDVVIGIVNNTVYDPLQPELDSGGSGYIPEAPRDGQAYVRKDGEWVLLSTFL

SEQ ID NO: 10636 - protein, 1177 aa, Artificial Sequence
  SARS-CoV-2/USA/WA-UW291/2020__EPI_ISL_418076 spike protein (1-1147)(T874C_S1055C) Foldon construct
MFVFLVLLPLVSSQCVNLTTRTQLPPAYTNSFTRGVYYPDKVFRSSVLHSTQDLFLPFFSNVTWFHAIHVSGTNGTKRFDNPVLPFNDGVYFASTEKSNIIRGWIFGTTLDSKTQSLLIVNNATNVVIKVCEFQFCNDPFLGVYYHKNNKSWMESEFRVYSSANNCTFEYVSQPFLMDLEGKQGNFKNLREFVFKNIDGYFKIYSKHTPINLVRDLPQGFSALEPLVDLPIGINITRFQTLLALHRSYLTPGDSSSGWTAGAAAYYVGYLQPRTFLLKYNENGTITDAVDCALDPLSETKCTLKSFTVEKGIYQTSNFRVQPTESIVRFPNITNLCPFGEVFNATRFASVYAWNRKRISNCVADYSVLYNSASFSTFKCYGVSPTKLNDLCFTNVYADSFVIRGDEVRQIAPGQTGKIADYNYKLPDDFTGCVIAWNSNNLDSKVGGNYNYLYRLFRKSNLKPFERDISTEIYQAGSTPCNGVEGFNCYFPLQSYGFQPTNGVGYQPYRVVVLSFELLHAPATVCGPKKSTNLVKNKCVNFNFNGLTGTGVLTESNKKFLPFQQFGRDIADTTDAVRDPQTLEILDITPCSFGGVSVITPGTNTSNQVAVLYQGVNCTEVPVAIHADQLTPTWRVYSTGSNVFQTRAGCLIGAEHVNNSYECDIPIGAGICASYQTQTNSPRRARSVASQSIIAYTMSLGAENSVAYSNNSIAIPTNFTISVTTEILPVSMTKTSVDCTMYICGDSTECSNLLLQYGSFCTQLNRALTGIAVEQDKNTQEVFAQVKQIYKTPPIKDFGGFNFSQILPDPSKPSKRSFIEDLLFNKVTLADAGFIKQYGDCLGDIAARDLICAQKFNGLTVLPPLLTDEMIAQYCSALLAGTITSGWTFGAGAALQIPFAMQMAYRFNGIGVTQNVLYENQKLIANQFNSAIGKIQYSLSSTASALGKLQDVVNQNAQALNTLVKQLSSNFGAISSVLNDILSRLDKVEAEVQIDRLITGRLQSLQTYVTQQLIRAAEIRASANLAATKMSECVLGQSKRVDFCGKGYHLMSFPQCAPHGVVFLHVTYVPAQEKNFTTAPAICHDGKAHFPREGVFVSNGTHWFVTQRNFYEPQIITTDNTFVSGNCDVVIGIVNNTVYDPLQPELDSGGSGYIPEAPRDGQAYVRKDGEWVLLSTFL

SEQ ID NO: 10637 - protein, 1177 aa, Artificial Sequence; identical to SEQ ID NO: 10600
  SARS-CoV-2/Portugal/PT0034/2020__EPI_ISL_418019 spike protein (1-1147)(T874C_S1055C) Foldon construct

SEQ ID NO: 10638 - protein, 1177 aa, Artificial Sequence; identical to SEQ ID NO: 10592
  SARS-CoV-2/Iceland/202/2020__EPI_ISL_417750 spike protein (1-1147)(T874C_S1055C) Foldon construct

SEQ ID NO: 10639 - protein, 1177 aa, Artificial Sequence
  SARS-CoV-2/USA/WA-UW261/2020__EPI_ISL_418046 spike protein (1-1147)(T874C_S1055C) Foldon construct
MFVFLVLLPLVSSQCVNLTTRTQLPPAYTNSFTRGVYYPDKVFRSSVLHSTQDLFLPFFSNVTWFHAIHVSGTNGTKRFDNPVLPFNDGVYFASTEKSNIIRGWIFGTTLDSKTQSLLIVNNATNVVIKVCEFQFCNDPFLGVYYHKNNKSWMESEFRVYSSANNCTFEYVSQPFLMDLEGKQGNFKNLREFVFKNIDGYFKIYSKHTPINLVRDLPQGFSALEPLVDLPIGINITRFQTLLALHRSYLTPGDSSSGWTAGAAAYYVGYLQPRTFLLKYNENGTITDAVDCALDPLSETKCTLKSFTVEKGIYQTSNFRVQPTESIVRFPNITNLCPFGEVFNATRFTSVYAWNRKRISNCVADYSVLYNSASFSTFKCYGVSPTKLNDLCFTNVYADSFVIRGDEVRQIAPGQTGKIADYNYKLPDDFTGCVIAWNSNNLDSKVGGNYNYLYRLFRKSNLKPFERDISTEIYQAGSTPCNGVEGFNCYFPLQSYGFQPTNGVGYQPYRVVVLSFELLHAPATVCGPKKSTNLVKNKCVNFNFNGLTGTGVLTESNKKFLPFQQFGRDIADTTDAVRDPQTLEILDITPCSFGGVSVITPGTNTSNQVAVLYQDVNCTEVPVAIHADQLTPTWRVYSTGSNVFQTRAGCLIGAEHVNNSYECDIPIGAGICASYQTQTNSPRRARSVASQSIIAYTMSLGAENSVAYSNNSIAIPTNFTISVTTEILPVSMTKTSVDCTMYICGDSTECSNLLLQYGSFCTQLNRALTGIAVEQDKNTQEVFAQVKQIYKTPPIKDFGGFNFSQILPDPSKPSKRSFIEDLLFNKVTLADAGFIKQYGDCLGDIAARDLICAQKFNGLTVLPPLLTDEMIAQYCSALLAGTITSGWTFGAGAALQIPFAMQMAYRFNGIGVTQNVLYENQKLIANQFNSAIGKIQDSLSSTASALGKLQDVVNQNAQALNTLVKQLSSNFGAISSVLNDILSRLDKVEAEVQIDRLITGRLQSLQTYVTQQLIRAAEIRASANLAATKMSECVLGQSKRVDFCGKGYHLMSFPQCAPHGVVFLHVTYVPAQEKNFTTAPAICHDGKAHFPREGVFVSNGTHWFVTQRNFYEPQIITTDNTFVSGNCDVVIGIVNNTVYDPLQPELDSGGSGYIPEAPRDGQAYVRKDGEWVLLSTFL

SEQ ID NO: 10640 - protein, 1177 aa, Artificial Sequence
  SARS-CoV-2/Portugal/PT0035/2020__EPI_ISL_418020 spike protein (1-1147)(T874C_S1055C) Foldon construct
MFVFLVLLPLVSSQCVNLTTRTQLPPAYTNSFTRGVYYPDKVFRSSVLHSTQDLFLPFFSNVTWFHAIHVSGTNGTKRFDNPVLPFNDGVYFASTEKSNIIRGWIFGTTLDSKTQSLLIVNNATNVVIKVCEFQFCNDPFLGVYYHKNNKSWMESEFRVYSSANNCTFEYVSQPFLMDLEGKQGNFKNLREFVFKNIDGYFKIYSKHTPINLVRDLPQGFSALEPLVDLPIGINITRFQTLLALHRSYLTPGDSSSGWTAGAAAYYVGYLQPRTFLLKYNENGTITDAVDCALDPLSETKCTLKSFTVEKGIYQTSNFRVQPTESIVRFPNITNLCPFGEVFNATRFASVYAWNRKRISNCVADYSVLYNSASFSTFKCYGVSPTKLNDLCFTNVYADSFVIRGDEVRQIAPGQTGKIADYNYKLPDDFTGCVIAWNSNNLDSKVGGNYNYLYRLFRKSNLKPFERDISTEIYQAGSTPCNGVEGFNCYFPLQSYGFQPTNGVGYQPYRVVVLSFELLHAPATVCGPKKSTNLVKNKCVNFNFNGLTGTGVLTESNKKFLPFQQFGRDIADTTDAVRDPQTLEILDITPCSFGGVSVITPGTNTSNQVAVLYQDVNCTEVPVAIHADQLTPTWRVYSTGSNVFQTRAGCLIGAEHVNNSYECDIPIGAGICASYQTQTNSPRRARSVASQSIIAYTMSLGAENSVAYSNNSIAIPTNFTISVTTEILPVSMTKTSVDCTMYICGDSTECSNLLLQYGSFCTQLNRALTGIAVEQDKNTQEVFAQVKQIYKTPPIKDFGGFNFSQILPDPSKPSKRSFIEDLLFNKVTLADAGFIKQYGDCLGDISARDLICAQKFNGLTVLPPLLTDEMIAQYCSALLAGTITSGWTFGAGAALQIPFAMQMAYRFNGIGVTQNVLYENQKLIANQFNSAIGKIQDSLSSTASALGKLQDVVNQNAQALNTLVKQLSSNFGAISSVLNDILSRLDKVEAEVQIDRLITGRLQSLQTYVTQQLIRAAEIRASANLAATKMSECVLGQSKRVDFCGKGYHLMSFPQCAPHGVVFLHVTYVPAQEKNFTTAPAICHDGKAHFPREGVFVSNGTHWFVTQRNFYEPQIITTDNTFVSGNCDVVIGIVNNTVYDPLQPELDSGGSGYIPEAPRDGQAYVRKDGEWVLLSTFL

SEQ ID NO: 10641 - protein, 1177 aa, Artificial Sequence
  SARS-CoV-2/USA/NY-NYUMC7/2020__EPI_ISL_418192 spike protein (1-1147)(T874C_S1055C) Foldon construct
MFVFLVLLPLVSSQCVNLTTRTQLPPAYTNSFTRGVYYPDKVFRSSVLHSTQDLFLPFFSNVTWFHAIHVSGTNGTKRFDNPVLPFNDGVYFASTEKSNIIRGWIFGTTLDSKTQSLLIVNNATNVVIKVCEFQFCNDPFLGVYHHKNNKSWMESEFRVYSSANNCTFEYVSQPFLMDLEGKQGNFKNLREFVFKNIDGYFKIYSKHTPINLVRDLPQGFSALEPLVDLPIGINITRFQTLLALHRSYLTPGDSSSGWTAGAAAYYVGYLQPRTFLLKYNENGTITDAVDCALDPLSETKCTLKSFTVEKGIYQTSNFRVQPTESIVRFPNITNLCPFGEVFNATRFASVYAWNRKRISNCVADYSVLYNSASFSTFKCYGVSPTKLNDLCFTNVYADSFVIRGDEVRQIAPGQTGKIADYNYKLPDDFTGCVIAWNSNNLDSKVGGNYNYLYRLFRKSNLKPFERDISTEIYQAGSTPCNGVEGFNCYFPLQSYGFQPTNGVGYQPYRVVVLSFELLHAPATVCGPKKSTNLVKNKCVNFNFNGLTGTGVLTESNKKFLPFQQFGRDIADTTDAVRDPQTLEILDITPCSFGGVSVITPGTNTSNQVAVLYQGVNCTEVPVAIHADQLTPTWRVYSTGSNVFQTRAGCLIGAEHVNNSYECDIPIGAGICASYQTQTNSPRRARSVASQSIIAYTMSLGAENSVAYSNNSIAIPTNFTISVTTEILPVSMTKTSVDCTMYICGDSTECSNLLLQYGSFCTQLNRALTGIAVEQDKNTQEVFAQVKQIYKTPPIKDFGGFNFSQILPDPSKPSKRSFIEDLLFNKVTLADAGFIKQYGDCLGDIAARDLICAQKFNGLTVLPPLLTDEMIAQYCSALLAGTITSGWTFGAGAALQIPFAMQMAYRFNGIGVTQNVLYENQKLIANQFNSAIGKIQDSLSSTASALGKLQDVVNQNAQALNTLVKQLSSNFGAISSVLNDILSRLDKVEAEVQIDRLITGRLQSLQTYVTQQLIRAAEIRASANLAATKMSECVLGQSKRVDFCGKGYHLMSFPQCAPHGVVFLHVTYVPAQEKNFTTAPAICHDGKAHFPREGVFVSNGTHWFVTQRNFYEPQIITTDNTFVSGNCDVVIGIVNNTVYDPLQPELDSGGSGYIPEAPRDGQAYVRKDGEWVLLSTFL

SEQ ID NO: 10642 - protein, 1177 aa, Artificial Sequence
  SARS-CoV-2/Iceland/189/2020__EPI_ISL_417709 spike protein (1-1147)(T874C_S1055C) Foldon construct
MFVFLVLLPLVSSQCVNLTTRTQLPPAYTNSFTRGVYYPDKVFRSSVLHSTQDLFLPFFSNVTWFHAIHVSGTNGTKRFDNPVLPFNDGVYFASTEKSNIIRGWIFGTTLDSKTQSLLIVNNATNVVIKVCEFQFCNDPFLGVYYHKNNKSWMESEFRVYSSANNCTFEYVSQPFLMDLEGKQGNFKNLREFVFKNIDGYFKIYSKHTPINLVRDLPQGFSALEPLVDLPIGINITRFQTLLALHRSYLTPGDSSSGWTAGAAAYYVGYLQPRTFLLKYNENGTITDAVDCALDPLSETKCTLKSFTVEKGIYQTSNFRVQPTESIVRFPNITNLCPFGEVFNATRFASVYAWNRKRISNCVADYSVLYNSASFSTFKCYGVSPTKLNDLCFTNVYADSFVIRGDEVRQIAPGQTGKIADYNYKLPDDFTGCVIAWNSNNLDSKVGGNYNYLYRLFRKSNLKPFERDISTEIYQAGSTPCNGVEGFNCYFPLQSYGFQPTNGVGYQPYRVVVLSFELLHAPATVCGPKKSTNLVKNKCVNFNFNGLTGTGVLTESNKKFLPFQQFGRDIADTTDAVRDPQTLEILDITPCSFGGVSVITPGTNTSNQVAVLYQGVNCTEVPVAIHADQLTPTWRVYSTGSNVFQTRAGCLIGAEHVNNSYECDIPIGAGICASYQTQTNSPRRARSVASQSIIAYTMSLGAENSVAYSNNSIAIPTNFTISVTTEILPVSMTKTSVDCTMYICGDSTECSNLLLQYGSFCTQLNRALTGIAVEQDKNTQEVFAQVKQIYKTPPIKDFGGFNFSQILPDPSKPSKRSFIEDLLFNKVTLADAGFTKQYGDCLGDIAARDLICAQKFNGLTVLPPLLTDEMIAQYCSALLAGTITSGWTFGAGAALQIPFAMQMAYRFNGIGVTQNVLYENQKLIANQFNSAIGKIQDSLSSTASALGKLQDVVNQNAQALNTLVKQLSSNFGAISSVLNDILSRLDKVEAEVQIDRLITGRLQSLQTYVTQQLIRAAEIRASANLAATKMSECVLGQSKRVDFCGKGYHLMSFPQCAPHGVVFLHVTYVPAQEKNFTTAPAICHDGKAHFPREGVFVSNGTHWFVTQRNFYEPQIITTDNTFVSGNCDVVIGIVNNTVYDPLQPELDSGGSGYIPEAPRDGQAYVRKDGEWVLLSTFL

SEQ ID NO: 10643 - protein, 1177 aa, Artificial Sequence
  SARS-CoV-2/Australia/NSW56/2020__EPI_ISL_417408 spike protein (1-1147)(T874C_S1055C) Foldon construct
MFVFLVLLPLVSSQCVNLTTRTQLPPAYTNSFTRGVYYPDKVFRSSVLHSTQDLFLPFFSNVTWFHAIHVSGTNGTKRFDNPVLPFNDGVYFASTEKSNIIRGWIFGTTLDSKTQSLLIVNNATNVVIKVCEFQFCNDPFLGVYYHKNNKSWMESEFRVYSSANNCTFEYVSQPFLMDLEGKQGNFKNLREFVFKNIDGYFKIYSKHTPINLVRDLPQGFSALEPLVDLPIGINITRFQTLLALHRSYLTPGDSSSGWTAGAAAYYVGYLQPRTFLLKYNENGTITDAVDCALDPLSETKCTLKSFTVEKGIYQTSNFRVQPTESIVRFPNITNLCPFGEVFNATRFASVYAWNRKRISNCVADYSVLYNSASFSTFKCYGVSPTKLNDLCFTNVYADSFVIRGDEVRQIAPGQTGKIADYNYKLPDDFTGCVIAWNSNNLDSKVGGNYNYLYRLFRKSNLKPFERDISTEIYQAGSTPCNGVEGFNCYFPLQSYGFQPTNGVGYQPYRVVVLSFELLHAPATVCGPKKSTNLVKNKCVNFNFNGLTGTGVLTESNKKFLPFQQFGRDIADTTDAVRDPQTLEILDITPCSFGGVSVITPGTNTSNQVAVLYQDVNCTEVPVAIHADQLTPTWRVYSTGSNVFQTRAGCLIGAEHVNNSYECDIPIGAGICASYQTQTNSPRRARSVASQSIIAYTMSLGAENSVAYSNNSIAIPTNFTISVTTEILPVSMTKTSVDCTMYICGDSTECSNLLLQYGSFCTQLNRALTGIAVEQDKNTQEVFAQVKQIYKTPPIKDFGGFNFSQILPDSSKPSKRSFIEDLLFNKVTLADAGFIKQYGDCLGDIAARDLICAQKFNGLTVLPPLLTDEMIAQYCSALLAGTITSGWTFGAGAALQIPFAMQMAYRFNGIGVTQNVLYENQKLIANQFNSAIGKIQDSLSSTASALGKLQDVVNQNAQALNTLVKQLSSNFGAISSVLNDILSRLDKVEAEVQIDRLITGRLQSLQTYVTQQLIRAAEIRASANLAATKMSECVLGQSKRVDFCGKGYHLMSFPQCAPHGVVFLHVTYVPAQEKNFTTAPAICHDGKAHFPREGVFVSNGTHWFVTQRNFYEPQIITTDNTFVSGNCDVVIGIVNNTVYDPLQPELDSGGSGYIPEAPRDGQAYVRKDGEWVLLSTFL

SEQ ID NO: 10644 - protein, 1177 aa, Artificial Sequence
  SARS-CoV-2/Iceland/280/2020__EPI_ISL_417608 spike protein (1-1147)(T874C_S1055C) Foldon construct
MFVFLVLLPLVSSQCVNLTTRTQLPPAYTNSFTRGVYYPDKVFRSSVLHSTQDLFLPFFSNVTWFHAIHVSGTNGTKRFDNPVLPFNDGVYFASTEKSNIIRGWIFGTTLDSKTQSLLIVNNATNVVIKVCEFQFCNDPFLGVYYHKNNKSWMESEFRVYSSANNCTFEYVSQPFLMDLEGKQGNFKNLREFVFKNIDGYFKIYSKHTPINLVRDLPQGFSALEPLVDLPIGINITRFQTLLALHRSYLTPGDSSSGWTAGAAAYYVGYLQPRTFLLKYNENGTITDAVDCALDPLSETKCTLKSFTVEKGIYQTSNFRVQPTESIVRFPNITNLCPFGEVFNATRFASVYAWNRKRISNCVADYSVLYNSASFSTFKCYGVSPTKLNDLCFTNVYADSFVIRGDEVRQIAPGQTGKIADYNYKLPDDFTGCVIAWNSNNLDSKVGGNYNYLYRLFRKSNLKPFERDISTEIYQAGSTPCNGVEGFNCYFPLQSYGFQPTNGVGYQPYRVVVLSFELLHAPATVCGPKKSTNLVKNKCVNFNFNGLTGTGVLTESNKKFLPFQQFGRDIADTTDAVRDPQTLEILDITPCSFGGVSVITPGTNTSNQVAVLYQGVNCTEVPVAIHADQLTPTWRVYSTGSNVFQTRAGCLIGAEHVNNSYECDIPIGAGICASYHTQTNSPRRARSVASQSIIAYTMSLGAENSVAYSNNSIAIPTNFTISVTTEILPVSMTKTSVDCTMYICGDSTECSNLLLQYGSFCTQLNRALTGIAVEQDKNTQEVFAQVKQIYKTPPIKDFGGFNFSQILPDPSKPSKRSFIEDLLFNKVTLADAGFIKQYGDCLGDIAARDLICAQKFNGLTVLPPLLTDEMIAQYCSALLAGTITSGWTFGAGAALQIPFAMQMAYRFNGIGVTQNVLYENQKLIANQFNSAIGKIQDSLSSTASALGKLQDVVNQNAQALNTLVKQLSSNFGAISSVLNDILSRLDKVEAEVQIDRLITGRLQSLQTYVTQQLIRAAEIRASANLAATKMSECVLGQSKRVDFCGKGYHLMSFPQCAPHGVVFLHVTYVPAQEKNFTTAPAICHDGKAHFPREGVFVSNGTHWFVTQRNFYEPQIITTDNTFVSGNCDVVIGIVNNTVYDPLQPELDSGGSGYIPEAPRDGQAYVRKDGEWVLLSTFL

SEQ ID NO: 10645 - protein, 1177 aa, Artificial Sequence; identical to SEQ ID NO: 10600
  SARS-CoV-2/Iceland/247/2020__EPI_ISL_417575 spike protein (1-1147)(T874C_S1055C) Foldon construct

SEQ ID NO: 10646 - protein, 1177 aa, Artificial Sequence
  SARS-CoV-2/Iceland/238/2020__EPI_ISL_417566 spike protein (1-1147)(T874C_S1055C) Foldon construct
MFVFLVLLPLVSSQCVNLTTRTQLPPAYTNSFTRGVYYPDKVFRSSVLHSTQDLFLPFFSNVTWFHAIHVSGTNGTKRFDNPVLPFNDGVYFASTEKSNIIRGWIFGTTLDSKTQSLLIVNNATNVVIKVCEFQFCNDPFLGVYYHKNNKSWMESEFRVYSSANNCTFEYVSQPFLMDLEGKQGNFKNLREFVFKNIDGYFKIYSKHTPINLVRDLPQGFSALEPLVDLPIGINITRFQTLLALHRSYLTPGDSSSGWTAGAAAYYVGYLQPRTFLLKYNENGTITDAVDCALDPLSETKCTLKSFTVEKGIYQTSNFRVQPTESIVRFPNITNLCPFGEVFNATRFASVYAWNRKRISNCVADYSVLYNSASFSTFKCYGVSPTKLNDLCFTNVYADSFVIRGDEVRQIAPGQTGKIADYNYKLPDDFTGCVIAWNSNNLDSKVGGNYNYLYRLFRKSNLKPFERDISTEIYQAGSTPCNGVEGFNCYFPLQSYGFQPTNGVGYQPYRVVVLSFELLHAPATVCGPKKSTNLVKNKCVNFNFNGLTGTGVLTESNKKFLPFQQFGRDIADTTDAVRDPQTLEILDITPCSFGGVSVITPGTNTSNQVAVLYQGVNCTEVPVAIHADQLTPTWRVYSTGSNVFQTRAGCLIGAEHVNNSYECDIPIGAGICASYQTQTNSPRRARSVASQSIIAYTMSLGAENSVAYSNNSIAIPTNFTISVTTEILPVSMTKTSVDCTMYICGDSTECSNLLLQYGSFCTQLNRALTGIAVEQDKNTQEVFAQVKQIYKTPPIKDFGGFNFSQILPDPSKPSKRSFIEDLLFNKVTLADVGFIKQYGDCLGDIAARDLICAQKFNGLTVLPPLLTDEMIAQYCSALLAGTITSGWTFGAGAALQIPFAMQMAYRFNGIGVTQNVLYENQKLIANQFNSAIGKIQDSLSSTASALGKLQDVVNQNAQALNTLVKQLSSNFGAISSVLNDILSRLDKVEAEVQIDRLITGRLQSLQTYVTQQLIRAAEIRASANLAATKMSECVLGQSKRVDFCGKGYHLMSFPQCAPHGVVFLHVTYVPAQEKNFTTAPAICHDGKAHFPREGVFVSNGTHWFVTQRNFYEPQIITTDNTFVSGNCDVVIGIVNNTVYDPLQPELDSGGSGYIPEAPRDGQAYVRKDGEWVLLSTFL

SEQ ID NO: 10647 - protein, 1177 aa, Artificial Sequence
  SARS-CoV-2/Greece/16/2020__EPI_ISL_418265 spike protein (1-1147)(T874C_S1055C) Foldon construct
MFVFLVLLPLVSSQCVNLTTRTQLPPAYTNSFTRGVYYPDKVFRSSVLHSTQDLFLPFFSNVTWFHAIHVSGTNGTKRFDNPVLPFNDGVYFASTEKSNIIRGWIFGTTLDSKTQSLLIVNNATNVVIKVCEFQFCNDPFLGVYYHKNNKSWMESEFRVYSSANNCTFEYVSQPFLMDLEGKQGNFKNLREFVFKNVDGYFKIYSKHTPINLVRDLPQGFSALEPLVDLPIGINITRFQTLLALHRSYLTPGDSSSGWTAGAAAYYVGYLQPRTFLLKYNENGTITDAVDCALDPLSETKCTLKSFTVEKGIYQTSNFRVQPTESIVRFPNITNLCPFGEVFNATRFASVYAWNRKRISNCVADYSVLYNSASFSTFKCYGVSPTKLNDLCFTNVYADSFVIRGDEVRQIAPGQTGKIADYNYKLPDDFTGCVIAWNSNNLDSKVGGNYNYLYRLFRKSNLKPFERDISTEIYQAGSTPCNGVEGFNCYFPLQSYGFQPTNGVGYQPYRVVVLSFELLHAPATVCGPKKSTNLVKNKCVNFNFNGLTGTGVLTESNKKFLPFQQFGRDIADTTDAVRDPQTLEILDITPCSFGGVSVITPGTNTSNQVAVLYQDVNCTEVPVAIHADQLTPTWRVYSTGSNVFQTRAGCLIGAEHVNNSYECDIPIGAGICASYQTQTNSPRRARSVASQSIIAYTMSLGAENSVAYSNNSIAIPTNFTISVTTEILPVSMTKTSVDCTMYICGDSTECSNLLLQYGSFCTQLNRALTGIAVEQDKNTQEVFAQVKQIYKTPPIKDFGGFNFSQILPDPSKPSKRSFIEDLLFNKVTLADAGFIKQYGDCLGDIAARDLICAQKFNGLTVLPPLLTDEMIAQYCSALLAGTITSGWTFGAGAALQIPFAMQMAYRFNGIGVTQNVLYENQKLIANQFNSAIGKIQDSLSSTASALGKLQDVVNQNAQALNTLVKQLSSNFGAISSVLNDILSRLDKVEAEVQIDRLITGRLQSLQTYVTQQLIRAAEIRASANLAATKMSECVLGQSKRVDFCGKGYHLMSFPQCAPHGVVFLHVTYVPAQEKNFTTAPAICHDGKAHFPREGVFVSNGTHWFVTQRNFYEPQIITTDNTFVSGNCDVVIGIVNNTVYDPLQPELDSGGSGYIPEAPRDGQAYVRKDGEWVLLSTFL

SEQ ID NO: 10648 - protein, 1177 aa, Artificial Sequence
  SARS-CoV-2/Iceland/319/2020__EPI_ISL_417648 spike protein (1-1147)(T874C_S1055C) Foldon construct
MFVFLVLLPLVSSQCVNLTTRTQLPPAYTNSFTRGVYYPDKVFRSSVLHSTQDLFLPFFSNVTWFHAIHVSGTNGTKRFDNPVLPFNDGVYFASTEKSNIIRGWIFGTTLDSKTQSLLIVNNATNVVIKVCEFQFCNDPFLGVYYHKNNKSWMESEFRVYSSANNCTFEYVSQPFLIDLEGKQGNFKNLREFVFKNIDGYFKIYSKHTPINLVRDLPQGFSALEPLVDLPIGINITRFQTLLALHRSYLTPGDSSSGWTAGAAAYYVGYLQPRTFLLKYNENGTITDAVDCALDPLSETKCTLKSFTVEKGIYQTSNFRVQPTESIVRFPNITNLCPFGEVFNATRFASVYAWNRKRISNCVADYSVLYNSASFSTFKCYGVSPTKLNDLCFTNVYADSFVIRGDEVRQIAPGQTGKIADYNYKLPDDFTGCVIAWNSNNLDSKVGGNYNYLYRLFRKSNLKPFERDISTEIYQAGSTPCNGVEGFNCYFPLQSYGFQPTNGVGYQPYRVVVLSFELLHAPATVCGPKKSTNLVKNKCVNFNFNGLTGTGVLTESNKKFLPFQQFGRDIADTTDAVRDPQTLEILDITPCSFGGVSVITPGTNTSNQVAVLYQGVNCTEVPVAIHADQLTPTWRVYSTGSNVFQTRAGCLIGAEHVNNSYECDIPIGAGICASYQTQTNSPRRARSVASQSIIAYTMSLGAENSVAYSNNSIAIPTNFTISVTTEILPVSMTKTSVDCTMYICGDSTECSNLLLQYGSFCTQLNRALTGIAVEQDKNTQEVFAQVKQIYKTPPIKDFGGFNFSQILPDPSKPSKRSFIEDLLFNKVTLADAGFIKQYGDCLGDIAARDLICAQKFNGLTVLPPLLTDEMIAQYCSALLAGTITSGWTFGAGAALQIPFAMQMAYRFNGIGVTQNVLYENQKLIANQFNSAIGKIQDSLSSTASALGKLQDVVNQNAQALNTLVKQLSSNFGAISSVLNDILSRLDKVEAEVQIDRLITGRLQSLQTYVTQQLIRAAEIRASANLAATKMSECVLGQSKRVDFCGKGYHLMSFPQCAPHGVVFLHVTYVPAQEKNFTTAPAICHDGKAHFPREGVFVSNGTHWFVTQRNFYEPQIITTDNTFVSGNCDVVIGIVNNTVYDPLQPELDSGGSGYIPEAPRDGQAYVRKDGEWVLLSTFL

SEQ ID NO: 10649 - protein, 1177 aa, Artificial Sequence
  SARS-CoV-2/Congo/94/2020__EPI_ISL_417947 spike protein (1-1147)(T874C_S1055C) Foldon construct
MFVFLVLLPLVSSQCVNLTTRTQLPPAYTNSFTRGVYYPDKVFRSSVLHSTQDLFLPFFSNVTWFHAIHVSGTNGTKRFDNPVLPFNDGVYFASTEKSNIIRGWIFGTTLDSKTQSLLIVNNATNVVIKVCEFQFCNDPFLGVYYHKNNKSWMESEFRVYSSANNCTFEYVSQPFLMDLEGKQGNFKNLREFVFKNIDGYFKIYSKHTPINLVRDLPQGFSALEPLVDLPIGINITRFQTLLALHRSYLTPGDSSSGWTAGAAAYYVGYLQPRTFLLKYNENGTITDAVDCALDPLSETKCTLKSFTVEKGIYQTSNFRVQPTESIVRFPNITNLCPFGEVFNATRFASVYAWNRKRISNCVADYSVLYNSASFSTFKCYGVSPTKLNDLCFTNVYADSFVIRGDEVRQIAPGQTGKIADYNYKLPDDFTGCVIAWNSNNLDSKVGGNYNYLYRLFRKSNLKPFERDISTEIYQAGSTPCNGVEGFNCYFPLQSYGFQPTNGVGYQPYRVVVLSFELLHAPATVCGPKKSTNLVKNKCVNFNFNGLTGTGVLTESNKKFLPFQQFGRDIADTTDAVRDPQTLEILDITPCSFGGVSVITPGTNTSNQVAVLYQGVNCTEVPVAIHADQLTPTWRVYSTGSNVFQTRAGCLIGAEHVNNSYECDIPIGAGICASYQTQTNSPRRARSVASQSIIAYTMSLGAENSVAYSNNSIAIPTNFTISVTTEILPVSMTKTSVDCTMYICGDSTECSNLLLQYGSFCTQLNRALTGIAVEQDKNTQEVFAQVKQIYKTPPIKDFGGFNFSQILPDPSKPSKRSFIEDILFNKVTLADAGFIKQYGDCLGDIAARDLICAQKFNGLTVLPPLLTDEMIAQYCSALLAGTITSGWTFGAGAALQIPFAMQMAYRFNGIGVTQNVLYENQKLIANQFNSAIGKIQDSLSSTASALGKLQDVVNQNAQALNTLVKQLSSNFGAISSVLNDILSRLDKVEAEVQIDRLITGRLQSLQTYVTQQLIRAAEIRASANLAATKMSECVLGQSKRVDFCGKGYHLMSFPQCAPHGVVFLHVTYVPAQEKNFTTAPAICHDGKAHFPREGVFVSNGTHWFVTQRNFYEPQIITTDNTFVSGNCDVVIGIVNNTVYDPLQPELDSGGSGYIPEAPRDGQAYVRKDGEWVLLSTFL

SEQ ID NO: 10650 - protein, 1177 aa, Artificial Sequence
  SARS-CoV-2/Congo/158/2020__EPI_ISL_417950 spike protein (1-1147)(T874C_S1055C) Foldon construct
MFVFLVLLPLVSSQCVNLTTRTQLPPAYTNSFTRGVYYPDKVFRSSVLHSTQDLFLPFFSNVTWFHAIHVSGTNGTKRFDNPVLPFNDGVYFASTEKSNIIRGWIFGTTLDSKTQSLLIVNNATNVVIKVCEFQFCNDPFLGVYYHKNNKSWMESEFRVYSSANNCTFEYVSQPFLMDLEGKQGNFKNLREFVFKNIDGYFKIYSKHTPINLVRDLPQGFSALEPLVDLPIGINITRFQTLLALHRSYLTPGDSSSGWTAGAAAYYVGYLQPRTFLLKYNENGTITDAVDCALDPLSETKCTLKSFTVEKGIYQTSNFRVQPTESIVRFPNITNLCPFGEVFNATRFASVYAWNRKRISNCVADYSVLYNSASFSTFKCYGVSPTKLNDLCFTNVYADSFVIRGDEVRQIAPGQTGKIADYNYKLPDDFTGCVIAWNSNNLDSKVGGNYNYLYRLFRKSNLKPFERDISTEIYQAGSTPCNGVEGFNCYFPLQSYGFQPTNGVGYQPYRVVVLSFELLHAPATVCGPKKSTNLVKNKCVNFNFNGLTGTGVLTESNKKFLPFQQFGRDIADTTDAVRDPQTLEILDITPCSFGGVSVITPGTNTSNQVAVLYQDVNCTEVPVAIHADQLTPTWRVYSTGSNVFQTRAGCLIGAEHVNNSYECDIPIGAGICASYQTQTNSPRRARSVASQSIIAYTMSLGAENSVAYSNNSIAIPTNFTISVTTEILPVSMTKTSVDCTMYICGDSTECSNLLLQYGSFCTQLNRALTGIAVEQDKNTQEVFAQVKQIYKTPPIKDFGGFNFSQILPDPSKPSKRSFIEDLLFNKVTLADAGFIKQYGDCLGDIAARDLICAQKFNGLTVLPPLLTDEMIAQYCSALLAGTITSGWTFGAGAALQIPFAMQMAYRFNGIGVTQNVLYENQKLIANQFNSAIGKIQDSLSSTASALGKLQDVVNQNAQALNTLVKQLSSNFGAISSVLNDILSRLDKVEAEVQIDRLITGRLQSLQTYVTQQLIRAAEIRASANLAATKMSECVLGQSKRVDFCGKGYHLMSFPQCAPHGVVFLHVTYVPAQEKNFTTAPAICHDGKAHFPREGVFVSNGTHWFVTQRNFYEPQIITTDNTFLSGNCDVVIGIVNNTVYDPLQPELDSGGSGYIPEAPRDGQAYVRKDGEWVLLSTFL

SEQ ID NO: 10651 - protein, 1177 aa, Artificial Sequence
  SARS-CoV-2/USA/UT-00034/2020__EPI_ISL_417977 spike protein (1-1147)(T874C_S1055C) Foldon construct
MFVFLVLLPLVSSQCVNLTTRTQLPPAYTNSFTRGVYYPDKVFRSSVLHSTQDLFLPFFSNVTWFHAIHVSGTNGTKRFDNPVLPFNDGVYFASTEKSNIIRGWIFGTTLDSKTQSLLIVNNATNVVIKVCEFQFCNDPFLGVYYYKNNKSWMESEFRVYSSANNCTFEYVSQPFLMDLEGKQGNFKNLREFVFKNIDGYFKIYSKHTPINLVRDLPQGFSALEPLVDLPIGINITRFQTLLALHRSYLTPGDSSSGWTAGAAAYYVGYLQPRTFLLKYNENGTITDAVDCALDPLSETKCTLKSFTVEKGIYQTSNFRVQPTESIVRFPNITNLCPFGEVFNATRFASVYAWNRKRISNCVADYSVLYNSASFSTFKCYGVSPTKLNDLCFTNVYADSFVIRGDEVRQIAPGQTGKIADYNYKLPDDFTGCVIAWNSNNLDSKVGGNYNYLYRLFRKSNLKPFERDISTEIYQAGSTPCNGVEGFNCYFPLQSYGFQPTNGVGYQPYRVVVLSFELLHAPATVCGPKKSTNLVKNKCVNFNFNGLTGTGVLTESNKKFLPFQQFGRDIADTTDAVRDPQTLEILDITPCSFGGVSVITPGTNTSNQVAVLYQGVNCTEVPVAIHADQLTPTWRVYSTGSNVFQTRAGCLIGAEHVNNSYECDIPIGAGICASYQTQTNSPRRARSVASQSIIAYTMSLGAENSVAYSNNSIAIPTNFTISVTTEILPVSMTKTSVDCTMYICGDSTECSNLLLQYGSFCTQLNRALTGIAVEQDKNTQEVFAQVKQIYKTPPIKDFGGFNFSQILPDPSKPSKRSFIEDLLFNKVTLADAGFIKQYGDCLGDIAARDLICAQKFNGLTVLPPLLTDEMIAQYCSALLAGTITSGWTFGAGAALQIPFAMQMAYRFNGIGVTQNVLYENQKLIANQFNSAIGKIQDSLSSTASALGKLQDVVNQNAQALNTLVKQLSSNFGAISSVLNDILSRLDKVEAEVQIDRLITGRLQSLQTYVTQQLIRAAEIRASANLAATKMSECVLGQSKRVDFCGKGYHLMSFPQCAPHGVVFLHVTYVPAQEKNFTTAPAICHDGKAHFPREGVFVSNGTHWFVTQRNFYEPQIITTDNTFVSGNCDVVIGIVNNTVYDPLQPELDSGGSGYIPEAPRDGQAYVRKDGEWVLLSTFL

SEQ ID NO: 10652 - protein, 1177 aa, Artificial Sequence
  SARS-CoV-2/USA/UT-00033/2020__EPI_ISL_417976 spike protein (1-1147)(T874C_S1055C) Foldon construct
MFVFLVLLPLVSSQCVNLTTRTQLPPAYTNSFTRGVYYPDKVFRSSVLHSTQDLFLPFFSNVTWFHAIHVSGTNGTKRFDNPVLPFNDGVYFASTEKSNIIRGWIFGTTLDSKTQSLLIVNNATNVVIKVCEFQFCNDPFLGVYYHKNNKSWMESEFRVYSSANNCTFEYVSQPFLMDLEGKQGNFKNLREFVFKNIDGYFKIYSKHTPINLVRDLPQGFSALEPLVDLPIGINITRFQTLLALHRSYLTPGDSSSGLTAGAAAYYVGYLQPRTFLLKYNENGTITDAVDCALDPLSETKCTLKSFTVEKGIYQTSNFRVQPTESIVRFPNITNLCPFGEVFNATRFASVYAWNRKRISNCVADYSVLYNSASFSTFKCYGVSPTKLNDLCFTNVYADSFVIRGDEVRQIAPGQTGKIADYNYKLPDDFTGCVIAWNSNNLDSKVGGNYNYLYRLFRKSNLKPFERDISTEIYQAGSTPCNGVEGFNCYFPLQSYGFQPTNGVGYQPYRVVVLSFELLHAPATVCGPKKSTNLVKNKCVNFNFNGLTGTGVLTESNKKFLPFQQFGRDIADTTDAVRDPQTLEILDITPCSFGGVSVITPGTNTSNQVAVLYQGVNCTEVPVAIHADQLTPTWRVYSTGSNVFQTRAGCLIGAEHVNNSYECDIPIGAGICASYQTQTNSPRRARSVASQSIIAYTMSLGAENSVAYSNNSIAIPTNFTISVTTEILPVSMTKTSVDCTMYICGDSTECSNLLLQYGSFCTQLNRALTGIAVEQDKNTQEVFAQVKQIYKTPPIKDFGGFNFSQILPDPSKPSKRSFIEDLLFNKVTLADAGFIKQYGDCLGDIAARDLICAQKFNGLTVLPPLLTDEMIAQYCSALLAGTITSGWTFGAGAALQIPFAMQMAYRFNGIGVTQNVLYENQKLIANQFNSAIGKIQDSLSSTASALGKLQDVVNQNAQALNTLVKQLSSNFGAISSVLNDILSRLDKVEAEVQIDRLITGRLQSLQTYVTQQLIRAAEIRASANLAATKMSECVLGQSKRVDFCGKGYHLMSFPQCAPHGVVFLHVTYVPAQEKNFTTAPAICHDGKAHFPREGVFVSNGTHWFVTQRNFYEPQIITTDNTFVSGNCDVVIGIVNNTVYDPLQPELDSGGSGYIPEAPRDGQAYVRKDGEWVLLSTFL

SEQ ID NO: 10653 - protein, 1177 aa, Artificial Sequence
  SARS-CoV-2/USA/WI-13/2020__EPI_ISL_417516 spike protein (1-1147)(T874C_S1055C) Foldon construct
MFVFLVLLPLVSSQCVNLTTRTQLPPAYTNSFTRGVYYPDKVFRSSVLHSTQDLFLPFFSNVTWFHAIHVSGTNGTKRFDNPVLPFNDGVYFASTEKSNIIRGWIFGTTLDSKTQSLLIVNNATNVVIKVCEFQFCNDPFLGVYYHKNNKSWMESEFRVYSSANNCTFEYVSQPFLMDLEGKQGNFKNLREFVFKNIDGYFKIYSKHTPINLVRDLPQGFSALEPLVDLPIGINITRFQTLLALHRSYLTPGDSSSGWTAGAAAYYVGYLQPRTFLLKYNENGTITDAVDCALDPLSETKCTLKSFTVEKGIYQTSNFRVLPTESIVRFPNITNLCPFGEVFNATRFASVYAWNRKRISNCVADYSVLYNSASFSTFKCYGVSPTKLNDLCFTNVYADSFVIRGDEVRQIAPGQTGKIADYNYKLPDDFTGCVIAWNSNNLDSKVGGNYNYLYRLFRKSNLKPFERDISTEIYQAGSTPCNGVEGFNCYFPLQSYGFQPTNGVGYQPYRVVVLSFELLHAPATVCGPKKSTNLVKNKCVNFNFNGLTGTGVLTESNKKFLPFQQFGRDIADTTDAVRDPQTLEILDITPCSFGGVSVITPGTNTSNQVAVLYQGVNCTEVPVAIHADQLTPTWRVYSTGSNVFQTRAGCLIGAEHVNNSYECDIPIGAGICASYQTQTNSPRRARSVASQSIIAYTMSLGAENSVAYSNNSIAIPTNFTISVTTEILPVSMTKTSVDCTMYICGDSTECSNLLLQYGSFCTQLNRALTGIAVEQDKNTQEVFAQVKQIYKTPPIKDFGGFNFSQILPDPSKPSKRSFIEDLLFNKVTLADAGFIKQYGDCLGDIAARDLICAQKFNGLTVLPPLLTDEMIAQYCSALLAGTITSGWTFGAGAALQIPFAMQMAYRFNGIGVTQNVLYENQKLIANQFNSAIGKIQDSLSSTASALGKLQDVVNQNAQALNTLVKQLSSNFGAISSVLNDILSRLDKVEAEVQIDRLITGRLQSLQTYVTQQLIRAAEIRASANLAATKMSECVLGQSKRVDFCGKGYHLMSFPQCAPHGVVFLHVTYVPAQEKNFTTAPAICHDGKAHFPREGVFVSNGTHWFVTQRNFYEPQIITTDNTFVSGNCDVVIGIVNNTVYDPLQPELDSGGSGYIPEAPRDGQAYVRKDGEWVLLSTFL

SEQ ID NO: 10654 - protein, 1176 aa, Artificial Sequence
  SARS-CoV-2/India/1-27/2020__EPI_ISL_413522 spike protein (1-1146)(T873C_S1054C) Foldon construct
MFVFLVLLPLVSSQCVNLTTRTQLPPAYTNSFTRGVYYPDKVFRSSVLHSTQDLFLPFFSNVTWFHAIHVSGTNGTKRFDNPVLPFNDGVYFASTEKSNIIRGWIFGTTLDSKTQSLLIVNNATNVVIKVCEFQFCNDPFLGVYHKNNKSWMESEFRVYSSANNCTFEYVSQPFLMDLEGKQGNFKNLREFVFKNIDGYFKIYSKHTPINLVRDLPQGFSALEPLVDLPIGINITRFQTLLALHRSYLTPGDSSSGWTAGAAAYYVGYLQPRTFLLKYNENGTITDAVDCALDPLSETKCTLKSFTVEKGIYQTSNFRVQPTESIVRFPNITNLCPFGEVFNATRFASVYAWNRKRISNCVADYSVLYNSASFSTFKCYGVSPTKLNDLCFTNVYADSFVIRGDEVIQIAPGQTGKIADYNYKLPDDFTGCVIAWNSNNLDSKVGGNYNYLYRLFRKSNLKPFERDISTEIYQAGSTPCNGVEGFNCYFPLQSYGFQPTNGVGYQPYRVVVLSFELLHAPATVCGPKKSTNLVKNKCVNFNFNGLTGTGVLTESNKKFLPFQQFGRDIADTTDAVRDPQTLEILDITPCSFGGVSVITPGTNTSNQVAVLYQDVNCTEVPVAIHADQLTPTWRVYSTGSNVFQTRAGCLIGAEHVNNSYECDIPIGAGICASYQTQTNSPRRARSVASQSIIAYTMSLGAENSVAYSNNSIAIPTNFTISVTTEILPVSMTKTSVDCTMYICGDSTECSNLLLQYGSFCTQLNRALTGIAVEQDKNTQEVFAQVKQIYKTPPIKDFGGFNFSQILPDPSKPSKRSFIEDLLFNKVTLADAGFIKQYGDCLGDIAARDLICAQKFNGLTVLPPLLTDEMIAQYCSALLAGTITSGWTFGAGAALQIPFAMQMAYRFNGIGVTQNVLYENQKLIANQFNSAIGKIQDSLSSTASALGKLQDVVNQNAQALNTLVKQLSSNFGAISSVLNDILSRLDKVEAEVQIDRLITGRLQSLQTYVTQQLIRAAEIRASANLAATKMSECVLGQSKRVDFCGKGYHLMSFPQCAPHGVVFLHVTYVPAQEKNFTTAPAICHDGKAHFPREGVFVSNGTHWFVTQRNFYEPQIITTDNTFVSGNCDVVIGIVNNTVYDPLQPELDSGGSGYIPEAPRDGQAYVRKDGEWVLLSTFL

SEQ ID NO: 10655 - protein, 1171 aa, Artificial Sequence
  SARS-CoV-2/pangolin/Guangxi/P4L/2017__EPI_ISL_410538 spike protein (1-1141)(T868C_S1049C) Foldon construct
MFVFLFVLPLVSSQCVNLTTRTGIPPGYTNSSTRGVYYPDKVFRSSILHLTQDLFLPFFSNVTWFNTINYQGGFKKFDNPVLPFNDGVYFASTEKSNIIRGWIFGTTLDARTQSLLIVNNATNVVIKVCEFQFCTDPFLGVYYHNNNKTWVENEFRVYSSANNCTFEYISQPFLMDLEGKQGNFKNLREFVFKNVDGYFKIYSKHTPIDLVRDLPRGFAALEPLVDLPIGINITRFQTLLALHRSYLTPGNLESGWTTGAAAYYVGYLQQRTFLLSYNQNGTITDAVDCSLDPLSETKCTLKSLTVEKGIYQTSNFRVQPTISIVRFPNITNLCPFGEVFNASKFASVYAWNRKRISNCVADYSVLYNSTSFSTFKCYGVSPTKLNDLCFTNVYADSFVVKGDEVRQIAPGQTGVIADYNYKLPDDFTGCVIAWNSVKQDALTGGNYGYLYRLFRKSKLKPFERDISTEIYQAGSTPCNGQVGLNCYYPLERYGFHPTTGVNYQPFRVVVLSFELLNGPATVCGPKLSTTLVKDKCVNFNFNGLTGTGVLTTSKKQFLPFQQFGRDISDTTDAVRDPQTLEILDITPCSFGGVSVITPGTNTSNQVAVLYQDVNCTEVPMAIHAEQLTPAWRVYSAGANVFQTRAGCLVGAEHVNNSYECDIPVGAGICASYHSMSSLRSVNQRSIIAYTMSLGAENSVAYSNNSIAIPTNFTISVTTEILPVSMTKTSVDCTMYICGDSIECSNLLLQYGSFCTQLNRALTGIAVEQDKNTQEVFAQVKQIYKTPPIKDFGGFNFSQILPDPSKPSKRSFIEDLLFNKVTLADAGFIKQYGDCLGDIAARDLICAQKFNGLTVLPPLLTDEMIAQYCSALLAGTITSGWTFGAGAALQIPFAMQMAYRFNGIGVTQNVLYENQKLIANQFNSAIGKIQDSLSSTASALGKLQDVVNQNAQALNTLVKQLSSNFGAISSVLNDILSRLDKVEAEVQIDRLITGRLQSLQTYVTQQLIRAAEIRASANLAATKMSECVLGQSKRVDFCGKGYHLMSFPQCAPHGVVFLHVTYVPAQEKNFTTAPAICHEGKAHFPREGVFVSNGTHWFITQRNFYEPQIITTDNTFVSGSCDVVIGIVNNTVYDPLQPELDSGGSGYIPEAPRDGQAYVRKDGEWVLLSTFL

SEQ ID NO: 10656 - protein, 1171 aa, Artificial Sequence
  SARS-CoV-2/pangolin/Guangxi/P5L/2017__EPI_ISL_410540 spike protein (1-1141)(T868C_S1049C) Foldon construct
MFVFLFVLPLVSSQCVNLTTRTGIPPGYTNSSTRGVYYPDKVFRSSILHLTQDLFLPFFSNVTWFNTINYQGGFKKFDNPVLPFNDGVYFASTEKSNIIRGWIFGTTLDARTQSLLIVNNATNVVIKVCEFQFCTDPFLGVYYHNNNKTWVENEFRVYSSANNCTFEYISQPFLMDLEGKQGNFKNLREFVFKNVDGYFKIYSKHTPIDLVRDLPRGFAALEPLVDLPIGINITRFQTLLALHRSYLTPGKLESGWTTGAAAYYVGYLQQRTFLLSYNQNGTITDAVDCSLDPLSETKCTLKSLTVEKGIYQTSNFRVQPTISIVRFPNITNLCPFGEVFNASKFASVYAWNRKRISNCVADYSVLYNSTSFSTFKCYGVSPTKLNDLCFTNVYADSFVVKGDEVRQIAPGQTGVIADYNYKLPDDFTGCVIAWNSVKQDALTGGNYGYLYRLFRKSKLKPFERDISTEIYQAGSTPCNGQVGLNCYYPLERYGFHPTTGVNYQPFRVVVLSFELLNGPATVCGPKLSTTLVKDKCVNFNFNGLTGTGVLTTSKKQFLPFQQFGRDISDTTDAVRDPQTLEILDITPCSFGGVSVITPGTNTSNQVAVLYQDVNCTEVPMAIHAEQLTPAWRVYSAGANVFQTRAGCLVGAEHVNNSYECDIPVGAGICASYHSMSSFRSVNQRSIIAYTMSLGAENSVAYSNNSIAIPTNFTISVTTEILPVSMTKTSVDCTMYICGDSIECSNLLLQYGSFCTQLNRALTGIAVEQDKNTQEVFAQVKQIYKTPPIKDFGGFNFSQILPDPSKPSKRSFIEDLLFNKVTLADAGFIKQYGDCLGDIAARDLICAQKFNGLTVLPPLLTDEMIAQYCSALLAGTITSGWTFGAGAALQIPFAMQMAYRFNGIGVTQNVLYENQKLIANQFNSAIGKIQDSLSSTASALGKLQDVVNQNAQALNTLVKQLSSNFGAISSVLNDILSRLDKVEAEVQIDRLITGRLQSLQTYVTQQLIRAAEIRASANLAATKMSECVLGQSKRVDFCGKGYHLMSFPQCAPHGVVFLHVTYVPAQEKNFTTAPAICHEGKAHFPREGVFVSNGTHWFITQRNFYEPQIITTDNTFVSGSCDVVIGIVNNTVYDPLQPELDSGGSGYIPEAPRDGQAYVRKDGEWVLLSTFL

SEQ ID NO: 10657 - protein, 1171 aa, Artificial Sequence
  SARS-CoV-2/pangolin/Guangxi/P5E/2017__EPI_ISL_410541 spike protein (1-1141)(T868C_S1049C) Foldon construct
MFVFLFVLPLVSSQCVNLTTRTGIPPGYTNSSTRGVYYPDKVFRSSILHLTQDLFLPFFSNVTWFNTITYQGGSKKFDNPVLPFNDGVYFASTEKSNIIRGWIFGTTLDARTQSLLIVNNATNVVIKVCEFQFCTDPFLGVYYHNNNKTWVENEFRVYSSANNCTFEYISQPFLMDLEGKQGNFKNLREFVFKNVDGYFKIYSKHTPIDLVRDLPRGFAALEPLVDLPIGINITRFQTLLALHRSYLTPGKLESGWTTGAAAYYVGYLQQRTFLLSYNQNGTITDAVDCSLDPLSETKCTLKSLTVEKGIYQTSNFRVQPTISIVRFPNITNLCPFGEVFNASKFASVYAWNRKRISNCVADYSVLYNSTSFSTFKCYGVSPTKLNDLCFTNVYADSFVVKGDEVRQIAPGQTGVIADYNYKLPDDFTGCVIAWNSVKQDALTGDNYGYLYRLFRKSKLKPFERDISTEIYQAGSTPCNGQVGLNCYYPLERYGFHPTTGVNYQPFRVVVLSFELLNGPATVCGPKLSTTLVKDKCVNFNFNGLTGTGVLTTSKKQFLPFQQFGRDISDTTDAVRDPQTLEILDITPCSFGGVSVITPGTNTSNQVAVLYQDVNCTEVPMAIHAEQLTPAWRVYSAGANVFQTRAGCLVGAEHVNNSYECDIPVGAGICASYHSMSSFRSVNQRSIIAYTMSLGAENSVAYSNNSIAIPTNFTISVTTEILPVSMTKTSVDCTMYICGDSIECSNLLLQYGSFCTQLNRALTGIAVEQDKNTQEVFAQVKQIYKTPPIKDFGGFNFSQILPDPSKPSKRSFIEDLLFNKVTLADAGFIKQYGDCLGDIAARDLICAQKFNGLTVLPPLLTDEMIAQYCSALLAGTITSGWTFGAGAALQIPFAMQMAYRFNGIGVTQNVLYENQKLIANQFNSAIGKIQDSLSSTASALGKLQDVVNQNAQALNTLVKQLSSNFGAISSVLNDILSRLDKVEAEVQIDRLITGRLQSLQTYVTQQLIRAAEIRASANLAATKMSECVLGQSKRVDFCGKGYHLMSFPQCAPHGVVFLHVTYVPAQEKNFTTAPAICHEGKAHFPREGVFVSNGTHWFITQRNFYEPQIITTDNTFVSGSCDVVIGIVNNTVYDPLQPELDSGGSGYIPEAPRDGQAYVRKDGEWVLLSTFL

SEQ ID NO: 10658 - protein, 1169 aa, Artificial Sequence
  SARS-CoV-2/pangolin/Guangxi/P1E/2017__EPI_ISL_410539 spike protein (1-1139)(T866C_S1047C) Foldon construct
MFVFLFVLPLVSSQCVNLTTRTGIQPGYTNSSTRGVYYPDKVFRSSILHLTQDLFLPFFSNVTWFNTINYQGGFKKFDNPVLPFNDGVYFASTEKSNIIRGWIFGTTLDARTQSLLIVNNATNVVIKVCEFQFCTDPFLGVYYHNNNKTWVENEFRVYSSANNCTFEYISQPFLMDLEGKQGNFKNLREFVFKNVDGYFKIYSKHTPIDLVRDLPRGFAALEPLVDLPIGINITRFQTLLALHRSYLTPGKLESGWTTGAAAYYVGYLQQRTFLLSYNQNGTITDAVDCSLDPLSETKCTLKSLTVEKGIYQTSNFRVQPTISIVRFPNITNLCPFGEVFNASKFASVYAWNRKRISNCVADYSVLYNSTSFSTFKCYGVSPTKLNDLCFTNVYADSFVVKGDEVRQIAPGQTGVIADYNYKLPDDFTGCVIAWNSVKQDALTGGNYLYRLFRKSKLKPFERDISTEIYQAGSTPCNGQVGLNCYYPLERYGFHPTTGVNYQPFRVVVLSFELLNGPATVCGPKLSTTLVKDKCVNFNFNGLTGTGVLTTSKKQFLPFQQFGRDISDTTDAVRDPQTLEILDITPCSFGGVSVITPGTNTSNQVAVLYQDVNCTEVPMAIHAEQLTPAWRVYSAGANVFQTRAGCLVGAEHVNNSYECDIPVGAGICASYHSMSSLRSVNQRSIIAYTMSLGAENSVAYSNNSIAIPTNFTISVTTEILPVSMTKTSVDCTMYICGDSIECSNLLLQYGSFCTQLNRALTGIAVEQDKNTQEVFAQVKQIYKTPPIKDFGGFNFSQILPDPSKPSKRSFIEDLLFNKVTLADAGFIKQYGDCLGDIAARDLICAQKFNGLTVLPPLLTDEMIAQYCSALLAGTITSGWTFGAGAALQIPFAMQMAYRFNGIGVTQNVLYENQKLIANQFNSAIGKIQDSLSSTASALGKLQDVVNQNAQALNTLVKQLSSNFGAISSVLNDILSRLDKVEAEVQIDRLITGRLQSLQTYVTQQLIRAAEIRASANLAATKMSECVLGQSKRVDFCGKGYHLMSFPQCAPHGVVFLHVTYVPAQEKNFTTAPAICHEGKAHFPREGVFVSNGTHWFITQRNFYEPQIITTDNTFVSGSCDVVIGIVNNTVYDPLQPELDSGGSGYIPEAPRDGQAYVRKDGEWVLLSTFL

SEQ ID NO: 10659 - protein, 1301 aa, Artificial Sequence
  SARS-CoV-2/Wuhan/WIV05/2019__EPI_ISL_402128 spike protein (1-1147) WhcAg construct
MFVFLVLLPLVSSQCVNLTTRTQLPPAYTNSFTRGVYYPDKVFRSSVLHSTQDLFLPFFSNVTWFHAIHVSGTNGTKRFDNPVLPFNDGVYFASTEKSNIIRGWIFGTTLDSKTQSLLIVNNATNVVIKVCEFQFCNDPFLGVYYHKNNKSWMESEFRVYSSANNCTFEYVSQPFLMDLEGKQGNFKNLREFVFKNIDGYFKIYSKHTPINLVRDLPQGFSALEPLVDLPIGINITRFQTLLALHRSYLTPGDSSSGWTAGAAAYYVGYLQPRTFLLKYNENGTITDAVDCALDPLSETKCTLKSFTVEKGIYQTSNFRVQPTESIVRFPNITNLCPFGEVFNATRFASVYAWNRKRISNCVADYSVLYNSASFSTFKCYGVSPTKLNDLCFTNVYADSFVIRGDEVRQIAPGQTGKIADYNYKLPDDFTGCVIAWNSNNLDSKVGGNYNYLYRLFRKSNLKPFERDISTEIYQAGSTPCNGVEGFNCYFPLQSYGFQPTNGVGYQPYRVVVLSFELLHAPATVCGPKKSTNLVKNKCVNFNFNGLTGTGVLTESNKKFLPFQQFGRDIADTTDAVRDPQTLEILDITPCSFGGVSVITPGTNTSNQVAVLYQDVNCTEVPVAIHADQLTPTWRVYSTGSNVFQTRAGCLIGAEHVNNSYECDIPIGAGICASYQTQTNSPRRARSVASQSIIAYTMSLGAENSVAYSNNSIAIPTNFTISVTTEILPVSMTKTSVDCTMYICGDSTECSNLLLQYGSFCTQLNRALTGIAVEQDKNTQEVFAQVKQIYKTPPIKDFGGFNFSQILPDPSKPSKRSFIEDLLFNKVTLADAGFIKQYGDCLGDIAARDLICAQKFNGLTVLPPLLTDEMIAQYTSALLAGTITSGWTFGAGAALQIPFAMQMAYRFNGIGVTQNVLYENQKLIANQFNSAIGKIQDSLSSTASALGKLQDVVNQNAQALNTLVKQLSSNFGAISSVLNDILSRLDKVEAEVQIDRLITGRLQSLQTYVTQQLIRAAEIRASANLAATKMSECVLGQSKRVDFCGKGYHLMSFPQSAPHGVVFLHVTYVPAQEKNFTTAPAICHDGKAHFPREGVFVSNGTHWFVTQRNFYEPQIITTDNTFVSGNCDVVIGIVNNTVYDPLQPELDSGGGGSDIDPYKEFGSSYQLLNFLPLDFFPDLNALVDTATALYEEELTGREHCSPHHTAIRQALVCWDELTKLIAWMSSNITSEQVRTIIVNHVNDTWGLKVRQSLWFHLSCLTFGQHTVQEFLVSFGVWIRTPAPYRPPNAPILSTLPEHTVIC

SEQ ID NO: 10660 - protein, 1297 aa, Artificial Sequence
  SARS-CoV-2/bat/Yunnan/RaTG13/2013__EPI_ISL_402131 spike protein (1-1143) WhcAg construct
MFVFLVLLPLVSSQCVNLTTRTQLPPAYTNSSTRGVYYPDKVFRSSVLHLTQDLFLPFFSNVTWFHAIHVSGTNGIKRFDNPVLPFNDGVYFASTEKSNIIRGWIFGTTLDSKTQSLLIVNNATNVVIKVCEFQFCNDPFLGVYYHKNNKSWMESEFRVYSSANNCTFEYVSQPFLMDLEGKQGNFKNLREFVFKNIDGYFKIYSKHTPINLVRDLPPGFSALEPLVDLPIGINITRFQTLLALHRSYLTPGDSSSGWTAGAAAYYVGYLQPRTFLLKYNENGTITDAVDCALDPLSETKCTLKSFTVEKGIYQTSNFRVQPTDSIVRFPNITNLCPFGEVFNATTFASVYAWNRKRISNCVADYSVLYNSTSFSTFKCYGVSPTKLNDLCFTNVYADSFVITGDEVRQIAPGQTGKIADYNYKLPDDFTGCVIAWNSKHIDAKEGGNFNYLYRLFRKANLKPFERDISTEIYQAGSKPCNGQTGLNCYYPLYRYGFYPTDGVGHQPYRVVVLSFELLNAPATVCGPKKSTNLVKNKCVNFNFNGLTGTGVLTESNKKFLPFQQFGRDIADTTDAVRDPQTLEILDITPCSFGGVSVITPGTNASNQVAVLYQDVNCTEVPVAIHADQLTPTWRVYSTGSNVFQTRAGCLIGAEHVNNSYECDIPIGAGICASYQTQTNSRSVASQSIIAYTMSLGAENSVAYSNNSIAIPTNFTISVTTEILPVSMTKTSVDCTMYICGDSTECSNLLLQYGSFCTQLNRALTGIAVEQDKNTQEVFAQVKQIYKTPPIKDFGGFNFSQILPDPSKPSKRSFIEDLLFNKVTLADAGFIKQYGDCLGDIAARDLICAQKFNGLTVLPPLLTDEMIAQYTSALLAGTITSGWTFGAGAALQIPFAMQMAYRFNGIGVTQNVLYENQKLIANQFNSAIGKIQDSLSSTASALGKLQDVVNQNAQALNTLVKQLSSNFGAISSVLNDILSRLDKVEAEVQIDRLITGRLQSLQTYVTQQLIRAAEIRASANLAATKMSECVLGQSKRVDFCGKGYHLMSFPQSAPHGVVFLHVTYVPAQEKNFTTAPAICHDGKAHFPREGVFVSNGTHWFVTQRNFYEPQIITTDNTFVSGSCDVVIGIVNNTVYDPLQPELDSGGGGSDIDPYKEFGSSYQLLNFLPLDFFPDLNALVDTATALYEEELTGREHCSPHHTAIRQALVCWDELTKLIAWMSSNITSEQVRTIIVNHVNDTWGLKVRQSLWFHLSCLTFGQHTVQEFLVSFGVWIRTPAPYRPPNAPILSTLPEHTVIC

SEQ ID NO: 10661 - protein, 1301 aa, Artificial Sequence
  SARS-CoV-2/Wuhan/HBCDC-HB-01/2019__EPI_ISL_402132 spike protein (1-1147) WhcAg construct
MFVFLVLLPLVSSQCVNLTTRTQLPPAYTNSITRGVYYPDKVFRSSVLHSTQDLFLPFFSNVTWFHAIHVSGTNGTKRFDNPVLPFNDGVYFASTEKSNIIRGWIFGTTLDSKTQSLLIVNNATNVVIKVCEFQFCNDPFLGVYYHKNNKSWMESEFRVYSSANNCTFEYVSQPFLMDLEGKQGNFKNLREFVFKNIDGYFKIYSKHTPINLVRDLPQGFSALEPLVDLPIGINITRFQTLLALHRSYLTPGDSSSGWTAGAAAYYVGYLQPRTFLLKYNENGTITDAVDCALDPLSETKCTLKSFTVEKGIYQTSNFRVQPTESIVRFPNITNLCPFGEVFNATRFASVYAWNRKRISNCVADYSVLYNSASFSTFKCYGVSPTKLNDLCFTNVYADSFVIRGDEVRQIAPGQTGKIADYNYKLPDDFTGCVIAWNSNNLDSKVGGNYNYLYRLFRKSNLKPFERDISTEIYQAGSTPCNGVEGFNCYFPLQSYGFQPTNGVGYQPYRVVVLSFELLHAPATVCGPKKSTNLVKNKCVNFNFNGLTGTGVLTESNKKFLPFQQFGRDIADTTDAVRDPQTLEILDITPCSFGGVSVITPGTNTSNQVAVLYQDVNCTEVPVAIHADQLTPTWRVYSTGSNVFQTRAGCLIGAEHVNNSYECDIPIGAGICASYQTQTNSPRRARSVASQSIIAYTMSLGAENSVAYSNNSIAIPTNFTISVTTEILPVSMTKTSVDCTMYICGDSTECSNLLLQYGSFCTQLNRALTGIAVEQDKNTQEVFAQVKQIYKTPPIKDFGGFNFSQILPDPSKPSKRSFIEDLLFNKVTLADAGFIKQYGDCLGDIAARDLICAQKFNGLTVLPPLLTDEMIAQYTSALLAGTITSGWTFGAGAALQIPFAMQMAYRFNGIGVTQNVLYENQKLIANQFNSAIGKIQDSLSSTASALGKLQDVVNQNAQALNTLVKQLSSNFGAISSVLNDILSRLDKVEAEVQIDRLITGRLQSLQTYVTQQLIRAAEIRASANLAATKMSECVLGQSKRVDFCGKGYHLMSFPQSAPHGVVFLHVTYVPAQEKNFTTAPAICHDGKAHFPREGVFVSNGTHWFVTQRNFYEPQIITTDNTFVSGNCDVVIGIVNNTVYDPLQPELDSGGGGSDIDPYKEFGSSYQLLNFLPLDFFPDLNALVDTATALYEEELTGREHCSPHHTAIRQALVCWDELTKLIAWMSSNITSEQVRTIIVNHVNDTWGLKVRQSLWFHLSCLTFGQHTVQEFLVSFGVWIRTPAPYRPPNAPILSTLPEHTVIC

SEQ ID NO: 10662 - protein, 1301 aa, Artificial Sequence
  SARS-CoV-2/Guangdong/20SF028/2020__EPI_ISL_403936 spike protein (1-1147) WhcAg construct
MFVFLVLLPLVSSQCVNLTTRTQLPPAYTNSFTRGVYYPDKVFRSSVLYSTQDLFLPFFSNVTWFHAIHVSGTNGTKRFDNPVLPFNDGVYFASTEKSNIIRGWIFGTTLDSKTQSLLIVNNATNVVIKVCEFQFCNDPFLGVYYHKNNKSWMESEFRVYSSANNCTFEYVSQPFLMDLEGKQGNFKNLREFVFKNIDGYFKIYSKHTPINLVRDLPQGFSALEPLVDLPIGINITRFQTLLALHRSYLTPGDSSSGWTAGAAAYYVGYLQPRTFLLKYNENGTITDAVDCALDPLSETKCTLKSFTVEKGIYQTSNFRVQPTESIVRFPNITNLCPFGEVFNATRFASVYAWNRKRISNCVADYSVLYNSASFSTFKCYGVSPTKLNDLCFTNVYADSFVIRGDEVRQIAPGQTGKIADYNYKLPDDFTGCVIAWNSNNLDSKVGGNYNYLYRLFRKSNLKPFERDISTEIYQAGSTPCNGVEGFNCYFPLQSYGFQPTNGVGYQPYRVVVLSFELLHAPATVCGPKKSTNLVKNKCVNFNFNGLTGTGVLTESNKKFLPFQQFGRDIADTTDAVRDPQTLEILDITPCSFGGVSVITPGTNTSNQVAVLYQDVNCTEVPVAIHADQLTPTWRVYSTGSNVFQTRAGCLIGAEHVNNSYECDIPIGAGICASYQTQTNSPRRARSVASQSIIAYTMSLGAENSVAYSNNSIAIPTNFTISVTTEILPVSMTKTSVDCTMYICGDSTECSNLLLQYGSFCTQLNRALTGIAVEQDKNTQEVFAQVKQIYKTPPIKDFGGFNFSQILPDPSKPSKRSFIEDLLFNKVTLADAGFIKQYGDCLGDIAARDLICAQKFNGLTVLPPLLTDEMIAQYTSALLAGTITSGWTFGAGAALQIPFAMQMAYRFNGIGVTQNVLYENQKLIANQFNSAIGKIQDSLSSTASALGKLQDVVNQNAQALNTLVKQLSSNFGAISSVLNDILSRLDKVEAEVQIDRLITGRLQSLQTYVTQQLIRAAEIRASANLAATKMSECVLGQSKRVDFCGKGYHLMSFPQSAPHGVVFLHVTYVPAQEKNFTTAPAICHDGKAHFPREGVFVSNGTHWFVTQRNFYEPQIITTDNTFVSGNCDVVIGIVNNTVYDPLQPELDSGGGGSDIDPYKEFGSSYQLLNFLPLDFFPDLNALVDTATALYEEELTGREHCSPHHTAIRQALVCWDELTKLIAWMSSNITSEQVRTIIVNHVNDTWGLKVRQSLWFHLSCLTFGQHTVQEFLVSFGVWIRTPAPYRPPNAPILSTLPEHTVIC

SEQ ID NO: 10663 - protein, 1301 aa, Artificial Sequence
  SARS-CoV-2/Shenzhen/SZTH-001/2020__EPI_ISL_406592 spike protein (1-1147) WhcAg construct
MFVFLVLLPLVSSQCVNLTTRTQLPPAYTNSFTRGVYYPDKVFRSSVLHSTQDLFLPFFSNVTWFHAIHVSGTNGTKRFDNPVLPFNDGVYFASTEKSNIIRGWIFGTTLDSKTQSLLIVNNATNVVIKVCEFQFCNDPFLGVYYHKNNKSWMESEFRVYSSANNCTFEYVSQPFLMDLEGKQGNFKNLREFVFKNIDGYFKIYSKHTPINLVRDLPQGFSALEPLVDLPIGINITRFQTLLALHRSYLTPGDSSSGWTAGAAAYYVGYLQPRTFLLKYNENGTITDAVDCALDPLSETKCTLKSFTVEKGIYQTSNFRVQPTESIVRFPNITNLCPFGEVFNATRFASVYAWNRKRISNCVADYSVLYNSASFSTFKCYGVSPTKLNDLCFTNVYADSFVIRGDEVRQIAPGQTGKIADYNYKLPDDFTGCVIAWNSNNLDSKVGGNYNYLYRLFRKSNLKPFERDISTEIYQAGSTPCNGVEGFNCYFPLQSYGFQPTNGVGYQPYRVVVLSFELLHAPATVCGPKKSTNLVKNKCVNFNFNGLTGTGVLTESNKKFLPFQQFGRDIADTTDAVRDPQTLEILDITPCSFGGVSVITPGTNTSNQVAVLYQDVNCTEVPVAIHADQLTPTWRVYSTGSNVFQTRAGCLIGAEHVNNSYECDIPIGAGICASYQTQTNSPRRARSVASQSIIAYTMSLGAENSVAYSNNSIAIPTNFTISVTTEILPVSMTKTSVDCTMYICGDSTECSNLLLQYGSFCTQLNRALTGIAVEQDKNTQEVFAQVKQIYKTPPIKDFGGFNFSQILPDPSKPSKRSFIEDLLFNKVTLADAGFIKQYGDCLGDIAARDLICAQKFNGLTVLPPLLTDEMIAQYTSALLAGTITSGWTFGAGAALQIPFAMQMAYRFNGIGVTQNVLYENQKLIANQFNSAIGKIQDSLSSTASALGKLQDVVNQNAQALNTLVKQLSSNFGAISSVLNDILSRLDKVEAEVQIDRLITGRLQSLQTYVTQQLIRAAEIRASANLAATKMSECVLGQSKRVDFCGKGYHLMSFPQSAPHGVVFLHVTYVPAQEKNFTTAPAICHDGKAHFPREGVFVSNGTHWFVTQRNFYEPQIITTDNTFVSGNCDVLIGIVNNTVYDPLQPELDSGGGGSDIDPYKEFGSSYQLLNFLPLDFFPDLNALVDTATALYEEELTGREHCSPHHTAIRQALVCWDELTKLIAWMSSNITSEQVRTIIVNHVNDTWGLKVRQSLWFHLSCLTFGQHTVQEFLVSFGVWIRTPAPYRPPNAPILSTLPEHTVIC

SEQ ID NO: 10664 - protein, 1301 aa, Artificial Sequence
  SARS-CoV-2/Shenzhen/SZTH-004/2020__EPI_ISL_406595 spike protein (1-1147) WhcAg construct
MFVFLVLLPLVSSQCVNLTTRTQLPPAYTNSFTRGVYYPDKVFRSSVLHSTQDLFLPFFSNVTWFHAIHVSGTNGTKRFDNPVLPFNDGVYFASTEKSNIIRGWIFGTTLDSKTQSLLIVNNATNVVIKVCEFQFCNDPFLGVYYHKNNKSWMESEFRVYSSANNCTFEYVSQPFLMDLEGKQGNFKNLREFVFKNIDGYFKIYSKHTPINLVRDLPQGFSALEPLVDLPIGINITRFQTLLALHRSYLTPGDSSSGWTAGAAAYYVGYLQPRTFLLKYNENGTITDAVDCALDPLSETKCTLKSFTVEKGIYQTSNFRVQPTESIVRFPNITNLCPFGEVFNATRFASVYAWDRKRISNCVAYYSVLYNSASFSTFKCYGVSPTKLNDLCFTNVYADSFVIRGDEVRQIAPGQTGKIADYNYKLPDDFTGCVIAWNSNNLDSKVGGNYNYLYRLFRKSNLKPFERDISTEIYQAGSTPCNGVEGFNCYFPLQSYGFQPTNGVGYQPYRVVVLSFELLHAPATVCGPKKSTNLVKNKCVNFNFNGLTGTGVLTESNKKFLPFQQFGRDIADTTDAVRDPQTLEILDITPCSFGGVSVITPGTNTSNQVAVLYQDVNCTEVPVAIHADQLTPTWRVYSTGSNVFQTRAGCLIGAEHVNNSYECDIPIGAGICASYQTQTNSPRRARSVASQSIIAYTMSLGAENSVAYSNNSIAIPTNFTISVTTEILPVSMTKTSVDCTMYICGDSTECSNLLLQYGSFCTQLNRALTGIAVEQDKNTQEVFAQVKQIYKTPPIKDFGGFNFSQILPDPSKPSKRSFIEDLLFNKVTLADAGFIKQYGDCLGDIAARDLICAQKFNGLTVLPPLLTDEMIAQYTSALLAGTITSGWTFGAGAALQIPFAMQMAYRFNGIGVTQNVLYENQKLIANQFNSAIGKIQDSLSSTASALGKLQDVVNQNAQALNTLVKQLSSNFGAISSVLNDILSRLDKVEAEVQIDRLITGRLQSLQTYVTQQLIRAAEIRASANLAATKMSECVLGQSKRVDFCGKGYHLMSFPQSAPHGVVFLHVTYVPAQEKNFTTAPAICHDGKAHFPREGVFVSNGTHWFVTQRNFYEPQIITTDNTFVSGNCDVVIGIVNNTVYDPLQPELDSGGGGSDIDPYKEFGSSYQLLNFLPLDFFPDLNALVDTATALYEEELTGREHCSPHHTAIRQALVCWDELTKLIAWMSSNITSEQVRTIIVNHVNDTWGLKVRQSLWFHLSCLTFGQHTVQEFLVSFGVWIRTPAPYRPPNAPILSTLPEHTVIC

SEQ ID NO: 10665 - protein, 1301 aa, Artificial Sequence
  SARS-CoV-2/France/IDF0372/2020__EPI_ISL_406596 spike protein (1-1147) WhcAg construct
MFVFLVLLPLVSSQCVNLTTRTQLPPAYTNSFTRGVYYPDKVFRSSVLHSTQDLFLPFFSNVTWFHAIHVSGTNGTKRFDNPVLPFNDGVYFASTEKSNIIRGWIFGTTLDSKTQSLLIVNNATNVVIKVCEFQFCNDPFLGVYYHKNNKSWMESEFRVYSSANNCTFEYVSQPFLMDLEGKQGNFKNLREFVFKNIDGYFKIYSKHTPINLVRDLPQGFSALEPLVDLPIGINITRFQTLLALHRSYLTPGDSSSGWTAGAAAYYVGYLQPRTFLLKYNENGTITDAVDCALDPLSETKCTLKSFTVEKGIYQTSNFRVQPTESIVRFPNITNLCPFGEVFNATRFASVYAWNRKRISNCVADYSFLYNSASFSTFKCYGVSPTKLNDLCFTNVYADSFVIRGDEVRQIAPGQTGKIADYNYKLPDDFTGCVIAWNSNNLDSKVGGNYNYLYRLFRKSNLKPFERDISTEIYQAGSTPCNGVEGFNCYFPLQSYGFQPTNGVGYQPYRVVVLSFELLHAPATVCGPKKSTNLVKNKCVNFNFNGLTGTGVLTESNKKFLPFQQFGRDIADTTDAVRDPQTLEILDITPCSFGGVSVITPGTNTSNQVAVLYQDVNCTEVPVAIHADQLTPTWRVYSTGSNVFQTRAGCLIGAEHVNNSYECDIPIGAGICASYQTQTNSPRRARSVASQSIIAYTMSLGAENSVAYSNNSIAIPTNFTISVTTEILPVSMTKTSVDCTMYICGDSTECSNLLLQYGSFCTQLNRALTGIAVEQDKNTQEVFAQVKQIYKTPPIKDFGGFNFSQILPDPSKPSKRSFIEDLLFNKVTLADAGFIKQYGDCLGDIAARDLICAQKFNGLTVLPPLLTDEMIAQYTSALLAGTITSGWTFGAGAALQIPFAMQMAYRFNGIGVTQNVLYENQKLIANQFNSAIGKIQDSLSSTASALGKLQDVVNQNAQALNTLVKQLSSNFGAISSVLNDILSRLDKVEAEVQIDRLITGRLQSLQTYVTQQLIRAAEIRASANLAATKMSECVLGQSKRVDFCGKGYHLMSFPQSAPHGVVFLHVTYVPAQEKNFTTAPAICHDGKAHFPREGVFVSNGTHWFVTQRNFYEPQIITTDNTFVSGNCDVVIGIVNNTVYDPLQPELDSGGGGSDIDPYKEFGSSYQLLNFLPLDFFPDLNALVDTATALYEEELTGREHCSPHHTAIRQALVCWDELTKLIAWMSSNITSEQVRTIIVNHVNDTWGLKVRQSLWFHLSCLTFGQHTVQEFLVSFGVWIRTPAPYRPPNAPILSTLPEHTVIC

SEQ ID NO: 10666 - protein, 1301 aa, Artificial Sequence
  SARS-CoV-2/Australia/VIC01/2020__EPI_ISL_406844 spike protein (1-1147) WhcAg construct
MFVFLVLLPLVSSQCVNLTTRTQLPPAYTNSFTRGVYYPDKVFRSSVLHSTQDLFLPFFSNVTWFHAIHVSGTNGTKRFDNPVLPFNDGVYFASTEKSNIIRGWIFGTTLDSKTQSLLIVNNATNVVIKVCEFQFCNDPFLGVYYHKNNKSWMESEFRVYSSANNCTFEYVSQPFLMDLEGKQGNFKNLREFVFKNIDGYFKIYSKHTPINLVRDLPQGFSALEPLVDLPIGINITRFQTLLALHRRYLTPGDSSSGWTAGAAAYYVGYLQPRTFLLKYNENGTITDAVDCALDPLSETKCTLKSFTVEKGIYQTSNFRVQPTESIVRFPNITNLCPFGEVFNATRFASVYAWNRKRISNCVADYSVLYNSASFSTFKCYGVSPTKLNDLCFTNVYADSFVIRGDEVRQIAPGQTGKIADYNYKLPDDFTGCVIAWNSNNLDSKVGGNYNYLYRLFRKSNLKPFERDISTEIYQAGSTPCNGVEGFNCYFPLQSYGFQPTNGVGYQPYRVVVLSFELLHAPATVCGPKKSTNLVKNKCVNFNFNGLTGTGVLTESNKKFLPFQQFGRDIADTTDAVRDPQTLEILDITPCSFGGVSVITPGTNTSNQVAVLYQDVNCTEVPVAIHADQLTPTWRVYSTGSNVFQTRAGCLIGAEHVNNSYECDIPIGAGICASYQTQTNSPRRARSVASQSIIAYTMSLGAENSVAYSNNSIAIPTNFTISVTTEILPVSMTKTSVDCTMYICGDSTECSNLLLQYGSFCTQLNRALTGIAVEQDKNTQEVFAQVKQIYKTPPIKDFGGFNFSQILPDPSKPSKRSFIEDLLFNKVTLADAGFIKQYGDCLGDIAARDLICAQKFNGLTVLPPLLTDEMIAQYTSALLAGTITSGWTFGAGAALQIPFAMQMAYRFNGIGVTQNVLYENQKLIANQFNSAIGKIQDSLSSTASALGKLQDVVNQNAQALNTLVKQLSSNFGAISSVLNDILSRLDKVEAEVQIDRLITGRLQSLQTYVTQQLIRAAEIRASANLAATKMSECVLGQSKRVDFCGKGYHLMSFPQSAPHGVVFLHVTYVPAQEKNFTTAPAICHDGKAHFPREGVFVSNGTHWFVTQRNFYEPQIITTDNTFVSGNCDVVIGIVNNTVYDPLQPELDSGGGGSDIDPYKEFGSSYQLLNFLPLDFFPDLNALVDTATALYEEELTGREHCSPHHTAIRQALVCWDELTKLIAWMSSNITSEQVRTIIVNHVNDTWGLKVRQSLWFHLSCLTFGQHTVQEFLVSFGVWIRTPAPYRPPNAPILSTLPEHTVIC

SEQ ID NO: 10667 - protein, 1301 aa, Artificial Sequence
  SARS-CoV-2/Germany/BavPat1/2020__EPI_ISL_406862 spike protein (1-1147) WhcAg construct
MFVFLVLLPLVSSQCVNLTTRTQLPPAYTNSFTRGVYYPDKVFRSSVLHSTQDLFLPFFSNVTWFHAIHVSGTNGTKRFDNPVLPFNDGVYFASTEKSNIIRGWIFGTTLDSKTQSLLIVNNATNVVIKVCEFQFCNDPFLGVYYHKNNKSWMESEFRVYSSANNCTFEYVSQPFLMDLEGKQGNFKNLREFVFKNIDGYFKIYSKHTPINLVRDLPQGFSALEPLVDLPIGINITRFQTLLALHRSYLTPGDSSSGWTAGAAAYYVGYLQPRTFLLKYNENGTITDAVDCALDPLSETKCTLKSFTVEKGIYQTSNFRVQPTESIVRFPNITNLCPFGEVFNATRFASVYAWNRKRISNCVADYSVLYNSASFSTFKCYGVSPTKLNDLCFTNVYADSFVIRGDEVRQIAPGQTGKIADYNYKLPDDFTGCVIAWNSNNLDSKVGGNYNYLYRLFRKSNLKPFERDISTEIYQAGSTPCNGVEGFNCYFPLQSYGFQPTNGVGYQPYRVVVLSFELLHAPATVCGPKKSTNLVKNKCVNFNFNGLTGTGVLTESNKKFLPFQQFGRDIADTTDAVRDPQTLEILDITPCSFGGVSVITPGTNTSNQVAVLYQGVNCTEVPVAIHADQLTPTWRVYSTGSNVFQTRAGCLIGAEHVNNSYECDIPIGAGICASYQTQTNSPRRARSVASQSIIAYTMSLGAENSVAYSNNSIAIPTNFTISVTTEILPVSMTKTSVDCTMYICGDSTECSNLLLQYGSFCTQLNRALTGIAVEQDKNTQEVFAQVKQIYKTPPIKDFGGFNFSQILPDPSKPSKRSFIEDLLFNKVTLADAGFIKQYGDCLGDIAARDLICAQKFNGLTVLPPLLTDEMIAQYTSALLAGTITSGWTFGAGAALQIPFAMQMAYRFNGIGVTQNVLYENQKLIANQFNSAIGKIQDSLSSTASALGKLQDVVNQNAQALNTLVKQLSSNFGAISSVLNDILSRLDKVEAEVQIDRLITGRLQSLQTYVTQQLIRAAEIRASANLAATKMSECVLGQSKRVDFCGKGYHLMSFPQSAPHGVVFLHVTYVPAQEKNFTTAPAICHDGKAHFPREGVFVSNGTHWFVTQRNFYEPQIITTDNTFVSGNCDVVIGIVNNTVYDPLQPELDSGGGGSDIDPYKEFGSSYQLLNFLPLDFFPDLNALVDTATALYEEELTGREHCSPHHTAIRQALVCWDELTKLIAWMSSNITSEQVRTIIVNHVNDTWGLKVRQSLWFHLSCLTFGQHTVQEFLVSFGVWIRTPAPYRPPNAPILSTLPEHTVIC

SEQ ID NO: 10668 - protein, 1301 aa, Artificial Sequence
  SARS-CoV-2/Wuhan/HBCDC-HB-02/2020__EPI_ISL_412978 spike protein (1-1147) WhcAg construct
MFVFLVLLPLVSSQCVNLTTRTQLPPAYTNSFTRGVYYPDKVFRSSVLHSTQDLFLPFFSNVTWFHAIHVSGTNGTKRFDNPVLPFNDGVYFASTEKSNIIRGWIFGTTLDSKTQSLLIVNNATNVVIKVCEFQFCNDPFLGVYYHKNNKSWMESEFRVYSSANNCTFEYVSQPFLMDLEGKQGNFKNLREFVFKNIDGYFKIYSKHTPINLVRDLPQGFSALEPLVDLPIGINITRFQTLLALHRSYLTPGDSSSGWTAGAAAYYVGYLQPRTFLLKYNENGTITDAVDCALDPLSETKCTLKSFTVEKGIYQTSNFRVQPTESIVRFPNITNLCPFGEVFNATRFASVYAWNRKRISNCVADYSVLYNSASFSTFKCYGVSPTKLNDLCFTNVYADSFVIRGDEVRQIAPGQTGKIADYNYKLPDDFTGCVIAWNSNNLDSKVGGNYNYLYRLFRKSNLKPFERDISTEIYQAGSTPCNGVEGFNCYFPLQSYGFQPTNGVGYQPYRVVVLSFELLHAPATVCGPKKSTNLVKNKCVNFNFNGLTGTGVLTESNKKFLPFQQFGRDIADTTDAVRDPQTLEILDITPCSFGGVSVITPGTNTSNQVAVLYQDVNCTEVPVAIHADQLTPTWRVYSTGSNVFQTRAGCLIGAEHVNNSYECDIPIGAGICASYQTQTNSPRRARSVASQSIIAYTMSLGAENSVAYSNNSIAIPTNFTISVTTEILPVSMTKTSVDCTMYICGDSTECSNFLLQYGSFCTQLNRALTGIAVEQDKNTQEVFAQVKQIYKTPPIKDFGGFNFSQILPDPSKPSKRSFIEDLLFNKVTLADAGFIKQYGDCLGDIAARDLICAQKFNGLTVLPPLLTDEMIAQYTSALLAGTITSGWTFGAGAALQIPFAMQMAYRFNGIGVTQNVLYENQKLIANQFNSAIGKIQDSLSSTASALGKLQDVVNQNAQALNTLVKQLSSNFGAISSVLNDILSRLDKVEAEVQIDRLITGRLQSLQTYVTQQLIRAAEIRASANLAATKMSECVLGQSKRVDFCGKGYHLMSFPQSAPHGVVFLHVTYVPAQEKNFTTAPAICHDGKAHFPREGVFVSNGTHWFVTQRNFYEPQIITTDNTFVSGNCDVVIGIVNNTVYDPLQPELDSGGGGSDIDPYKEFGSSYQLLNFLPLDFFPDLNALVDTATALYEEELTGREHCSPHHTAIRQALVCWDELTKLIAWMSSNITSEQVRTIIVNHVNDTWGLKVRQSLWFHLSCLTFGQHTVQEFLVSFGVWIRTPAPYRPPNAPILSTLPEHTVIC

SEQ ID NO: 10669 - protein, 1301 aa, Artificial Sequence
  SARS-CoV-2/Australia/QLD02/2020__EPI_ISL_407896 spike protein (1-1147) WhcAg construct
MFVFLVLLPLVSSQCVNLTTRTQLPPAYTNSFTRGVYYPDKVFRSSVLHSTQDLFLPFFSNVTWFHAIHVSGTNGTKRFDNPVLPFNDGVYFASTEKSNIIRGWIFGTTLDSKTQSLLIVNNATNVVIKVCEFQFCNDPFLGVYYHKNNKSWMESEFRVYSSANNCTFEYVSQPFLMDLEGKQGNFKNLREFVFKNIDGYFKIYSKHTPINLVRDLPQGFSALEPLVDLPIGINITRFQTLLALHRSYLTPGDSSSGWTAGAAAYYVGYLQPRTFLLKYNENGTITDAVDCALDPLSETKCTLKSFTVEKGIYQTSNFRVQPTESIVRFPNITNLCPFGEVFNATRFASVYAWNRKRISNCVADYSVLYNSASFSTFKCYGVSPTKLNDLCFTNVYADSFVIRGDEVRQIAPGQTGKIADYNYKLPDDFTGCVIAWNSNNLDSKVGGNYNYLYRLFRKSNLKPFERDISTEIYQAGSTPCNGVEGFNCYFPLQSYGFQPTNGVGYQPYRVVVLSFELLHAPATVCGPKKSTNLVKNKCVNFNFNGLTGTGVLTESNKKFLPFQQFGRDIADTTDAVRDPQTLEILDITPCSFGGVSVITPGTNTSNQVAVLYQDVNCTEVPVAIHADQLTPTWRVYSTGSNVFQTRAGCLIGAEHVNNSYECDIPIGAGICASYQTQTNSPRRARSVASQSIIAYTMSLGAENSVAYSNNSIAIPTNFTISVTTEILPVSMTKTSVDCTMYICGDSTECSNLLLQYGSFCTQLNRALTGIAVEQDKNTQEVFAQVKQIYKTPPIKDFGGFNFSQILPDPSKPSKRSFIEDLLFNKVTLADAGFIKQYGDCLGDIAARDLICAQKFNGLTVLPPLLTDEMIAQYTSALLAGTITSGWTFGAGAALQIPFAMQMAYRFNGIGVTQNVLYENQKLIANQFNSAIGKIQDSLSSTASALGKLQDVVNQNAQALNTLVKQLSSNFGAISSVLNDILSRLDKVEAEVQIDRLITGRLQSLQTYVTQQLIRAAEIRASANLAATKMSECVLGQSKRVDFCGKGYHLMSFPQSAPHGVVFLHVTYVPAQEKNFTTAPAICHDGKAHFPREGVFVSNGTHWFVTQRNFYEPQIITTDNTFVSGNCDVVIGIVNNTVYDPLQLELDSGGGGSDIDPYKEFGSSYQLLNFLPLDFFPDLNALVDTATALYEEELTGREHCSPHHTAIRQALVCWDELTKLIAWMSSNITSEQVRTIIVNHVNDTWGLKVRQSLWFHLSCLTFGQHTVQEFLVSFGVWIRTPAPYRPPNAPILSTLPEHTVIC

SEQ ID NO: 10670 - protein, 1301 aa, Artificial Sequence
  SARS-CoV-2/India/1-31/2020__EPI_ISL_413523 spike protein (1-1147) WhcAg construct
MFVFLVLLPLVSSQCVNLTTRTQLPPAYTNSFTRGVYYPDKVFRSSVLHSTQDLFLPFFSNVTWFHAIHVSGTNGTKRFDNPVLPFNDGVYFASTEKSNIIRGWIFGTTLDSKTQSLLIVNNATNVVIKVCEFQFCNDPFLGVYYHKNNKSWMESEFRVYSSANNCTFEYVSQPFLMDLEGKQGNFKNLREFVFKNIDGYFKIYSKHTPINLVRDLPQGFSALEPLVDLPIGINITRFQTLLALHRSYLTPGDSSSGWTAGAAAYYVGYLQPRTFLLKYNENGTITDAVDCALDPLSETKCTLKSFTVEKGIYQTSNFRVQPTESIVRFPNITNLCPFGEVFNATRFASVYAWNRKRISNCVADYSVLYNSASFSTFKCYGVSPTKLNDLCFTNVYADSFVIRGDEVRQIAPGQTGKIADYNYKLPDDFTGCVIAWNSNNLDSKVGGNYNYLYRLFRKSNLKPFERDISTEIYQAGSTPCNGVEGFNCYFPLQSYGFQPTNGVGYQPYRVVVLSFELLHAPATVCGPKKSTNLVKNKCVNFNFNGLTGTGVLTESNKKFLPFQQFGRDIADTTDAVRDPQTLEILDITPCSFGGVSVITPGTNTSNQVAVLYQDVNCTEVPVAIHADQLTPTWRVYSTGSNVFQTRAGCLIGAEHVNNSYECDIPIGAGICASYQTQTNSPRRARSVASQSIIAYTMSLGAENSVAYSNNSIAIPTNFTISVTTEILPVSMTKTSVDCTMYICGDSTECSNLLLQYGSFCTQLNRALTGIAVEQDKNTQEVFAQVKQIYKTPPIKDFGGFNFSQILPDPSKPSKRSFIEDLLFNKVTLADAGFIKQYGDCLGDIAARDLICAQKFNGLTVLPPLLTDEMIAQYTSALLAGTITSGWTFGAGAALQIPFAMQMAYRFNGIGVTQNVLYENQKLIANQFNSVIGKIQDSLSSTASALGKLQDVVNQNAQALNTLVKQLSSNFGAISSVLNDILSRLDKVEAEVQIDRLITGRLQSLQTYVTQQLIRAAEIRASANLAATKMSECVLGQSKRVDFCGKGYHLMSFPQSAPHGVVFLHVTYVPAQEKNFTTAPAICHDGKAHFPREGVFVSNGTHWFVTQRNFYEPQIITTDNTFVSGNCDVVIGIVNNTVYDPLQPELDSGGGGSDIDPYKEFGSSYQLLNFLPLDFFPDLNALVDTATALYEEELTGREHCSPHHTAIRQALVCWDELTKLIAWMSSNITSEQVRTIIVNHVNDTWGLKVRQSLWFHLSCLTFGQHTVQEFLVSFGVWIRTPAPYRPPNAPILSTLPEHTVIC

SEQ ID NO: 10671 - protein, 1301 aa, Artificial Sequence
  SARS-CoV-2/Guangdong/GD2020087-P0008/2020__EPI_ISL_413863 spike protein (1-1147) WhcAg construct
MFVFLVLLPLVSSQCVNLTTRTQLPPAYTNSFTRGVYYPDKVFRSSVLHSTQDLFLPFFSNVTWFHAIHVSGTNGTKRFDNPVLPFNDGVYFASTEKSNIIRGWIFGTTLDSKTQSLLIVNNATNVVIKVCEFQFCNDPFLGVYYHKNNKSWMESEFRVYSSANNCTFEYVSQPFLMDLEGKQGNFKNLREFVFKNIDGYFKIYSKHTPINLVRDLPQGFSALEPLVDLPIGINITRFQTLLALHRSYLTPGDSSSGWTAGAAAYYVGYLQPRTFLLKYNENGTITDAVDCALDPLSETKCTLKSFTVEKGIYQTSNFRVQPTESIVRFPNITNLCPFGEVFNATRFASVYAWNRKRISNCVADYSVLYNSASFSTFKCYGVSPTKLNDLCFTNVYADSFVIRGDEVREIAPGQTGKIADYNYKLPDDFTGCVIAWNSNNLDSKVGGNYNYLYRLFRKSNLKPFERDISTEIYQAGSTPCNGVEGFNCYFPLQSYGFQPTNGVGYQPYRVVVLSFELLHAPATVCGPKKSTNLVKNKCVNFNFNGLTGTGVLTESNKKFLPFQQFGRDIADTTDAVRDPQTLEILDITPCSFGGVSVITPGTNTSNQVAVLYQDVNCTEVPVAIHADQLTPTWRVYSTGSNVFQTRAGCLIGAEHVNNSYECDIPIGAGICASYQTQTNSPRRARSVASQSIIAYTMSLGAENSVAYSNNSIAIPTNFTISVTTEILPVSMTKTSVDCTMYICGDSTECSNLLLQYGSFCTQLNRALTGIAVEQDKNTQEVFAQVKQIYKTPPIKDFGGFNFSQILPDPSKPSKRSFIEDLLFNKVTLADAGFIKQYGDCLGDIAARDLICAQKFNGLTVLPPLLTDEMIAQYTSALLAGTITSGWTFGAGAALQIPFAMQMAYRFNGIGVTQNVLYENQKLIANQFNSAIGKIQDSLSSTASALGKLQDVVNQNAQALNTLVKQLSSNFGAISSVLNDILSRLDKVEAEVQIDRLITGRLQSLQTYVTQQLIRAAEIRASANLAATKMSECVLGQSKRVDFCGKGYHLMSFPQSAPHGVVFLHVTYVPAQEKNFTTAPAICHDGKAHFPREGVFVSNGTHWFVTQRNFYEPQIITTDNTFVSGNCDVVIGIVNNTVYDPLQPELDSGGGGSDIDPYKEFGSSYQLLNFLPLDFFPDLNALVDTATALYEEELTGREHCSPHHTAIRQALVCWDELTKLIAWMSSNITSEQVRTIIVNHVNDTWGLKVRQSLWFHLSCLTFGQHTVQEFLVSFGVWIRTPAPYRPPNAPILSTLPEHTVIC

SEQ ID NO: 10672 - protein, 1301 aa, Artificial Sequence
  SARS-CoV-2/Sweden/01/2020__EPI_ISL_411951 spike protein (1-1147) WhcAg construct
MFVFLVLLPLVSSQCVNLTTRTQLPPAYTNSFTRGVYYPDKVFRSSVLHSTQDLFLPFFSNVTWFHAIHVSGTNGTKRFDNPVLPFNDGVYFASTEKSNIIRGWIFGTTLDSKTQSLLIVNNATNVVIKVCEFQFCNDPFLGVYYHKNNKSWMESEFRVYSSANNCTFEYVSQPFLMDLEGKQGNFKNLREFVFKNIDGYFKIYSKHTPINLVRDLPQGFSALEPLVDLPIGINITRFQTLLALHRSYLTPGDSSSGWTAGAAAYYVGYLQPRTFLLKYNENGTITDAVDCALDPLSETKCTLKSFTVEKGIYQTSNFRVQPTESIVRFPNITNLCPFGEVFNATRFASVYAWNRKRISNCVADYSVLYNSASFSTFKCYGVSPTKLNDLCFTNVYADSFVIRGDEVRQIAPGQTGKIADYNYKLPDDFTGCVIAWNSNNLDSKVGGNYNYLYRLFRKSNLKPFERDISTEIYQAGSTPCNGVEGFNCYFPLQSYGFQPTNGVGYQPYRVVVLSFELLHAPATVCGPKKSTNLVKNKCVNFNFNGLTGTGVLTESNKKFLPFQQFGRDIADTTDAVRDPQTLEILDITPCSFGGVSVITPGTNTSNQVAVLYQDVNCTEVPVAIHADQLTPTWRVYSTGSNVFQTRAGCLIGAEHVNNSYECDIPIGAGICASYQTQTNSPRRARSVASQSIIAYTMSLGAENSVAYSNNSIAIPTNFTISVTTEILPVSMTKTSVDCTMYICGDSTECSNLLLQYGSFCTQLNRALTGIAVEQDKNTQEVFAQVKQIYKTPPIKDCGGFNFSQILPDPSKPSKRSFIEDLLFNKVTLADAGFIKQYGDCLGDIAARDLICAQKFNGLTVLPPLLTDEMIAQYTSALLAGTITSGWTFGAGAALQIPFAMQMAYRFNGIGVTQNVLYENQKLIANQFNSAIGKIQDSLSSTASALGKLQDVVNQNAQALNTLVKQLSSNFGAISSVLNDILSRLDKVEAEVQIDRLITGRLQSLQTYVTQQLIRAAEIRASANLAATKMSECVLGQSKRVDFCGKGYHLMSFPQSAPHGVVFLHVTYVPAQEKNFTTAPAICHDGKAHFPREGVFVSNGTHWFVTQRNFYEPQIITTDNTFVSGNCDVVIGIVNNTVYDPLQPELDSGGGGSDIDPYKEFGSSYQLLNFLPLDFFPDLNALVDTATALYEEELTGREHCSPHHTAIRQALVCWDELTKLIAWMSSNITSEQVRTIIVNHVNDTWGLKVRQSLWFHLSCLTFGQHTVQEFLVSFGVWIRTPAPYRPPNAPILSTLPEHTVIC

SEQ ID NO: 10673 - protein, 1301 aa, Artificial Sequence
  SARS-CoV-2/Tianmen/HBCDC-HB-07/2020__EPI_ISL_412983 spike protein (1-1147) WhcAg construct
MFVFLVLLPLVSSQCVNLTTRTQLPPAYTNSFTRGVYYPDKVFRSSVLHSTQDLFLPFFSNVTWFHAIHVSGTNGTKRFDNPVLPFNDGVYFASTEKSNIIRGWIFGTTLDSKTQSLLIVNNATNVVIKVCEFQFCNDPFLGVYYHKNNKSWMESEFRVYSSANNCTFEYVSQPFLMDLEGKQGNFKNLREFVFKNIDGYFKIYSKHTPINLVRDLPQGFSALEPLVDLPIGINITRFQTLLALHRSYLTPGDSSSGWTAGAAAYYVGYLQPRTFLLKYNENGTITDAVDCALDPLSETKCTLKSFTVEKGIYQTSNFRVQPTESIVRFPNITNLCPFGEVFNATRFASVYAWNRKRISNCVADYSVLYNSASFSTFKCYGVSPTKLNDLCFTNVYADSFVIRGDEVRQIAPGQTGKIADYNYKLPDDFTGCVIAWNSNNLDSKVGGNYNYLYRLFRKSNLKPFERDISTEIYQAGSTPCNGVEGFNCYFPLQSYGFQPTNGVGYQPYRVVVLSFELLHAPATVCGPKKSTNLVKNKCVNFNFNGLTGTGVLTESNKKFLPFQQFGRDIADTTDAVRDPQTLEILDITPCSFGGVSVITPGTNTSNQVAVLYQDLNCTEVPVAIHADQLTPTWRVYSTGSNVFQTRAGCLIGAEHVNNSYECDIPIGAGICASYQTQTNSPRRARSVASQSIIAYTMSLGAENSVAYSNNSIAIPTNFTISVTTEILPVSMTKTSVDCTMYICGDSTECSNLLLQYGSFCTQLNRALTGIAVEQDKNTQEVFAQVKQIYKTPPIKDFGGFNFSQILPDPSKPSKRSFIEDLLFNKVTLADAGFIKQYGDCLGDIAARDLICAQKFNGLTVLPPLLTDEMIAQYTSALLAGTITSGWTFGAGAALQIPFAMQMAYRFNGIGVTQNVLYENQKLIANQFNSAIGKIQDSLSSTASALGKLQDVVNQNAQALNTLVKQLSSNFGAISSVLNDILSRLDKVEAEVQIDRLITGRLQSLQTYVTQQLIRAAEIRASANLAATKMSECVLGQSKRVDFCGKGYHLMSFPQSAPHGVVFLHVTYVPAQEKNFTTAPAICHDGKAHFPREGVFVSNGTHWFVTQRNFYEPQIITTDNTFVSGNCDVVIGIVNNTVYDPLQPELDSGGGGSDIDPYKEFGSSYQLLNFLPLDFFPDLNALVDTATALYEEELTGREHCSPHHTAIRQALVCWDELTKLIAWMSSNITSEQVRTIIVNHVNDTWGLKVRQSLWFHLSCLTFGQHTVQEFLVSFGVWIRTPAPYRPPNAPILSTLPEHTVIC

SEQ ID NO: 10674 - protein, 1301 aa, Artificial Sequence
  SARS-CoV-2/Hong Kong/case42_VM20002493/2020__EPI_ISL_414527 spike protein (1-1147) WhcAg construct
MFVFLVLLPLVSSQCVNLTTRTQLPPAYTNSFTRGVYYPDKVFRSSVLHSTQDLFLPFFSNVTWFHAIHVSGTNGTKRFDNPVLPFNDGVYFASTEKSNIIRGWIFGTTLDSKTQSLLIVNNATNVVIKVCEFQFCNDPFLGVYYHKNNKSWMESEFRVYSSANNCTFEYVSQPFLMDLEGKQGNFKNLREFVFKNIDGYFKIYSKHTPINLVRDLPQGFSALEPLVDLPIGINITRFQTLLALHRSYLTPGDSSSGWTAGAAAYYVGYLQPRTFLLKYNENGTITDAVDCALDPLSETKCTLKSFTVEKGIYQTSNFRVQPTESIVRFPNITNLCPFGEVFNATRFASVYAWNRKRISNCVADYSVLYNSASFSTFKCYGVSPTKLNDLCFTNVYADSFVIRGDEVRQIAPGQTGKIADYNYKLPDDFTGCVIAWNSNNLDSKVGGNYNYLYRLFRKSNLKPFERDISTEIYQAGSTPCNGVEGFNCYFPLQSYGFQPTNGVGYQPYRVVVLSFELLHAPATVCGPKKSTNLVKNKCVNFNFNGLTGTGVLTESNKKFLPFQQFGRDIADTTDAVRDPQTLEILDITPCSFGGVSVITPGTNTSNQVAVLYQDVNCTEVPVAIHADQLTPTWRVYSTGSNVFQTRAGCLIGAEHVNNSYECDIPIGAGICASYQTQTNSPRRARSVASQSIIAYTMSLGAENSVAYSNNSIAIPTNFAISVTTEILPVSMTKTSVDCTMYICGDSTECSNLLLQYGSFCTQLNRALTGIAVEQDKNTQEVFAQVKQIYKTPPIKDFGGFNFSQILPDPSKPSKRSFIEDLLFNKVTLADAGFIKQYGDCLGDIAARDLICAQKFNGLTVLPPLLTDEMIAQYTSALLAGTITSGWTFGAGAALQIPFAMQMAYRFNGIGVTQNVLYENQKLIANQFNSAIGKIQDSLSSTASALGKLQDVVNQNAQALNTLVKQLSSNFGAISSVLNDILSRLDKVEAEVQIDRLITGRLQSLQTYVTQQLIRAAEIRASANLAATKMSECVLGQSKRVDFCGKGYHLMSFPQSAPHGVVFLHVTYVPAQEKNFTTAPAICHDGKAHFPREGVFVSNGTHWFVTQRNFYEPQIITTDNTFVSGNCDVVIGIVNNTVYDPLQPELDSGGGGSDIDPYKEFGSSYQLLNFLPLDFFPDLNALVDTATALYEEELTGREHCSPHHTAIRQALVCWDELTKLIAWMSSNITSEQVRTIIVNHVNDTWGLKVRQSLWFHLSCLTFGQHTVQEFLVSFGVWIRTPAPYRPPNAPILSTLPEHTVIC

SEQ ID NO: 10675 - protein, 1301 aa, Artificial Sequence
  SARS-CoV-2/USA/CruiseA-23/2020__EPI_ISL_414482 spike protein (1-1147) WhcAg construct
MFVFLVLLPLVSSQCVNLTTRTQLPPAYTNSFTRGVYYPDKVFRSSVLHSTQDLFLPFFSNVTWFHAIHVSGTNGTKRFDNPVLPFNDGVYFASTEKSNIIRGWIFGTTLDSKTQSLLIVNNATNVVIKVCEFQFCNDPFLGVYYHKNNKSWMESEFRVYSSANNCTFEYVSQPFLMDLEVKQGNFKNLREFVFKNIDGYFKIYSKHTPINLVRDLPQGFSALEPLVDLPIGINITRFQTLLALHRSYLTPGDSSSGWTAGAAAYYVGYLQPRTFLLKYNENGTITDAVDCALDPLSETKCTLKSFTVEKGIYQTSNFRVQPTESIVRFPNITNLCPFGEVFNATRFASVYAWNRKRISNCVADYSVLYNSASFSTFKCYGVSPTKLNDLCFTNVYADSFVIRGDEVRQIAPGQTGKIADYNYKLPDDFTGCVIAWNSNNLDSKVGGNYNYLYRLFRKSNLKPFERDISTEIYQAGSTPCNGVEGFNCYFPLQSYGFQPTNGVGYQPYRVVVLSFELLHAPATVCGPKKSTNLVKNKCVNFNFNGLTGTGVLTESNKKFLPFQQFGRDIADTTDAVRDPQTLEILDITPCSFGGVSVITPGTNTSNQVAVLYQDVNCTEVPVAIHADQLTPTWRVYSTGSNVFQTRAGCLIGAEHVNNSYECDIPIGAGICASYQTQTNSPRRARSVASQSIIAYTMSLGAENSVAYSNNSIAIPTNFTISVTTEILPVSMTKTSVDCTMYICGDSTECSNLLLQYGSFCTQLNRALTGIAVEQDKNTQEVFAQVKQIYKTPPIKDFGGFNFSQILPDPSKPSKRSFIEDLLFNKVTLADAGFIKQYGDCLGDIAARDLICAQKFNGLTVLPPLLTDEMIAQYTSALLAGTITSGWTFGAGAALQIPFAMQMAYRFNGIGVTQNVLYENQKLIANQFNSAIGKIQDSLSSTASALGKLQDVVNQNAQALNTLVKQLSSNFGAISSVLNDILSRLDKVEAEVQIDRLITGRLQSLQTYVTQQLIRAAEIRASANLAATKMSECVLGQSKRVDFCGKGYHLMSFPQSAPHGVVFLHVTYVPAQEKNFTTAPAICHDGKAHFPREGVFVSNGTHWFVTQRNFYEPQIITTDNTFVSGNCDVVIGIVNNTVYDPLQPELDSGGGGSDIDPYKEFGSSYQLLNFLPLDFFPDLNALVDTATALYEEELTGREHCSPHHTAIRQALVCWDELTKLIAWMSSNITSEQVRTIIVNHVNDTWGLKVRQSLWFHLSCLTFGQHTVQEFLVSFGVWIRTPAPYRPPNAPILSTLPEHTVIC

SEQ ID NO: 10676 - protein, 1301 aa, Artificial Sequence
  SARS-CoV-2/Hong Kong/case85_VM20002868/2020__EPI_ISL_414519 spike protein (1-1147) WhcAg construct
MFVFLVLVPLVSSQCVNLTTRTQLPPAYTNSFTRGVYYPDKVFRSSVLHSTQDLFLPFFSNVTWFHAIHVSGTNGTKRFDNPVLPFNDGVYFASTEKSNIIRGWIFGTTLDSKTQSLLIVNNATNVVIKVCEFQFCNDPFLGVYYHKNNKSWMESEFRVYSSANNCTFEYVSQPFLMDLEGKQGNFKNLREFVFKNIDGYFKIYSKHTPINLVRDLPQGFSALEPLVDLPIGINITRFQTLLALHRSYLTPGDSSSGWTAGAAAYYVGYLQPRTFLLKYNENGTITDAVDCALDPLSETKCTLKSFTVEKGIYQTSNFRVQPTESIVRFPNITNLCPFGEVFNATRFASVYAWNRKRISNCVADYSVLYNSASFSTFKCYGVSPTKLNDLCFTNVYADSFVIRGDEVRQIAPGQTGKIADYNYKLPDDFTGCVIAWNSNNLDSKVGGNYNYLYRLFRKSNLKPFERDISTEIYQAGSTPCNGVEGFNCYFPLQSYGFQPTNGVGYQPYRVVVLSFELLHAPATVCGPKKSTNLVKNKCVNFNFNGLTGTGVLTESNKKFLPFQQFGRDIADTTDAVRDPQTLEILDITPCSFGGVSVITPGTNTSNQVAVLYQDVNCTEVPVAIHADQLTPTWRVYSTGSNVFQTRAGCLIGAEHVNNSYECDIPIGAGICASYQTQTNSPRRARSVASQSIIAYTMSLGAENSVAYSNNSIAIPTNFTISVTTEILPVSMTKTSVDCTMYICGDSTECSNLLLQYGSFCTQLNRALTGIAVEQDKNTQEVFAQVKQIYKTPPIKDFGGFNFSQILPDPSKPSKRSFIEDLLFNKVTLADAGFIKQYGDCLGDIAARDLICAQKFNGLTVLPPLLTDEMIAQYTSALLAGTITSGWTFGAGAALQIPFAMQMAYRFNGIGVTQNVLYENQKLIANQFNSAIGKIQDSLSSTASALGKLQDVVNQNAQALNTLVKQLSSNFGAISSVLNDILSRLDKVEAEVQIDRLITGRLQSLQTYVTQQLIRAAEIRASANLAATKMSECVLGQSKRVDFCGKGYHLMSFPQSAPHGVVFLHVTYVPAQEKNFTTAPAICHDGKAHFPREGVFVSNGTHWFVTQRNFYEPQIITTDNTFVSGNCDVVIGIVNNTVYDPLQPELDSGGGGSDIDPYKEFGSSYQLLNFLPLDFFPDLNALVDTATALYEEELTGREHCSPHHTAIRQALVCWDELTKLIAWMSSNITSEQVRTIIVNHVNDTWGLKVRQSLWFHLSCLTFGQHTVQEFLVSFGVWIRTPAPYRPPNAPILSTLPEHTVIC

SEQ ID NO: 10677 - protein, 1301 aa, Artificial Sequence; identical to SEQ ID NO: 10667
  SARS-CoV-2/England/200990660/2020__EPI_ISL_414523 spike protein (1-1147) WhcAg construct

SEQ ID NO: 10678 - protein, 1301 aa, Artificial Sequence
  SARS-CoV-2/Australia/NSW09/2020__EPI_ISL_413595 spike protein (1-1147) WhcAg construct
MFVFLVLLPLVSSQCVNLTTRTQLPPAYTNSFTRGVYYPDKVFRSSVLHSTQDLFLPFFSNVTWFHAIHVSGTNGTKRFDNPVLPFNDGVYFASTEKSNIIRGWIFGTTLDSKTQSLLIVNNATNVVIKVCEFQFCNDPFLGVYYHKNNKSWMESEFRVYSSANNCTFEYVSQPFLMDLEGKQGNFKNLREFVFKNIDGYFKIYSKHTPINLVRDLPQGFSALEPLVDLPIGINITRFQTLLALHRSYLTPGDSSSGWTAGAAAYYVGYLQPRTFLLKYNENGTITDAVDCALDPLSETKCTLKSFTVEKGIYQTSNFRVQPTESIVRFPNITNLCPFGEVFNATRFASVYAWNRKRISNCVADYSVLYNSASFSTFKCYGVSPTKLNDLCFTNVYADSFVIRGDEVRQIAPGQTGKIADYNYKLPDDFTGCVIAWNSNNLDSKVGGNYNYLYRLFRKSNLKPFERDISTEIYQAGSTPCNGVEGFNCYFPLQSYGFQPTNGVGYQPYRVVVLSFELLHAPATVCGPKKSTNLVKNKCVNFNFNGLTGTGVLTESNKKFLPFQQFGRDIADTTDAVRDPQTLEILDITPCSFGGVSVITPGTNTSNQVAVLYQDVNCTEVPVAIHADQLTPTWRVYSTGSNVFQTRAGCLIGAEHVNNSYECDIPIGAGICASYQTQTNSPRRARSVASQSIIAYTMSLGAENSVAYSNNSIAIPTNFTISVTTEILPVSMTKTSVDCTMYICGDSTECSNLLLQYGSFCTQLNRALTGIAVEQDKNTQEVFAQVKQIYKTPPIKDFGGFNFSQILPDPSKPSKRSFIEDLLFNKVTLADAGFIKQYGDCLGDIAARDLICAQKFNGLTVLPPLLTDEMIAQYTSALLAGTITSGWTFGAGAALQIPFAMQMAYRFNGIGVTQNVLYENQKLIANQFNSAIGKIQDSLSFTASALGKLQDVVNQNAQALNTLVKQLSSNFGAISSVLNDILSRLDKVEAEVQIDRLITGRLQSLQTYVTQQLIRAAEIRASANLAATKMSECVLGQSKRVDFCGKGYHLMSFPQSAPHGVVFLHVTYVPAQEKNFTTAPAICHDGKAHFPREGVFVSNGTHWFVTQRNFYEPQIITTDNTFVSGNCDVVIGIVNNTVYDPLQPELDSGGGGSDIDPYKEFGSSYQLLNFLPLDFFPDLNALVDTATALYEEELTGREHCSPHHTAIRQALVCWDELTKLIAWMSSNITSEQVRTIIVNHVNDTWGLKVRQSLWFHLSCLTFGQHTVQEFLVSFGVWIRTPAPYRPPNAPILSTLPEHTVIC

SEQ ID NO: 10679 - protein, 1301 aa, Artificial Sequence; identical to SEQ ID NO: 10659
  SARS-CoV-2/Australia/NSW10/2020__EPI_ISL_413596 spike protein (1-1147) WhcAg construct

SEQ ID NO: 10680 - protein, 1301 aa, Artificial Sequence
  SARS-CoV-2/Switzerland/1000477797/2020__EPI_ISL_413023 spike protein (1-1147) WhcAg construct
MFVFLVLLPLVSSQCVNLTTRTQLPPAYTNSFTRGVYYPDKVFRSSVLHSTQDLFLPFFSNVTWFHAIHVSGTNGTKRFDNPVLPFNDGVYFASTEKSNIIRGWIFGTTLDSKTQSLLIVNNATNVVIKVCEFQFCNDPFLGVYYHKNNKSWMESEFRVYSSANNCTFEYVSQPFLMDLEGKQGNFKNLREFVFKNIDGYFNIYSKHTPINLVRDLPQGFSALEPLVDLPIGINITRFQTLLALHRSYLTPGDSSSGWTAGAAAYYVGYLQPRTFLLKYNENGTITDAVDCALDPLSETKCTLKSFTVEKGIYQTSNFRVQPTESIVRFPNITNLCPFGEVFNATRFASVYAWNRKRISNCVADYSVLYNSASFSTFKCYGVSPTKLNDLCFTNVYADSFVIRGDEVRQIAPGQTGKIADYNYKLPDDFTGCVIAWNSNNLDSKVGGNYNYLYRLFRKSNLKPFERDISTEIYQAGSTPCNGVEGFNCYFPLQSYGFQPTNGVGYQPYRVVVLSFELLHAPATVCGPKKSTNLVKNKCVNFNFNGLTGTGVLTESNKKFLPFQQFGRDIADTTDAVRDPQTLEILDITPCSFGGVSVITPGTNTSNQVAVLYQGVNCTEVPVAIHADQLTPTWRVYSTGSNVFQTRAGCLIGAEHVNNSYECDIPIGAGICASYQTQTNSPRRARSVASQSIIAYTMSLGAENSVAYSNNSIAIPTNFTISVTTEILPVSMTKTSVDCTMYICGDSTECSNLLLQYGSFCTQLNRALTGIAVEQDKNTQEVFAQVKQIYKTPPIKDFGGFNFSQILPDPSKPSKRSFIEDLLFNKVTLADAGFIKQYGDCLGDIAARDLICAQKFNGLTVLPPLLTDEMIAQYTSALLAGTITSGWTFGAGAALQIPFAMQMAYRFNGIGVTQNVLYENQKLIANQFNSAIGKIQDSLSSTASALGKLQDVVNQNAQALNTLVKQLSSNFGAISSVLNDILSRLDKVEAEVQIDRLITGRLQSLQTYVTQQLIRAAEIRASANLAATKMSECVLGQSKRVDFCGKGYHLMSFPQSAPHGVVFLHVTYVPAQEKNFTTAPAICHDGKAHFPREGVFVSNGTHWFVTQRNFYEPQIITTDNTFVSGNCDVVIGIVNNTVYDPLQPELDSGGGGSDIDPYKEFGSSYQLLNFLPLDFFPDLNALVDTATALYEEELTGREHCSPHHTAIRQALVCWDELTKLIAWMSSNITSEQVRTIIVNHVNDTWGLKVRQSLWFHLSCLTFGQHTVQEFLVSFGVWIRTPAPYRPPNAPILSTLPEHTVIC

SEQ ID NO: 10681 - protein, 1301 aa, Artificial Sequence
  SARS-CoV-2/Belgium/BA-02291/2020__EPI_ISL_415159 spike protein (1-1147) WhcAg construct
MFVFLVLLPLVSSQCVNLTTRTQLPPAYTNSFTRGVYYPDKVFRSSVLHSTQDLFLPFFSNVTWFHAIHVSGTNGTKRFDNPVLPFNDGVYFASTEKSNIIRGWIFGTTLDSKTQSLLIVNNATNVVIKVCEFQFCNDPFLGVYYHKNNKSWMESEFRVYSSANNCTFEYVSQPFLMDLEGKQGNFKNLREFVFKNIDGYFKIYSKHTPINLVRDLPQGFSALEPLVDLPIGINITRFQTLLALHRSYLTPGDSSSGWTAGAAAYYVGYLQPRTFLLKYNENGTITDAVDCALDPLSETKCTLKSFTVEKGIYQTSNFRVQPTESIVRFPNITNLCPFGEVFNATRFASVYAWNRKRISNCVADYSVLYNSASFSTFKCYGVSPTKLNDLCFTNVYADSFVIRGDEVRQIAPGQTGKIADYNYKLPDDFTGCVIAWNSNNLDSKVGGNYNYLYRLFRRSNLKPFERDISTEIYQAGSTPCNGVEGFNCYFPLQSYGFQPTNGVGYQPYRVVVLSFELLPAPATVCGPKKSTNLVKNKCVNFNFNGLTGTGVLTESNKKFLPFQQFGRDIADTTDAVRDPQTLEILDITPCSFGGVSVITPGTNTSNQVAVLYQGVNCTEVPVAIHADQLTPTWRVYSTGSNVFQTRAGCLIGAEHVNNSYECDIPIGAGICASYQTQTNSPRRARSVASQSIIAYTMSLGAENSVAYSNNSIAIPTNFTISVTTEILPVSMTKTSVDCTMYICGDSTECSNLLLQYGSFCTQLNRALTGIAVEQDKNTQEVFAQVKQIYKTPPIKDFGGFNFSQILPDPSKPSKRSFIEDLLFNKVTLADAGFIKQYGDCLGDIAARDLICAQKFNGLTVLPPLLTDEMIAQYTSALLAGTITSGWTFGAGAALQIPFAMQMAYRFNGIGVTQNVLYENQKLIANQFNSAIGKIQDSLSSAAPALGKLQDVVNQNAQALNTLVKQLSSNFGAISSVLNDILSRLDKVEAEVQIDRLITGRLQSLQTYVTQQLIRAAEIRASANLAATKMSECVLGQSKRVDFCGKGYHLMSFPQSAPHGVVFLHVTYVPAQEKNFTTAPAICHDGKAHFPREGVFVSNGTHWFVTQRNFYEPQIITTDNTFVSGNCDVVIGIVNNTVYDPLQPELDSGGGGSDIDPYKEFGSSYQLLNFLPLDFFPDLNALVDTATALYEEELTGREHCSPHHTAIRQALVCWDELTKLIAWMSSNITSEQVRTIIVNHVNDTWGLKVRQSLWFHLSCLTFGQHTVQEFLVSFGVWIRTPAPYRPPNAPILSTLPEHTVIC

SEQ ID NO: 10682 - protein, 1301 aa, Artificial Sequence
  SARS-CoV-2/USA/WA8-UW5/2020__EPI_ISL_413486 spike protein (1-1147) WhcAg construct
MFVFLVLLPLVSSQCVNLTTRTQLPPAYTNSFTRGVYYPDKVFRSSVLHSTQDLFLPFFSNVTWFHAIHVSGTNGTKRFDNPVLPFNDGVYFASTEKSNIIRGWIFGTTLDSKTQSLLIVNNATNVVIKVCEFQFCNDPFLGVYYHKNNKSWMESEFRVYSSANNCTFEYVSQPFLMDLEGKQGNFKNLREFVFKNIDGYFKIYSKHTPINLVRDLPQGFSALEPLVDLPIGINITRFQTLLALHRSYLTPGDSSSGWTAGAAAYYVGYLQPRTFLLKYNENGTITDAVDCALDPLSETKCTLKSFTVEKGIYQTSNFRVQPTESIVRFPNITNLCPFGEVFNATRFASVYAWNRKRISNCVADYSVLYNSASFSTFKCYGVSPTKLNDLCFTNVYADSFVIRGDEVRQIAPGQTGKIADYNYKLPDDFTGCVIAWNSNNLDSKVGGNYNYLYRLFRKSNLKPFERDISTEIYQAGSTPCNGVEGFNCYFPLQSYGFQPTNGVGYQPYRVVVLSFELLHAPATVCGPKKSTNLVKNKCVNFNFNGLTGTGVLTESNKKFLPFQQFGRDIADTTDAVRDPQTLEILDITPCSFGGVSVITPGTNTSNQVAVLYQDVNCTEVPVAIHADQLTPTWRVYSTGSNVFQTRAGCLIGAEYVNNSYECDIPIGAGICASYQTQTNSPRRARSVASQSIIAYTMSLGAENSVAYSNNSIAIPTNFTISVTTEILPVSMTKTSVDCTMYICGDSTECSNLLLQYGSFCTQLNRALTGIAVEQDKNTQEVFAQVKQIYKTPPIKDFGGFNFSQILPDPSKPSKRSFIEDLLFNKVTLADAGFIKQYGDCLGDIAARDLICAQKFNGLTVLPPLLTDEMIAQYTSALLAGTITSGWTFGAGAALQIPFAMQMAYRFNGIGVTQNVLYENQKLIANQFNSAIGKIQDSLSSTASALGKLQDVVNQNAQALNTLVKQLSSNFGAISSVLNDILSRLDKVEAEVQIDRLITGRLQSLQTYVTQQLIRAAEIRASANLAATKMSECVLGQSKRVDFCGKGYHLMSFPQSAPHGVVFLHVTYVPAQEKNFTTAPAICHDGKAHFPREGVFVSNGTHWFVTQRNFYEPQIITTDNTFVSGNCDVVIGIVNNTVYDPLQPELDSGGGGSDIDPYKEFGSSYQLLNFLPLDFFPDLNALVDTATALYEEELTGREHCSPHHTAIRQALVCWDELTKLIAWMSSNITSEQVRTIIVNHVNDTWGLKVRQSLWFHLSCLTFGQHTVQEFLVSFGVWIRTPAPYRPPNAPILSTLPEHTVIC

SEQ ID NO: 10683 - protein, 1301 aa, Artificial Sequence
  SARS-CoV-2/England/20102000506/2020__EPI_ISL_415147 spike protein (1-1147) WhcAg construct
MFVFLVLLPLVSSQCVNLTTRTQLPPAYTNSFTRGVYYPDKVFRSSVLHSTQDLFLPFFSNVTWFHAIHVSGTNGTKRFDNPVLPFNDGVYFASTEKSNIIRGWIFGTTLDSKTQSLLIVNNATNVVIKVCEFQFCNDPFLGVYYHKNNKSWMESEFRVYSSANNCTFEYVSQPFLMDLEGKQGNFKNLREFVFKNIDGYFKIYSKHTPINLVRDLPQGFSALEPLVDLPIGINITRFQTLLALHRSYLTPGDSSSGWTAGAAAYYVGYLQPRTFLLKYNENGTITDAVDCALDPLSETKCTLKSFTVEKGIYQTSNFRVQPTESIVRFPNITNLCPFGEVFNATRFASVYAWNRKRISNCVADYSVLYNSASFSTFKCYGVSPTKLNDLCFTNVYADSFVIRGDEVRQIAPGQTGKIADYNYKLPDDFTGCVIAWNSNNLDSKVGGNYNYLYRLFRKSNLKPFERDISTEIYQAGSTPCNGVEGFNCYFPLQSYGFQPTNGVGYQPYRVVVLSFELLHAPATVCGPKKSTNLVKNKCVNFNFNGLTGTGVLTESNKKFLPFQQFGRDIADTTDAVRDPQTLEILDITPCSFGGVSVITPGTNTSNQVAVLYQGVNCTEVPVAIHADQLTPTWRVYSTGSNVFQTRAGCLIGAEHVNNSYECDIPIGAGICASYQTQTNSPRRARSVASQSIIAYTMSLGAENSVAYSNNSIAIPTNFTISVTTEILPVSMTKTSVDCTMYICGDSTECSNLLLQYGSFCTQLNRALTGIAVEQDKNTQEVFAQVKQIYKTPPIKDFGGFNFSQILPDPSKPSKRSFIEDLLFNKVTLADAGFIKQYGYCLGDIAARDLICAQKFNGLTVLPPLLTDEMIAQYTSALLAGTITSGWTFGAGAALQIPFAMQMAYRFNGIGVTQNVLYENQKLIANQFNSAIGKIQDSLSSTASALGKLQDVVNQNAQALNTLVKQLSSNFGAISSVLNDILSRLDKVEAEVQIDRLITGRLQSLQTYVTQQLIRAAEIRASANLAATKMSECVLGQSKRVDFCGKGYHLMSFPQSAPHGVVFLHVTYVPAQEKNFTTAPAICHDGKAHFPREGVFVSNGTHWFVTQRNFYEPQIITTDNTFVSGNCDVVIGIVNNTVYDPLQPELDSGGGGSDIDPYKEFGSSYQLLNFLPLDFFPDLNALVDTATALYEEELTGREHCSPHHTAIRQALVCWDELTKLIAWMSSNITSEQVRTIIVNHVNDTWGLKVRQSLWFHLSCLTFGQHTVQEFLVSFGVWIRTPAPYRPPNAPILSTLPEHTVIC

SEQ ID NO: 10684 - protein, 1301 aa, Artificial Sequence
  SARS-CoV-2/Belgium/VAG-03013/2020__EPI_ISL_415155 spike protein (1-1147) WhcAg construct
MFVFLVLLPLVSSQCVNLTTRTQLPPAYTNSFTRGVYYPDKVFRSSVLHSTQDLFLPFFSNVTWFHAIHVSGTNGTKRFDNPVLPFNDGVYFASTEKSNIIRGWIFGTTLDSKTQSLLIVNNATNVVIKVCEFQFCNDPFLGVYYHKNNKSWMESEFRVYSSANNCTFEYVSQPFLMDLEGKQGNFKNLREFVFKNIDGYFKIYSKHTPINLVRDLPQGFSALEPLVDLPIGINITRFQTLLALHRSYLTPGDSSSGWTAGAAAYYVGYLQPRTFLLKYNENGTITDAVDCALDPLSETKCTLKSFTVEKGIYQTSNFRVQPTESIVRFPNITNLCPFGEVFNATRFASVYAWNRKRISNCVADYSVLYNSASFSTFKCYGVSPTKLNDLCFTNVYADSFVIRGDEVRQIAPGQTGKIADYNYKLPDDFTGCVIAWNSNNLDSKVGGNYNYLYRLFRKSNLKPFERDISTEIYQAGSTPCNGVEGFNCYFPLQSYGFQPTNGVGYQPYRVVVLSFELLHAPATVCGPKKSTNLVKNKCVNFNFNGLTGTGVLTESNKKFLPFQQFGRDIADTTDAVRDPQTLEILDITPCSFGGVSVITPGTNTSNQVAVLYQGVNCTEVPVAIHADQLTPTWRVYSTGSNVFQTRAGCLIGAEHVNNSYECDIPIGAGICASYQTQTNSPRRARSVASQSIIAYTMSLGAENSVAYSNNSIAIPTNFTISVTTEILPVSMTKTSVDCTMYICGDSTECSNLLLQYGSFCTQLNRALTGIAVEQDKNTQEVFAQVKQIYKTPPIKDFGGFNFSQILPDPSKPSKRSFIEDLLFNKVTLADAGFIKQYGDCLGDIAARDLICAQKFNGLTVLPPLLTDEMIAQYTSALLAGTITSGWTFGAGAALQIPFAMQMAYRFNGIGVTQNVLYENQKLIANQFNSAIGKIQDSLSSTATALGKLQDVVNQNAQALNTLVKQLSSNFGAISSVLNDILSRLDKVEAEVQIDRLITGRLQSLQTYVTQQLIRAAEIRASANLAATKMSECVLGQSKRVDFCGKGYHLMSFPQSAPHGVVFLHVTYVPAQEKNFTTAPAICHDGKAHFPREGVFVSNGTHWFVTQRNFYEPQIITTDNTFVSGNCDVVIGIVNNTVYDPLQPELDSGGGGSDIDPYKEFGSSYQLLNFLPLDFFPDLNALVDTATALYEEELTGREHCSPHHTAIRQALVCWDELTKLIAWMSSNITSEQVRTIIVNHVNDTWGLKVRQSLWFHLSCLTFGQHTVQEFLVSFGVWIRTPAPYRPPNAPILSTLPEHTVIC

SEQ ID NO: 10685 - protein, 1301 aa, Artificial Sequence
  SARS-CoV-2/Belgium/BC-03016/2020__EPI_ISL_415157 spike protein (1-1147) WhcAg construct
MFVFLVLLPLVSSQCVNLTTRTQLPPAYTNSFTRGVYYPDKVFRSSVLHSTQDLFLPFFSNVTWFHAIHVSGTNGTKRFDNPVLPFNDGVYFASTEKSNIIRGWIFGTTLDSKTQSLLIVNNATNVVIKVCEFQFCNDPFLGVYYHKNNKSWMESEFRVYSSANNCTFEYVSQPFLMDLEGKQGNFKNLREFVFKNIDGYFKIYSKHTPINLVRDLPQGFSALEPLVDLPIGINITRFQTLLALHRSYLTPGDSSSGWTAGAAAYYVGYLQPRTFLLKYNENGTITDAVDCALDPLSETKCTLKSFTVEKGIYQTSNFRVQPTESIVRFPNITNLCPFGEVFNATRFASVYAWNRKRISNCVADYSVLYNSASFSTFKCYGVSPTKLNDLCFTNVYADSFVIRGDEVRQIAPGQTGKIADYNYKLPDDFTGCVIAWNSNNLDSKVGGNYNYLYRLFRKSNLKPFERDISTEIYQAGSTPCNGVEGFNCYFPLQSYGFQPTNGVGYQPYRVVVLSFELLHAPATVCGPKKSTNLVKNKCVNFNFNGLTGTGVLTESNKKFLPFQQFGRDIADTTDAVRDPQTLEILDITPCSFGGVSVITPGTNTSNQVAVLYQGVNCTEVPVAIHADQLTPTWRVYSTGSNVFQTRAGCLIGAEHVNNSYECDIPIGAGICASYQTQTNSPRRARSVASQSIIAYTMSLGAENSVAYSNNSIAIPTNFTISVTTEILPVSMTKTSVDCTMYICGDSTECSNLLLQYGSFCTQLNRALTGIAVEQDKNTQEVFAQVKQIYKTPPIKDFGGFNFSQILPDPSKPSKRSFIEDLLFNKVTLADAGFIKQYGDCLGDIAARDLICAQKFNGLTVLPPLLTDEMIAQYTSALLAGTITSGWTFGAGAALQIPFAMQMAYRFNGIGVTQNVLYENQKLIANQFNSAIGKIQDSLSSTAPALGKLQDVVNQNAQALNTLVKQLSSNFGAISSVLNDILSRLDKVEAEVQIDRLITGRLQSLQTYVTQQLIRAAEIRASANLAATKMSECVLGQSKRVDFCGKGYHLMSFPQSAPHGVVFLHVTYVPAQEKNFTTAPAICHDGKAHFPREGVFVSNGTHWFVTQRNFYEPQIITTDNTFVSGNCDVVIGIVNNTVYDPLQPELDSGGGGSDIDPYKEFGSSYQLLNFLPLDFFPDLNALVDTATALYEEELTGREHCSPHHTAIRQALVCWDELTKLIAWMSSNITSEQVRTIIVNHVNDTWGLKVRQSLWFHLSCLTFGQHTVQEFLVSFGVWIRTPAPYRPPNAPILSTLPEHTVIC

SEQ ID NO: 10686 - protein, 1301 aa, Artificial Sequence
  SARS-CoV-2/Germany/BavPat3/2020__EPI_ISL_414521 spike protein (1-1147) WhcAg construct
MFVFLVLLPLVSSQCVNLTTRTQLPPAYTNSFTRGVYYPDKVFRSSVLHSTQDLFLPFFSNVTWFHAIHVSGTNGTKRFDNPVLPFNDGVYFASTEKSNIIRGWIFGTTLDSKTQSLLIVNNATNVVIKVCEFQFCNDPFLGVYYHKNNKSWMESEFRVYSSANNCTFEYVSQPFLMDLEGKQGNFKNLREFVFKNIDGYFKIYSKHTPINLVRDLPQGFSALEPLVDLPIGINITRFQTLLALHRSYLTPGDSSSGWTAGAAAYYVGYLQPRTFLLKYNENGTITDAVDCALDPLSETKCTLKSFTVEKGIYQTSNFRVQPTESIVRFPNITNLCPFGEVFNATRFASVYAWNRKRISNCVADYSVLYNSASFSTFKCYGVSPTKLNDLCFTNVYADSFVIRGDEVRQIAPGQTGKIADYNYKLPDDFTGCVIAWNSNNLDSKVGGNYNYLYRLFRKSNLKPFERDISTEIYQAGSTPCNGVEGFNCYFPLQSYGFQPTNGVGYQPYRVVVLSFELLHAPATVCGPKKSTNLVKNKCVNFNFNGLTGTGVLTESNKKFLPFQQFGRDIADTTDAVRDPQTLEILDITPCSFGGVSVITPGTNTSNQVAVLYQDVNCTEVPVAIHADQLTPTWRVYSTGSNVFQTRAGCLIGAEHVNNSYECDIPIGAGICASYQTQTNSPRRARSVASQSIIAYTMSLGAENSVAYSNNSIAIPTNFTISVTTEILPVSMTKTSVDCTMYICGDSTECSNLLLQYGSFCTQLNRALTGIAVEQDKNTQQVFAQVKQIYKTPPIKDFGGFNFSQILPDPSKPSKRSFIEDLLFNKVTLADAGFIKQYGDCLGDIAARDLICAQKFNGLTVLPPLLTDEMIAQYTSALLAGTITSGWTFGAGAALQIPFAMQMAYRFNGIGVTQNVLYENQKLIANQFNSAIGKIQDSLSSTASALGKLQDVVNQNAQALNTLVKQLSSNFGAISSVLNDILSRLDKVEAEVQIDRLITGRLQSLQTYVTQQLIRAAEIRASANLAATKMSECVLGQSKRVDFCGKGYHLMSFPQSAPHGVVFLHVTYVPAQEKNFTTAPAICHDGKAHFPREGVFVSNGTHWFVTQRNFYEPQIITTDNTFVSGNCDVVIGIVNNTVYDPLQPELDSGGGGSDIDPYKEFGSSYQLLNFLPLDFFPDLNALVDTATALYEEELTGREHCSPHHTAIRQALVCWDELTKLIAWMSSNITSEQVRTIIVNHVNDTWGLKVRQSLWFHLSCLTFGQHTVQEFLVSFGVWIRTPAPYRPPNAPILSTLPEHTVIC

SEQ ID NO: 10687 - protein, 1301 aa, Artificial Sequence
  SARS-CoV-2/France/HF1805/2020__EPI_ISL_414628 spike protein (1-1147) WhcAg construct
MFVFLVLLPLVSSQCVNLTTRTQLPPAYTNSFTRGVYYPDKVFRSSVLHSTQDLFLPFFSNVTWFHAIHVSGTNGTKRFDNPVLPFNDGVYFASTEKSNIIRGWIFGTTLDSKTQSLLIVNNATNVVIKVCEFQFCNDPFLGVYYHKNNKSWMESEFRVYSSANNCTFEYVSQPFLMDLEGKQGNFKNLREFVFKNIDGYFKIYSKHTPINLVRDLPQGFSALEPLVDLPIGINITRFQTLLALHRSYLTPGDSSSGWTAGAAAYYVGYLQPRTFLLKYNENGTITDAVDCALDPLSETKCTLKSFTVEKGIYQTSNFRVQPTESIVRFPNITNLCPFGEVFNATRFASVYAWNRKRISNCVADYSVLYNSASFSTFKCYGVSPTKLNDLCFTNVYADSFVIRGDEVRQIAPGQTGKIADYNYKLPDDFTGCVIAWNSNNLDSKVGGNYNYLYRLFRKSNLKPFERDISTEIYQAGSTPCNGVEGFNCYFPLQSYGFQPTNGVGYQPYRVVVLSFELLHAPATVCGPKKSTNLVKNKCVNFNFNGLTGTGVLTESNKKFLPFQQFGRDIADTTDAVRDPQTLEILDITPCSFGGVSVITPGTNTSNQVAVLYQGVNCTEVPVAIHADQLTPTWRVYSTGSNVFQTRAGCLIGAEHVNNSYECDIPIGAGICASYQTQTNSPRRARSVASQSIIAYTMSLGAENSVAYSNNSIAIPTNFTISVTTEILPVSMTKTSVDCTMYICGDSTECSNLLLQYGSFCTQLNRALTGIAVEQDKNTQEVFAQVKQIYKTPPIKDFGGFNFSQILPDPSKPSKRSFIEDLLFNKVTLADAGFIKQYGDCLGDIAARDLICAQKFNGLTVLPPLLTDEMIAQYTSALLAGTITSGWTFGAGAALQIPFAMQMAYRFNGIGVTQNVLYENQKLIANQFNSAIGKIQDSLSSTASALGKLQDVVNQNAQALNTLVKQLSSNFGAISSVLNDILSRLDKVEAEVQIDRLITGRLQSLQTYVTQQLIRAAEIRASANLAATKMSECVLGQSKRVDFCGKGYHLMSFPQSAPHGVVFLHVTYVPAQEKNFTTAPAICHDGKAHFPREGVFVSNGTHWFVTQRNFYEPQIITTDNTFVSGNCDVVIGVVNNTVYDPLQPELDSGGGGSDIDPYKEFGSSYQLLNFLPLDFFPDLNALVDTATALYEEELTGREHCSPHHTAIRQALVCWDELTKLIAWMSSNITSEQVRTIIVNHVNDTWGLKVRQSLWFHLSCLTFGQHTVQEFLVSFGVWIRTPAPYRPPNAPILSTLPEHTVIC

SEQ ID NO: 10688 - protein, 1301 aa, Artificial Sequence
  SARS-CoV-2/Netherlands/ZuidHolland_9/2020__EPI_ISL_414445 spike protein (1-1147) WhcAg construct
MFVFLVLLPLVSSQCVNLTTRTQLPPAYTNSFTRGVYYPDKVFRSSVLHSTQDLFLPFFSNVTWFHAIHVSGTNGTKRFDNPVLPFNDGVYFASTEKSNIIRGWIFGTTLDSKTQSLLIVNNATNVVIKVCEFQFCNDPFLGVYYHKNNKSWMESEFRVYSSANNCTFEYVSQPFLMDLEGKQGNFKNLREFVFKNIDGYFKIYSKHTPINLVRDLPQGFSALEPLVDLPIGINITRFQTLLALHRSYLTPGDSSSGWTAGAAAYYVGYLQPRTFLLKYNENGTITDAVDCALDPLSETKCTLKSFTVEKGIYQTSNFRVQPTESIVRFPNITNLCPFGEVFNATRFASVYAWNRKRISNCVADYSVLYNSASFSTFKCYGVSPTKLNDLCFTNVYADSFVIRGDEVRQIAPGQTGKIADYNYKLPDDFTGCVIAWNSNNLDSKVGGNYNYLYRLFRKSNLKPFERDISTEIYQAGSTPCNGVEGFNCYFPLQSYGFQPTNGVGYQPYRVVVLSFELLHAPATVCGPKKSTNLVKNKCVNFNFNGLTGTGVLTESNKKFLPFQQFGRDIADTTDAVRDPQTLEILDITPCSFGGVSVITPGTNTSNQVAVLYQGVNCTEVPVAIHADQLTPTWRVYSTGSNVFQTRAGCLIGAEHVNNSYECDIPIGAGICASYQTQTNSPRRARSVASQSIIAYTMSLGAENSVAYSNNSIAIPTNFTISVTTEILPVSMTKTSVDCTMYICGDSTECSNLLLQYGSFCTQLNRALTGIAVEQDKNTQEVFAQVKQIYKTPPIKDFGGFNFSQILPDPSKPSKRSFIEDLLFNKVTLADAGFIKQYGDCLGDIAARDLICVQKFNGLTVLPPLLTDEMIAQYTSALLAGTITSGWTFGAGAALQIPFAMQMAYRFNGIGVTQNVLYENQKLIANQFNSAIGKIQDSLSSTASALGKLQDVVNQNAQALNTLVKQLSSNFGAISSVLNDILSRLDKVEAEVQIDRLITGRLQSLQTYVTQQLIRAAEIRASANLAATKMSECVLGQSKRVDFCGKGYHLMSFPQSAPHGVVFLHVTYVPAQEKNFTTAPAICHDGKAHFPREGVFVSNGTHWFVTQRNFYEPQIITTDNTFVSGNCDVVIGIVNNTVYDPLQPELDSGGGGSDIDPYKEFGSSYQLLNFLPLDFFPDLNALVDTATALYEEELTGREHCSPHHTAIRQALVCWDELTKLIAWMSSNITSEQVRTIIVNHVNDTWGLKVRQSLWFHLSCLTFGQHTVQEFLVSFGVWIRTPAPYRPPNAPILSTLPEHTVIC

SEQ ID NO: 10689 - protein, 1301 aa, Artificial Sequence
  SARS-CoV-2/Finland/FIN03032020A/2020__EPI_ISL_413602 spike protein (1-1147) WhcAg construct
MFVFLVLLPLVSSQCVNLTTRTQLPPAYTNSFTRGVYYPDKVFRSSVLHSTQDLFLPFFSNVTWFHAIHVSGTNGTKRFDNPVLPFNDGVYFASTEKSNIIRGWIFGTTLDSKTQSLLIVNNATNVVIKVCEFQFCNDPFLGVYYHKNNKSWMESEFRVYSSANNCTFEYVSQPFLMDLEGKQGNFKNLREFVFKNIDGYFKIYSKHTPINLVRDLPQGFSALEPLVDLPIGINITRFQTLLALHRSYLTPGDSSSGWTAGAAAYYVGYLQPRTFLLKYNENGTITDAVDCALDPLSETKCTLKSFTVEKGIYQTSNFRVQPTESIVRFPNITNLCPFGEVFNATRFASVYAWNRKRISNCVADYSVLYNSASFSTFKCYGVSPTKLNDLCFTNVYADSFVIRGDEVRQIAPGQTGKIADYNYKLPDDFTGCVISWNSNNLDSKVGGNYNYLYRLFRKSNLKPFERDISTEIYQAGSTPCNGVEGFNCYFPLQSYGFQPTNGVGYQPYRVVVLSFELLHAPATVCGPKKSTNLVKNKCVNFNFNGLTGTGVLTESNKKFLPFQQFGRDIADTTDAVRDPQTLEILDITPCSFGGVSVITPGTNTSNQVAVLYQGVNCTEVPVAIHADQLTPTWRVYSTGSNVFQTRAGCLIGAEHVNNSYECDIPIGAGICASYQTQTNSPRRARSVASQSIIAYTMSLGAENSVAYSNNSIAIPTNFTISVTTEILPVSMTKTSVDCTMYICGDSTECSNLLLQYGSFCTQLNRALTGIAVEQDKNTQEVFAQVKQIYKTPPIKDFGGFNFSQILPDPSKPSKRSFIEDLLFNKVTLADAGFIKQYGDCLGDIAARDLICAQKFNGLTVLPPLLTDEMIAQYTSALLAGTITSGWTFGAGAALQIPFAMQMAYRFNGIGVTQNVLYENQKLIANQFNSAIGKIQDSLSSTASALGKLQDVVNQNAQALNTLVKQLSSNFGAISSVLNDILSRLDKVEAEVQIDRLITGRLQSLQTYVTQQLIRAAEIRASANLAATKMSECVLGQSKRVDFCGKGYHLMSFPQSAPHGVVFLHVTYVPAQEKNFTTAPAICHDGKAHFPREGVFVSNGTHWFVTQRNFYEPQIITTDNTFVSGNCDVVIGIVNNTVYDPLQPELDSGGGGSDIDPYKEFGSSYQLLNFLPLDFFPDLNALVDTATALYEEELTGREHCSPHHTAIRQALVCWDELTKLIAWMSSNITSEQVRTIIVNHVNDTWGLKVRQSLWFHLSCLTFGQHTVQEFLVSFGVWIRTPAPYRPPNAPILSTLPEHTVIC

SEQ ID NO: 10690 - protein, 1301 aa, Artificial Sequence
  SARS-CoV-2/France/GE1977/2020__EPI_ISL_414632 spike protein (1-1147) WhcAg construct
MFVFLVLLPLVSSQCVNLTTRTQLPPAYTNSFTRGVYYPDKVFRSSVLHSTQDLFLPFFSNVTWFHAIHVSGTNGTKRFDNPVLPFNDGVYFASTEKSNIIRGWIFGTTLDSKTQSLLIVNNATNVVIKVCEFQFCNDPFLGVYYHKNNKSWMESEFRVYSSANNCTFEYVSQPFLMDLEGKQGNFKNLREFVFKNIDGYFKIYSKHTPINLVRDLPQGFSALEPLVDLPIGINITRFQTLLALHRSYLTPGDSSSGWTAGAAAYYVGYLQPRTFLLKYNENGTITDAVDCALDPLSETKCTLKSFTVEKGIYQTSNFRVQPTESIVRFPNITNLCPFGEVFNATRFASVYAWNRKRISNCVADYSVLYNSASFSTFKCYGVSPTKLNDLCFTNVYADSFVIRGDEVRQIAPGQTGKIADYNYKLPDDFTGCVIAWNSNNLDSKVGGNYNYLYRLFRKSNLKPFERDISTEIYQAGSTPCNGVEGFNCYFPLQSYGFQPTNGVGYQPYRVVVLSFELLHAPATVCGPKKSTNLVKNKCVNFNFNGLTGTGVLTESNKKFLPFQQFGRDIADTTDAVRDPQTLEILDITPCSFGGVSVITPGTNTSNQVAVLYQGVNCTEVPVAIHADQLTPTWRVYSTGSNVFQTRAGCLIGAEHVNNSYECDIPIGAGICASYQTQTNSPRRARSVASQSIIAYTMSLGAENSVAYSNNSIAIPTNFTISVTTEILPVSMTKTSVDCTMYICGDSTECSNLLLQYGSFCTQLNRALTGIAVEQDKNTQEVFAQVKQIYKTPPIKDFGGFNFSQILPDPSKPSKRSFIEDLLFNKVTLADAGFIKQYGDCLGDIAARDLICAQKFNGLTVLPPLLTDEMIAQYTSALLAGTITSGWTFGAGAALQIPFAMQMAYRFNGIGVTQNVLYENQKLIANQFNSAIGKIQDSLFSTASALGKLQDVVNQNAQALNTLVKQLSSNFGAISSVLNDILSRLDKVEAEVQIDRLITGRLQSLQTYVTQQLIRAAEIRASANLAATKMSECVLGQSKRVDFCGKGYHLMSFPQSAPHGVVFLHVTYVPAQEKNFTTAPAICHDGKAHFPREGVFVSNGTHWFVTQRNFYEPQIITTDNTFVSGNCDVVIGIVNNTVYDPLQPELDSGGGGSDIDPYKEFGSSYQLLNFLPLDFFPDLNALVDTATALYEEELTGREHCSPHHTAIRQALVCWDELTKLIAWMSSNITSEQVRTIIVNHVNDTWGLKVRQSLWFHLSCLTFGQHTVQEFLVSFGVWIRTPAPYRPPNAPILSTLPEHTVIC

SEQ ID NO: 10691 - protein, 1301 aa, Artificial Sequence
  SARS-CoV-2/Finland/FIN-313/2020__EPI_ISL_414641 spike protein (1-1147) WhcAg construct
MFVFLVLLPLVSSQCVNLTTRTQLPPAYTNSFTRGVYYPDKVFRSSVLHSTQDLFLPFFSNVTWFHAIHVSGTNGTKRFDNPVLPFNDGVYFASTEKSNIIRGWIFGTTLDSKTQSLLIVNNATNVVIKVCEFQFCNDPFLGVYYHKNNKSWMESEFRVYSSANNCTFEYVSQPFLMDLEGKQGNFKNLREFVFKNIDGYFKIYSKHTPINLVRDLPQGFSALEPLVDLPIGINITRFKTLLALHRSYLTPGDSSSGWTAGAAAYYVGYLQPRTFLLKYNENGTITDAVDCALDPLSETKCTLKSFTVEKGIYQTSNFRVQPTESIVRFPNITNLCPFGEVFNATRFASVYAWNRKRISNCVADYSVLYNSASFSTFKCYGVSPTKLNDLCFTNVYADSFVIRGDEVRQIAPGQTGKIADYNYKLPDDFTGCVIAWNSNNLDSKVGGNYNYLYRLFRKSNLKPFERDISTEIYQAGSTPCNGVEGFNCYFPLQSYGFQPTNGVGYQPYRVVVLSFELLHAPATVCGPKKSTNLVKNKCVNFNFNGLTGTGVLTESNKKFLPFQQFGRDIADTTDAVRDPQTLEILDITPCSFGGVSVITPGTNTSNQVAVLYQGVNCTEVPVAIHADQLTPTWRVYSTGSNVFQTRAGCLIGAEHVNNSYECDIPIGAGICASYQTQTNSPRRARSVASQSIIAYTMSLGAENSVAYSNNSIAIPTNFTISVTTEILPVSMTKTSVDCTMYICGDSTECSNLLLQYGSFCTQLNRALTGIAVEQDKNTQEVFAQVKQIYKTPPIKDFGGFNFSQILPDPSKPSKRSFIEDLLFNKVTLADAGFIKQYGDCLGDIAARDLICAQKFNGLTVLPPLLTDEMIAQYTSALLAGTITSGWTFGAGAALQIPFAMQMAYRFNGIGVTQNVLYENQKLIANQFNSAIGKIQDSLSSTASALGKLQDVVNQNAQALNTLVKQLSSNFGAISSVLNDILSRLDKVEAEVQIDRLITGRLQSLQTYVTQQLIRAAEIRASANLAATKMSECVLGQSKRVDFCGKGYHLMSFPQSAPHGVVFLHVTYVPAQEKNFTTAPAICHDGKAHFPREGVFVSNGTHWFVTQRNFYEPQIITTDNTFVSGNCDVVIGIVNNTVYDPLQPELDSGGGGSDIDPYKEFGSSYQLLNFLPLDFFPDLNALVDTATALYEEELTGREHCSPHHTAIRQALVCWDELTKLIAWMSSNITSEQVRTIIVNHVNDTWGLKVRQSLWFHLSCLTFGQHTVQEFLVSFGVWIRTPAPYRPPNAPILSTLPEHTVIC

SEQ ID NO: 10692 - protein, 1301 aa, Artificial Sequence
  SARS-CoV-2/Netherlands/ZuidHolland_2/2020__EPI_ISL_414556 spike protein (1-1147) WhcAg construct
MFVFLVLLPLVSSQCVNLTTRTQLPPAYTNSFTRGVYYPDKVFRSSVLHSTQDLFLPFFSNVTWFHAIHVSGTNGTKRFDNPVLPFNDGVYFASTEKSNIIRGWIFGTTLDSKTQSLLIVNNATNVVIKVCEFQFCNDPFLGVYYHKNNKSWMESEFRVYSSANNCTFEYVSQPFLMDLEGKQGNFKNLREFVFKNIDGYFKIYSKHTPINLVRDLPQGFSALEPLVDLPIGINITRFQTLLALHRSYLTPGDSSSGWTAGAAAYYVGYLQPRTFLLKYNENGTITDAVDCALDPLSETKCTLKSFTVEKGIYQTSNFRVQPTESIVRFPNITNLCPFGEVFNATRFASVYAWNRKRISNCVADYSVLYNSASFSTFKCYGVSPTKLNDLCFTNVYADSFVIRGDEVRQIAPGQTGKIADYNYKLPDDFTGCVIAWNSNNLDSKVGGNYNYLYRLFRKSNLKPFERDISTEIYQAGSTPCNGVEGFNCYFPLQSYGFQPTNGVGYQPYRVVVLSFELLHAPATVCGPKKSTNLVKNKCVNFNFNGLTGTGVLTESNKKFLPFQQFGRDIADTTDAVRDPQTLEILDITPCSFGGVSVITPGTNTSNQVAVLYQGVNCTEVPVAIHADQLTPTWRVYSTGSNVFQTRAGCLIGAEHVNNSYECDIPIGAGICASYQTQTNSPRRARSVASQSIIAYTMSLGAENSVAYSNNSIAIPTNFTISVTTEILPVSMTKTSVDCTMYICGDSTECSNLLLQYGSFCTQLNRALTGIALEQDKNTQEVFAQVKQIYKTPPIKDFGGFNFSQILPDPSKPSKRSFIEDLLFNKVTLADAGFIKQYGDCLGDIAARDLICAQKFNGLTVLPPLLTDEMIAQYTSALLAGTITSGWTFGAGAALQIPFAMQMAYRFNGIGVTQNVLYENQKLIANQFNSAIGKIQDSLSSTASALGKLQDVVNQNAQALNTLVKQLSSNFGAISSVLNDILSRLDKVEAEVQIDRLITGRLQSLQTYVTQQLIRAAEIRASANLAATKMSECVLGQSKRVDFCGKGYHLMSFPQSAPHGVVFLHVTYVPAQEKNFTTAPAICHDGKAHFPREGVFVSNGTHWFVTQRNFYEPQIITTDNTFVSGNCDVVIGIVNNTVYDPLQPELDSGGGGSDIDPYKEFGSSYQLLNFLPLDFFPDLNALVDTATALYEEELTGREHCSPHHTAIRQALVCWDELTKLIAWMSSNITSEQVRTIIVNHVNDTWGLKVRQSLWFHLSCLTFGQHTVQEFLVSFGVWIRTPAPYRPPNAPILSTLPEHTVIC

SEQ ID NO: 10693 - protein, 1301 aa, Artificial Sequence
  SARS-CoV-2/USA/WA-UW31/2020__EPI_ISL_414618 spike protein (1-1147) WhcAg construct
MFVFLVLLPLVSSQCVNLTTRTQLPPAYTNSFTRGVYYPDKVFRSSVLHSTQDLFLPFFSNVTWFHAIHVSGTNGTKRFDNPVLPFNDGVYFASTEKSNIIRGWIFGTTLDSKTQSLLIVNNATNVVIKVCEFQFCNDPFLGVYYHKNNKSWMESEFRVYSSANNCTFEYVSQPFLMDLEGKQGNFKNLREFVFKNIDGYFKIYSKHTPINLVRDLPQGFSALEPLVDLPIGINITRFQTLLALHRSYLTPGDSSSGWTAGAAAYYVGYLQPRTFLLKYNENGTITDAVDCALDPLSETKCTLKSFTVEKGIYQTSNFRVQPTESIVRFPNITNLCPFGEVFNATRFASVYAWNRKRISNCVADYSVLYNSASFSTFKCYGVSPTKLNDLCFTNVYADSFVIRGDEVRQIAPGQTGKIADYNYKLPDDFTGCVIAWNSNNLDSKVGGNYNYLYRLFRKSNLKPFERDISTEIYQAGSTPCNGAEGFNCYFPLQSYGFQPTNGVGYQPYRVVVLSFELLHAPATVCGPKKSTNLVKNKCVNFNFNGLTGTGVLTESNKKFLPFQQFGRDIADTTDAVRDPQTLEILDITPCSFGGVSVITPGTNTSNQVAVLYQDVNCTEVPVAIHADQLTPTWRVYSTGSNVFQTRAGCLIGAEHVNNSYECDIPIGAGICASYQTQTNSPRRARSVASQSIIAYTMSLGAENSVAYSNNSIAIPTNFTISVTTEILPVSMTKTSVDCTMYICGDSTECSNLLLQYGSFCTQLNRALTGIAVEQDKNTQEVFAQVKQIYKTPPIKDFGGFNFSQILPDPSKPSKRSFIEDLLFNKVTLADAGFIKQYGDCLGDIAARDLICAQKFNGLTVLPPLLTDEMIAQYTSALLAGTITSGWTFGAGAALQIPFAMQMAYRFNGIGVTQNVLYENQKLIANQFNSAIGKIQDSLSSTASALGKLQDVVNQNAQALNTLVKQLSSNFGAISSVLNDILSRLDKVEAEVQIDRLITGRLQSLQTYVTQQLIRAAEIRASANLAATKMSECVLGQSKRVDFCGKGYHLMSFPQSAPHGVVFLHVTYVPAQEKNFTTAPAICHDGKAHFPREGVFVSNGTHWFVTQRNFYEPQIITTDNTFVSGNCDVVIGIVNNTVYDPLQPELDSGGGGSDIDPYKEFGSSYQLLNFLPLDFFPDLNALVDTATALYEEELTGREHCSPHHTAIRQALVCWDELTKLIAWMSSNITSEQVRTIIVNHVNDTWGLKVRQSLWFHLSCLTFGQHTVQEFLVSFGVWIRTPAPYRPPNAPILSTLPEHTVIC

SEQ ID NO: 10694 - protein, 1301 aa, Artificial Sequence
  SARS-CoV-2/South Korea/SNU01/2020__EPI_ISL_411929 spike protein (1-1147) WhcAg construct
MFVFLVLLPLVSSQCVNLTTRTQLPPAYTNSFTRGVYYPDKVFRSSVLHSTQDLFLPFFSNVTWFHAIHVSGTNGTKRFDNPVLPFNDGVYFASTEKSNIIRGWIFGTTLDSKTQSLLIVNNATNVVIKVCEFQFCNDPFLGVYYHKNNKSWMESEFRVYSSANNCTFEYVSQPFLMDLEGKQGNFKNLREFVFKNIDGYFKIYSKHTPINLVRDLPQGFWALEPLVDLPIGINITRFQTLLALHRSYLTPGDSSSGWTAGAAAYYVGYLQPRTFLLKYNENGTITDAVDCALDPLSETKCTLKSFTVEKGIYQTSNFRVQPTESIVRFPNITNLCPFGEVFNATRFASVYAWNRKRISNCVADYSVLYNSASFSTFKCYGVSPTKLNDLCFTNVYADSFVIRGDEVRQIAPGQTGKIADYNYKLPDDFTGCVIAWNSNNLDSKVGGNYNYLYRLFRKSNLKPFERDISTEIYQAGSTPCNGVEGFNCYFPLQSYGFQPTNGVGYQPYRVVVLSFELLHAPATVCGPKKSTNLVKNKCVNFNFNGLTGTGVLTESNKKFLPFQQFGRDIADTTDAVRDPQTLEILDITPCSFGGVSVITPGTNTSNQVAVLYQDVNCTEVPVAIHADQLTPTWRVYSTGSNVFQTRAGCLIGAEHVNNSYECDIPIGAGICASYQTQTNSPRRARSVASQSIIAYTMSLGAENSVAYSNNSIAIPTNFTISVTTEILPVSMTKTSVDCTMYICGDSTECSNLLLQYGSFCTQLNRALTGIAVEQDKNTQEVFAQVKQIYKTPPIKDFGGFNFSQILPDPSKPSKRSFIEDLLFNKVTLADAGFIKQYGDCLGDIAARDLICAQKFNGLTVLPPLLTDEMIAQYTSALLAGTITSGWTFGAGAALQIPFAMQMAYRFNGIGVTQNVLYENQKLIANQFNSAIGKIQDSLSSTASALGKLQDVVNQNAQALNTLVKQLSSNFGAISSVLNDILSRLDKVEAEVQIDRLITGRLQSLQTYVTQQLIRAAEIRASANLAATKMSECVLGQSKRVDFCGKGYHLMSFPQSAPHGVVFLHVTYVPAQEKNFTTAPAICHDGKAHFPREGVFVSNGTHWFVTQRNFYEPQIITTDNTFVSGNCDVVIGIVNNTVYDPLQPELDSGGGGSDIDPYKEFGSSYQLLNFLPLDFFPDLNALVDTATALYEEELTGREHCSPHHTAIRQALVCWDELTKLIAWMSSNITSEQVRTIIVNHVNDTWGLKVRQSLWFHLSCLTFGQHTVQEFLVSFGVWIRTPAPYRPPNAPILSTLPEHTVIC

SEQ ID NO: 10695 - protein, 1301 aa, Artificial Sequence
  SARS-CoV-2/China/WF0004/2020__EPI_ISL_413694 spike protein (1-1147) WhcAg construct
MFVFLVLLPLVSSQCVNLTTRTQLPPAYTNSFTRGVYYPDKVFRSSVLHSTQDLFLPFFSNVTWFHAIHVSGTNGTKRFDNPVLPFNDGVYFASTEKSNIIRGWIFGTTLDSKTQSLLIVNNATNVVIKVCEFQFCNDPFLGVYYHKNNKSWTESEFRVYSSANNCTFEYVSQPFLMDLEGKQGNFKNLREFVFKNIDGYFKIYSKHTPINLVRDLPQGFSALEPLVDLPIGINITRFQTLLALHRSYLTPGDSSSGWTAGAAAYYVGYLQPRTFLLKYNENGTITDAVDCALDPLSETKCTLKSFTVEKGIYQTSNFRVQPTESIVRFPNITNLCPFGEVFNATRFASVYAWNRKRISNCVADYSVLYNSASFSTFKCYGVSPTKLNDLCFTNVYADSFVIRGDEVRQIAPGQTGKIADYNYKLPDDFTGCVIAWNSNNLDSKVGGNYNYLYRLFRKSNLKPFERDISTEIYQAGSTPCNGVEGFNCYFPLQSYGFQPTNGVGYQPYRVVVLSFELLHAPATVCGPKKSTNLVKNKCVNFNFNGLTGTGVLTESNKKFLPFQQFGRDIADTTDAVRDPQTLEILDITPCSFGGVSVITPGTNTSNQVAVLYQDVNCTEVPVAIHADQLTPTWRVYSTGSNVFQTRAGCLIGAEHVNNSYECDIPIGAGICASYQTQTNSPRRARSVASQSIIAYTMSLGAENSVAYSNNSIAIPTNFTISVTTEILPVSMTKTSVDCTMYICGDSTECSNLLLQYGSFCTQLNRALTGIAVEQDKNTQEVFAQVKQIYKTPPIKDFGGFNFSQILPDPSKPSKRSFIEDLLFNKVTLADAGFIKQYGDCLGDIAARDLICAQKFNGLTVLPPLLTDEMIAQYTSALLAGTITSGWTFGAGAALQIPFAMQMAYRFNGIGVTQNVLYENQKLIANQFNSAIGKIQDSLSSTASALGKLQDVVNQNAQALNTLVKQLSSNFGAISSVLNDILSRLDKVEAEVQIDRLITGRLQSLQTYVTQQLIRAAEIRASANLAATKMSECVLGQSKRFDFCGKGYHLMSFPQSAPHGVVFLHVTYVPAQEKNFTTAPAICHDGKAHFPREGVFVSNGTHWFVTQRNFYEPQIITTDNTFVSGNCDVVIGIVNNTVYDPLQPELDSGGGGSDIDPYKEFGSSYQLLNFLPLDFFPDLNALVDTATALYEEELTGREHCSPHHTAIRQALVCWDELTKLIAWMSSNITSEQVRTIIVNHVNDTWGLKVRQSLWFHLSCLTFGQHTVQEFLVSFGVWIRTPAPYRPPNAPILSTLPEHTVIC

SEQ ID NO: 10696 - protein, 1301 aa, Artificial Sequence
  SARS-CoV-2/China/WF0028/2020__EPI_ISL_413791 spike protein (1-1147) WhcAg construct
MFVFLVLLPLVSSQCVNLTTRTQLPPAYTNSFTRGVYYPDKVFRSSVLHSTQDLFLPFFSNVTWFHAIHVSGTNGTKRFDNPVLPFNDGVYFASTEKSNIIRGWIFGTTLDSKTQSLLIVNNATNVVIKVCEFQFCNDPFLGVYYHKNNKSWMESEFRVYSSANNCTFEYVSQPFLMDLEGKQGNFKNLREFVFKNIDGYFKIYSKHTPINLVRDLPQGFSALEPLVDLPIGINITRFQTLLALHRSYLTPGDSSSGWTAGAAAYYVGYLQPRTFLLKYNENGTITDAVDCALDPLSETKCTLKSFTVEKGIYQTSNFRVQPTESIVRFPNITNLCPFGEVFNATRFASVYAWNRKRISNCVADYSVLYNSASFSTFKCYGVSPTKLNDLCFTNVYADSFVIRGDEVRQIAPGQTGKIADYNYKLPDDFTGCVIAWNSNNLDSKVGGNYNYLYRLFRKSNLKPFERDISTEIYQAGSTPCNGVEGFNCYFPLQSYGFQPTNGVGYQPYRVVVLSFELLHAPATVCGPKKSTNLVKNKCVNFNFNGLTGTGVLTESNKKFLPFQQFGRDIADTTDAVRDPQTLEILDITPCSFGGVSVITPGTNTSNQVAVLYQDVNCTEVPVAIHADQLTPTWRVYSTGSNVFQTRAGCLIGAEHVNNSYECDIPIGAGICASYQTQTNSPRRARSVASQSIIAYTMSLGAENSVAYSNNSIAIPTNFTISVTTEILPVSMTKTSVDCTMYICGDSTECSNLLLQYGSFCTQLNRALTGIAVEQDKNTQEVFAQVKQIYKTPPIKDFGGFNFSQILPDPSKPSKRSFIEDLLFNKVTLADAGFIKQYGDCLGDIAARDLICAQKFNGLTVLPPLLTDEMIAQYTSALLAGTITSGWTFGAGAALQIPFAMQMAYRFNGIGVTQNVLYENQKLIANQFNSAIGKIQDSLSSTASALGKLQDVVNQNAQALNTLVKQLSSNFGAISSVLNDILSRLDKVEAEVQIDRLITGRLQSLQTYVTQQLIRAAEIRASANLAATKMSECVLGQSKRVDFCGKGYHLMSFPQSAPHGVVFLHVTYVPAQEKNFTTAPAICHDGKAHFPREGVFVSNGTHWFVTQRNFYEPQIITTDNTFVSGNCDVVIGIVNNTVYDPLQPELESGGGGSDIDPYKEFGSSYQLLNFLPLDFFPDLNALVDTATALYEEELTGREHCSPHHTAIRQALVCWDELTKLIAWMSSNITSEQVRTIIVNHVNDTWGLKVRQSLWFHLSCLTFGQHTVQEFLVSFGVWIRTPAPYRPPNAPILSTLPEHTVIC

SEQ ID NO: 10697 - protein, 1301 aa, Artificial Sequence
  SARS-CoV-2/2019-nCoV/USA-CruiseA-18/2020__MT159716.1 spike protein (1-1147) WhcAg construct
MFVFLVLLPLVSSQCVNLTTRTQLPPAYTNSFTRGVYYPDKVFRSSVLHSTQDLFLPFFSNVTWFHAIHVSGTNGTKRFDNPVLPFNDGVYFASTEKSNIIRGWIFGTTLDSKTQSLLIVNNATNVVIKVCEFQFCNDPFLGVYYHKNNKSWMESELRVYSSANNCTFEYVSQPFLMDLEGKQGNFKNLREFVFKNIDGYFKIYSKHTPINLVRDLPQGFSALEPLVDLPIGINITRFQTLLALHRSYLTPGDSSSGWTAGAAAYYVGYLQPRTFLLKYNENGTITDAVDCALDPLSETKCTLKSFTVEKGIYQTSNFRVQPTESIVRFPNITNLCPFGEVFNATRFASVYAWNRKRISNCVADYSVLYNSASFSTFKCYGVSPTKLNDLCFTNVYADSFVIRGDEVRQIAPGQTGKIADYNYKLPDDFTGCVIAWNSNNLDSKVGGNYNYLYRLFRKSNLKPFERDISTEIYQAGSTPCNGVEGFNCYFPLQSYGFQPTNGVGYQPYRVVVLSFELLHAPATVCGPKKSTNLVKNKCVNFNFNGLTGTGVLTESNKKFLPFQQFGRDIADTTDAVRDPQTLEILDITPCSFGGVSVITPGTNTSNQVAVLYQDVNCTEVPVAIHADQLTPTWRVYSTGSNVFQTRAGCLIGAEHVNNSYECDIPIGAGICASYQTQTNSPRRARSVASQSIIAYTMSLGAENSVAYSNNSIAIPTNFTISVTTEILPVSMTKTSVDCTMYICGDSTECSNLLLQYGSFCTQLNRALTGIAVEQDKNTQEVFAQVKQIYKTPPIKDFGGFNFSQILPDPSKPSKRSFIEDLLFNKVTLADAGFIKQYGDCLGDIAARDLICAQKFNGLTVLPPLLTDEMIAQYTSALLAGTITSGWTFGAGAALQIPFAMQMAYRFNGIGVTQNVLYENQKLIANQFNSAIGKIQDSLSSTASALGKLQDVVNQNAQALNTLVKQLSSNFGAISSVLNDILSRLDKVEAEVQIDRLITGRLQSLQTYVTQQLIRAAEIRASANLAATKMSECVLGQSKRVDFCGKGYHLMSFPQSAPHGVVFLHVTYVPAQEKNFTTAPAICHDGKAHFPREGVFVSNGTHWFVTQRNFYEPQIITTDNTFVSGNCDVVIGIVNNTVYDPLQPELDSGGGGSDIDPYKEFGSSYQLLNFLPLDFFPDLNALVDTATALYEEELTGREHCSPHHTAIRQALVCWDELTKLIAWMSSNITSEQVRTIIVNHVNDTWGLKVRQSLWFHLSCLTFGQHTVQEFLVSFGVWIRTPAPYRPPNAPILSTLPEHTVIC

SEQ ID NO: 10698 - protein, 1301 aa, Artificial Sequence
  SARS-CoV-2/SARS-CoV-2/Yunnan-01/human/2020/CHN__MT049951.1 spike protein (1-1147) WhcAg construct
MFVFLVLLPLVSSQCVNLTTRTQLPPANTNSFTRGVYYPDKVFRSSVLHSTQDLFLPFFSNVTWFHAIHVSGTNGTKRFDNPVLPFNDGVYFASTEKSNIIRGWIFGTTLDSKTQSLLIVNNATNVVIKVCEFQFCNDPFLGVYYHKNNKSWMESEFRVYSSANNCTFEYVSQPFLMDLEGKQGNFKNLREFVFKNIDGYFKIYSKHTPINLVRDLPQGFSALEPLVDLPIGINITRFQTLLALHRSYLTPGDSSSGWTAGAAAYYVGYLQPRTFLLKYNENGTITDAVDCALDPLSETKCTLKSFTVEKGIYQTSNFRVQPTESIVRFPNITNLCPFGEVFNATRFASVYAWNRKRISNCVADYSVLYNSASFSTFKCYGVSPTKLNDLCFTNVYADSFVIRGDEVRQIAPGQTGKIADYNYKLPDDFTGCVIAWNSNNLDSKVGGNYNYLYRLFRKSNLKPFERDISTEIYQAGSTPCNGVEGFNCYFPLQSYGFQPTNGVGYQPYRVVVLSFELLHAPATVCGPKKSTNLVKNKCVNFNFNGLTGTGVLTESNKKFLPFQQFGRDIADTTDAVRDPQTLEILDITPCSFGGVSVITPGTNTSNQVAVLYQDVNCTEVPVAIHADQLTPTWRVYSTGSNVFQTRAGCLIGAEHVNNSYECDIPIGAGICASYQTQTNSPRRARSVASQSIIAYTMSLGAENSVAYSNNSIAIPTNFTISVTTEILPVSMTKTSVDCTMYICGDSTECSNLLLQYGSFCTQLNRALTGIAVEQDKNTQEVFAQVKQIYKTPPIKDFGGFNFSQILPDPSKPSKRSFIEDLLFNKVTLADAGFIKQYGDCLGDIAARDLICAQKFNGLTVLPPLLTDEMIAQYTSALLAGTITSGWTFGAGAALQIPFAMQMAYRFNGIGVTQNVLYENQKLIANQFNSAIGKIQDSLSSTASALGKLQDVVNQNAQALNTLVKQLSSNFGAISSVLNDILSRLDKVEAEVQIDRLITGRLQSLQTYVTQQLIRAAEIRASANLAATKMSECVLGQSKRVDFCGKGYHLMSFPQSAPHGVVFLHVTYVPAQEKNFTTAPAICHDGKAHFPREGVFVSNGTHWFVTQRNFYEPQIITTDNTFVSGNCDVVIGIVNNTVYDPLQPELDSGGGGSDIDPYKEFGSSYQLLNFLPLDFFPDLNALVDTATALYEEELTGREHCSPHHTAIRQALVCWDELTKLIAWMSSNITSEQVRTIIVNHVNDTWGLKVRQSLWFHLSCLTFGQHTVQEFLVSFGVWIRTPAPYRPPNAPILSTLPEHTVIC

SEQ ID NO: 10699 - protein, 1301 aa, Artificial Sequence
  SARS-CoV-2/USA/WA-UW292/2020__EPI_ISL_418077 spike protein (1-1147) WhcAg construct
MFVFLVLLPLVSSQCVNLTTRTQLPPAYTNSFTRGVYYPDKVFRSSVLHSTQDLFLPFFSNVTWFHAIHVSGTNGTKRFDNPVLPFNDGVYFASTEKSNIIRGWIFGTTLDSKTQSLLIVNNATNVVIKVCEFQFCNDPFLGVYYHKNNKSWMESEFRVYSSANNCTFEYVSQPFLMDLEGKQGNFKNLREFVFKNIDGYFKIYSKHTPINLVRDLPQGFSALEPLVDLPIGINITRFQTLLALHRSYLTPGDSSSGWTAGAAAYYVGYLQPRTFLLKYNENGTITDAVDCALDPLSETKCTLKSFTVEKGIYQTSNFRVQPTESIVRFPNITNLCPFGEVFNATRFASVYAWNRKRISNCVADYSVLYNSASFSTFKCYGVSPTKLNDLCFTNVYADSFVIRGDEVRQIAPGQTGKIADYNYKLPDDFTGCVIAWNSNNLDSKVGGNYNYLYRLFRKSNLKPFERDISTEIYQASSTPCNGVEGFNCYFPLQSYGFQPTNGVGYQPYRVVVLSFELLHAPATVCGPKKSTNLVKNKCVNFNFNGLTGTGVLTESNKKFLPFQQFGRDIADTTDAVRDPQTLEILDITPCSFGGVSVITPGTNTSNQVAVLYQDVNCTEVPVAIHADQLTPTWRVYSTGSNVFQTRAGCLIGAEHVNNSYECDIPIGAGICASYQTQTNSPRRARSVASQSIIAYTMSLGAENSVAYSNNSIAIPTNFTISVTTEILPVSMTKTSVDCTMYICGDSTECSNLLLQYGSFCTQLNRALTGIAVEQDKNTQEVFAQVKQIYKTPPIKDFGGFNFSQILPDPSKPSKRSFIEDLLFNKVTLADAGFIKQYGDCLGDIAARDLICAQKFNGLTVLPPLLTDEMIAQYTSALLAGTITSGWTFGAGAALQIPFAMQMAYRFNGIGVTQNVLYENQKLIANQFNSAIGKIQDSLSSTASALGKLQDVVNQNAQALNTLVKQLSSNFGAISSVLNDILSRLDKVEAEVQIDRLITGRLQSLQTYVTQQLIRAAEIRASANLAATKMSECVLGQSKRVDFCGKGYHLMSFPQSAPHGVVFLHVTYVPAQEKNFTTAPAICHDGKAHFPREGVFVSNGTHWFVTQRNFYEPQIITTDNTFVSGNCDVVIGIVNNTVYDPLQPELDSGGGGSDIDPYKEFGSSYQLLNFLPLDFFPDLNALVDTATALYEEELTGREHCSPHHTAIRQALVCWDELTKLIAWMSSNITSEQVRTIIVNHVNDTWGLKVRQSLWFHLSCLTFGQHTVQEFLVSFGVWIRTPAPYRPPNAPILSTLPEHTVIC

SEQ ID NO: 10700 - protein, 1301 aa, Artificial Sequence
  SARS-CoV-2/Iceland/192/2020__EPI_ISL_417819 spike protein (1-1147) WhcAg construct
MFVFFVLLPLVSSQCVNLTTRTQLPPAYTNSFTRGVYYPDKVFRSSVLHSTQDLFLPFFSNVTWFHAIHVSGTNGTKRFDNPVLPFNDGVYFASTEKSNIIRGWIFGTTLDSKTQSLLIVNNATNVVIKVCEFQFCNDPFLGVYYHKNNKSWMESEFRVYSSANNCTFEYVSQPFLMDLEGKQGNFKNLREFVFKNIDGYFKIYSKHTPINLVRDLPQGFSALEPLVDLPIGINITRFQTLLALHRSYLTPGDSSSGWTAGAAAYYVGYLQPRTFLLKYNENGTITDAVDCALDPLSETKCTLKSFTVEKGIYQTSNFRVQPTESIVRFPNITNLCPFGEVFNATRFASVYAWNRKRISNCVADYSVLYNSASFSTFKCYGVSPTKLNDLCFTNVYADSFVIRGDEVRQIAPGQTGKIADYNYKLPDDFTGCVIAWNSNNLDSKVGGNYNYLYRLFRKSNLKPFERDISTEIYQAGSTPCNGVEGFNCYFPLQSYGFQPTNGVGYQPYRVVVLSFELLHAPATVCGPKKSTNLVKNKCVNFNFNGLTGTGVLTESNKKFLPFQQFGRDIADTTDAVRDPQTLEILDITPCSFGGVSVITPGTNTSNQVAVLYQGVNCTEVPVAIHADQLTPTWRVYSTGSNVFQTRAGCLIGAEHVNNSYECDIPIGAGICASYQTQTNSPRRARSVASQSIIAYTMSLGAENSVAYSNNSIAIPTNFTISVTTEILPVSMTKTSVDCTMYICGDSTECSNLLLQYGSFCTQLNRALTGIAVEQDKNTQEVFAQVKQIYKTPPIKDFGGFNFSQILPDPSKPSKRSFIEDLLFNKVTLADAGFIKQYGDCLGDIAARDLICAQKFNGLTVLPPLLTDEMIAQYTSALLAGTITSGWTFGAGAALQIPFAMQMAYRFNGIGVTQNVLYENQKLIANQFNSAIGKIQDSLSSTASALGKLQDVVNQNAQALNTLVKQLSSNFGAISSVLNDILSRLDKVEAEVQIDRLITGRLQSLQTYVTQQLIRAAEIRASANLAATKMSECVLGQSKRVDFCGKGYHLMSFPQSAPHGVVFLHVTYVPAQEKNFTTAPAICHDGKAHFPREGVFVSNGTHWFVTQRNFYEPQIITTDNTFVSGNCDVVIGIVNNTVYDPLQPELDSGGGGSDIDPYKEFGSSYQLLNFLPLDFFPDLNALVDTATALYEEELTGREHCSPHHTAIRQALVCWDELTKLIAWMSSNITSEQVRTIIVNHVNDTWGLKVRQSLWFHLSCLTFGQHTVQEFLVSFGVWIRTPAPYRPPNAPILSTLPEHTVIC

SEQ ID NO: 10701 - protein, 1301 aa, Artificial Sequence
  SARS-CoV-2/Belgium/ULG-6939/2020__EPI_ISL_417020 spike protein (1-1147) WhcAg construct
MFVFLVLLPLVSSQCVNLTTRTQLPPAYTNSFTRGVYYPDKVFRSSVLHSTQDLFLPFFSNVTWFHAIHVSGTNGTKRFDNPVLPFNDGVYFASTEKSNIIRGWIFGTTLDSKTQSLLIVNNATNVVIKVCEFQFCNDPFLGVYYHKNNKSWMESEFRVYSSANNCTFEYVSQPFLMDLEGKQGNFKNLREFVFKNIDGYFKIYSKHTPINLVRDLPQGFSALEPLVDLPIGINITRFQTLLALHRSYLTPGDSSSGWTAGAAAYYVGYLQPRTFLLKYNENGTITDAVDCALDPLSETKCTLKSFTVEKGIYQTSNFRVQPTESIVRFPNITNLCPFGEVFNATRFASVYAWNRKRISNCVADYSVLYNSASFSTFKCYGVSPTKLNDLCFTNVYADSFVIRGDEVRQIAPGQTGKIADYNYKLPDDFTGCVIAWNSNNLDSKVGGNYNYLYRLFRKSNLKPFERDISTEIYQAGSTPCNGVEGFNCYFPLQSYGFQPTNGVGYQPYRVVVLSFELLHAPATVCGPKKSTNLVKNKCVNFNFNGLTGTGVLTESNKKFLPFQQFGRDIADTTDAVRDPQTLEILDITPCSFGGVSVITPGTNTSNQVAVLYQGVNCTEVPVAIHADQLTPTWRVYSTGSNVFQTRAGCLIGAEHVNNSYECDIPIGAGICASYQTQTNSPRRARSVASQSIIAYTMSLGAENSVVYSNNSIAIPTNFTISVTTEILPVSMTKTSVDCTMYICGDSTECSNLLLQYGSFCTQLNRALTGIAVEQDKNTQEVFAQVKQIYKTPPIKDFGGFNFSQILPDPSKPSKRSFIEDLLFNKVTLADAGFIKQYGDCLGDIAARDLICAQKFNGLTVLPPLLTDEMIAQYTSALLAGTITSGWTFGAGAALQIPFAMQMAYRFNGIGVTQNVLYENQKLIANQFNSAIGKIQDSLSSTASALGKLQDVVNQNAQALNTLVKQLSSNFGAISSVLNDILSRLDKVEAEVQIDRLITGRLQSLQTYVTQQLIRAAEIRASANLAATKMSECVLGQSKRVDFCGKGYHLMSFPQSAPHGVVFLHVTYVPAQEKNFTTAPAICHDGKAHFPREGVFVSNGTHWFVTQRNFYEPQIITTDNTFVSGNCDVVIGIVNNTVYDPLQPELDSGGGGSDIDPYKEFGSSYQLLNFLPLDFFPDLNALVDTATALYEEELTGREHCSPHHTAIRQALVCWDELTKLIAWMSSNITSEQVRTIIVNHVNDTWGLKVRQSLWFHLSCLTFGQHTVQEFLVSFGVWIRTPAPYRPPNAPILSTLPEHTVIC

SEQ ID NO: 10702 - protein, 1301 aa, Artificial Sequence
  SARS-CoV-2/France/HF2496/2020__EPI_ISL_418231 spike protein (1-1147) WhcAg construct
MFVFLVLLPLVSSQCVNLTTRTQLPPAYTNSFTRGVYYPDKVFRSSVLHSTQDLFLPFFSNVTWFHAIHVSGTNGTKRFDNPVLPFNDGVYFASTEKSNIIRGWIFGTTLDSKTQSLLIVNNATNVVIKVCEFQFCNDPFLGVYYHKNNKSWMESEFRVYSSANNCTFEYVSQPFLMDLEGKQGNFKNLREFVFKNIDGYFKIYSKHTPINLVRDLPQGFSALEPLVDLPIGINITRFQTLLALHRSYLTPGDSSSGWTAGAAAYYVGYLQPRTFLLKYNENGTITDAVDCALDPLSETKCTLKSFTVEKGIYQTSNFRVQPTESIVRFPNITNLCPFGEVFNATRFASVYAWNRKRISNCVADYSVLYNSASFSTFKCYGVSPTKLNDLCFTNVYADSFVIRGDEVRQIAPGQTGKIADYNYKLPDDFTGCVIAWNSNNLDSKVGGNYNYLYRLFRKSNLKPFERDISTEIYQAGSTPCNGVEGFNCYFPLQSYGFQPTNGVGYQPYRVVVLSFELLHAPATVCGPKKSTNLVKNKCVNFNFNGLTGTGVLTESNKKFLPFQQFGRDIADTTDAVRDPQTLEILDITPCSFGGVSVITPGTNTSNQVAVLYQGVNCTEVPVAIHADQLTPTWRVYSTGSNVFQTRAGCLIGAEHVNNSYECDIPIGAGICASYQTQTNSPRRARSVASQSIIAYTMSLGAENSVAYSNNSIAIPTNFTISVTTEILPVSMTKTSVDCTMYICGDSTECSNLLLQYGSFCTQLNRALTGIAVEQDKNTQEVFAQVKQIYKTPPIKDFGGFNFSQILPDPSKPSKRSFIEDLLFNKVTLADAGFIKQYGDCLGDIVARDLICAQKFNGLTVLPPLLTDEMIAQYTSALLAGTITSGWTFGAGAALQIPFAMQMAYRFNGIGVTQNVLYENQKLIANQFNSAIGKIQDSLSSTASALGKLQDVVNQNAQALNTLVKQLSSNFGAISSVLNDILSRLDKVEAEVQIDRLITGRLQSLQTYVTQQLIRAAEIRASANLAATKMSECVLGQSKRVDFCGKGYHLMSFPQSAPHGVVFLHVTYVPAQEKNFTTAPAICHDGKAHFPREGVFVSNGTHWFVTQRNFYEPQIITTDNTFVSGNCDVVIGIVNNTVYDPLQPELDSGGGGSDIDPYKEFGSSYQLLNFLPLDFFPDLNALVDTATALYEEELTGREHCSPHHTAIRQALVCWDELTKLIAWMSSNITSEQVRTIIVNHVNDTWGLKVRQSLWFHLSCLTFGQHTVQEFLVSFGVWIRTPAPYRPPNAPILSTLPEHTVIC

SEQ ID NO: 10703 - protein, 1301 aa, Artificial Sequence
  SARS-CoV-2/USA/WA-UW291/2020__EPI_ISL_418076 spike protein (1-1147) WhcAg construct
MFVFLVLLPLVSSQCVNLTTRTQLPPAYTNSFTRGVYYPDKVFRSSVLHSTQDLFLPFFSNVTWFHAIHVSGTNGTKRFDNPVLPFNDGVYFASTEKSNIIRGWIFGTTLDSKTQSLLIVNNATNVVIKVCEFQFCNDPFLGVYYHKNNKSWMESEFRVYSSANNCTFEYVSQPFLMDLEGKQGNFKNLREFVFKNIDGYFKIYSKHTPINLVRDLPQGFSALEPLVDLPIGINITRFQTLLALHRSYLTPGDSSSGWTAGAAAYYVGYLQPRTFLLKYNENGTITDAVDCALDPLSETKCTLKSFTVEKGIYQTSNFRVQPTESIVRFPNITNLCPFGEVFNATRFASVYAWNRKRISNCVADYSVLYNSASFSTFKCYGVSPTKLNDLCFTNVYADSFVIRGDEVRQIAPGQTGKIADYNYKLPDDFTGCVIAWNSNNLDSKVGGNYNYLYRLFRKSNLKPFERDISTEIYQAGSTPCNGVEGFNCYFPLQSYGFQPTNGVGYQPYRVVVLSFELLHAPATVCGPKKSTNLVKNKCVNFNFNGLTGTGVLTESNKKFLPFQQFGRDIADTTDAVRDPQTLEILDITPCSFGGVSVITPGTNTSNQVAVLYQGVNCTEVPVAIHADQLTPTWRVYSTGSNVFQTRAGCLIGAEHVNNSYECDIPIGAGICASYQTQTNSPRRARSVASQSIIAYTMSLGAENSVAYSNNSIAIPTNFTISVTTEILPVSMTKTSVDCTMYICGDSTECSNLLLQYGSFCTQLNRALTGIAVEQDKNTQEVFAQVKQIYKTPPIKDFGGFNFSQILPDPSKPSKRSFIEDLLFNKVTLADAGFIKQYGDCLGDIAARDLICAQKFNGLTVLPPLLTDEMIAQYTSALLAGTITSGWTFGAGAALQIPFAMQMAYRFNGIGVTQNVLYENQKLIANQFNSAIGKIQYSLSSTASALGKLQDVVNQNAQALNTLVKQLSSNFGAISSVLNDILSRLDKVEAEVQIDRLITGRLQSLQTYVTQQLIRAAEIRASANLAATKMSECVLGQSKRVDFCGKGYHLMSFPQSAPHGVVFLHVTYVPAQEKNFTTAPAICHDGKAHFPREGVFVSNGTHWFVTQRNFYEPQIITTDNTFVSGNCDVVIGIVNNTVYDPLQPELDSGGGGSDIDPYKEFGSSYQLLNFLPLDFFPDLNALVDTATALYEEELTGREHCSPHHTAIRQALVCWDELTKLIAWMSSNITSEQVRTIIVNHVNDTWGLKVRQSLWFHLSCLTFGQHTVQEFLVSFGVWIRTPAPYRPPNAPILSTLPEHTVIC

SEQ ID NO: 10704 - protein, 1301 aa, Artificial Sequence; identical to SEQ ID NO: 10667
  SARS-CoV-2/Portugal/PT0034/2020__EPI_ISL_418019 spike protein (1-1147) WhcAg construct

SEQ ID NO: 10705 - protein, 1301 aa, Artificial Sequence; identical to SEQ ID NO: 10659
  SARS-CoV-2/Iceland/202/2020__EPI_ISL_417750 spike protein (1-1147) WhcAg construct

SEQ ID NO: 10706 - protein, 1301 aa, Artificial Sequence
  SARS-CoV-2/USA/WA-UW261/2020__EPI_ISL_418046 spike protein (1-1147) WhcAg construct
MFVFLVLLPLVSSQCVNLTTRTQLPPAYTNSFTRGVYYPDKVFRSSVLHSTQDLFLPFFSNVTWFHAIHVSGTNGTKRFDNPVLPFNDGVYFASTEKSNIIRGWIFGTTLDSKTQSLLIVNNATNVVIKVCEFQFCNDPFLGVYYHKNNKSWMESEFRVYSSANNCTFEYVSQPFLMDLEGKQGNFKNLREFVFKNIDGYFKIYSKHTPINLVRDLPQGFSALEPLVDLPIGINITRFQTLLALHRSYLTPGDSSSGWTAGAAAYYVGYLQPRTFLLKYNENGTITDAVDCALDPLSETKCTLKSFTVEKGIYQTSNFRVQPTESIVRFPNITNLCPFGEVFNATRFTSVYAWNRKRISNCVADYSVLYNSASFSTFKCYGVSPTKLNDLCFTNVYADSFVIRGDEVRQIAPGQTGKIADYNYKLPDDFTGCVIAWNSNNLDSKVGGNYNYLYRLFRKSNLKPFERDISTEIYQAGSTPCNGVEGFNCYFPLQSYGFQPTNGVGYQPYRVVVLSFELLHAPATVCGPKKSTNLVKNKCVNFNFNGLTGTGVLTESNKKFLPFQQFGRDIADTTDAVRDPQTLEILDITPCSFGGVSVITPGTNTSNQVAVLYQDVNCTEVPVAIHADQLTPTWRVYSTGSNVFQTRAGCLIGAEHVNNSYECDIPIGAGICASYQTQTNSPRRARSVASQSIIAYTMSLGAENSVAYSNNSIAIPTNFTISVTTEILPVSMTKTSVDCTMYICGDSTECSNLLLQYGSFCTQLNRALTGIAVEQDKNTQEVFAQVKQIYKTPPIKDFGGFNFSQILPDPSKPSKRSFIEDLLFNKVTLADAGFIKQYGDCLGDIAARDLICAQKFNGLTVLPPLLTDEMIAQYTSALLAGTITSGWTFGAGAALQIPFAMQMAYRFNGIGVTQNVLYENQKLIANQFNSAIGKIQDSLSSTASALGKLQDVVNQNAQALNTLVKQLSSNFGAISSVLNDILSRLDKVEAEVQIDRLITGRLQSLQTYVTQQLIRAAEIRASANLAATKMSECVLGQSKRVDFCGKGYHLMSFPQSAPHGVVFLHVTYVPAQEKNFTTAPAICHDGKAHFPREGVFVSNGTHWFVTQRNFYEPQIITTDNTFVSGNCDVVIGIVNNTVYDPLQPELDSGGGGSDIDPYKEFGSSYQLLNFLPLDFFPDLNALVDTATALYEEELTGREHCSPHHTAIRQALVCWDELTKLIAWMSSNITSEQVRTIIVNHVNDTWGLKVRQSLWFHLSCLTFGQHTVQEFLVSFGVWIRTPAPYRPPNAPILSTLPEHTVIC

SEQ ID NO: 10707 - protein, 1301 aa, Artificial Sequence
  SARS-CoV-2/Portugal/PT0035/2020__EPI_ISL_418020 spike protein (1-1147) WhcAg construct
MFVFLVLLPLVSSQCVNLTTRTQLPPAYTNSFTRGVYYPDKVFRSSVLHSTQDLFLPFFSNVTWFHAIHVSGTNGTKRFDNPVLPFNDGVYFASTEKSNIIRGWIFGTTLDSKTQSLLIVNNATNVVIKVCEFQFCNDPFLGVYYHKNNKSWMESEFRVYSSANNCTFEYVSQPFLMDLEGKQGNFKNLREFVFKNIDGYFKIYSKHTPINLVRDLPQGFSALEPLVDLPIGINITRFQTLLALHRSYLTPGDSSSGWTAGAAAYYVGYLQPRTFLLKYNENGTITDAVDCALDPLSETKCTLKSFTVEKGIYQTSNFRVQPTESIVRFPNITNLCPFGEVFNATRFASVYAWNRKRISNCVADYSVLYNSASFSTFKCYGVSPTKLNDLCFTNVYADSFVIRGDEVRQIAPGQTGKIADYNYKLPDDFTGCVIAWNSNNLDSKVGGNYNYLYRLFRKSNLKPFERDISTEIYQAGSTPCNGVEGFNCYFPLQSYGFQPTNGVGYQPYRVVVLSFELLHAPATVCGPKKSTNLVKNKCVNFNFNGLTGTGVLTESNKKFLPFQQFGRDIADTTDAVRDPQTLEILDITPCSFGGVSVITPGTNTSNQVAVLYQDVNCTEVPVAIHADQLTPTWRVYSTGSNVFQTRAGCLIGAEHVNNSYECDIPIGAGICASYQTQTNSPRRARSVASQSIIAYTMSLGAENSVAYSNNSIAIPTNFTISVTTEILPVSMTKTSVDCTMYICGDSTECSNLLLQYGSFCTQLNRALTGIAVEQDKNTQEVFAQVKQIYKTPPIKDFGGFNFSQILPDPSKPSKRSFIEDLLFNKVTLADAGFIKQYGDCLGDISARDLICAQKFNGLTVLPPLLTDEMIAQYTSALLAGTITSGWTFGAGAALQIPFAMQMAYRFNGIGVTQNVLYENQKLIANQFNSAIGKIQDSLSSTASALGKLQDVVNQNAQALNTLVKQLSSNFGAISSVLNDILSRLDKVEAEVQIDRLITGRLQSLQTYVTQQLIRAAEIRASANLAATKMSECVLGQSKRVDFCGKGYHLMSFPQSAPHGVVFLHVTYVPAQEKNFTTAPAICHDGKAHFPREGVFVSNGTHWFVTQRNFYEPQIITTDNTFVSGNCDVVIGIVNNTVYDPLQPELDSGGGGSDIDPYKEFGSSYQLLNFLPLDFFPDLNALVDTATALYEEELTGREHCSPHHTAIRQALVCWDELTKLIAWMSSNITSEQVRTIIVNHVNDTWGLKVRQSLWFHLSCLTFGQHTVQEFLVSFGVWIRTPAPYRPPNAPILSTLPEHTVIC

SEQ ID NO: 10708 - protein, 1301 aa, Artificial Sequence
  SARS-CoV-2/USA/NY-NYUMC7/2020__EPI_ISL_418192 spike protein (1-1147) WhcAg construct
MFVFLVLLPLVSSQCVNLTTRTQLPPAYTNSFTRGVYYPDKVFRSSVLHSTQDLFLPFFSNVTWFHAIHVSGTNGTKRFDNPVLPFNDGVYFASTEKSNIIRGWIFGTTLDSKTQSLLIVNNATNVVIKVCEFQFCNDPFLGVYHHKNNKSWMESEFRVYSSANNCTFEYVSQPFLMDLEGKQGNFKNLREFVFKNIDGYFKIYSKHTPINLVRDLPQGFSALEPLVDLPIGINITRFQTLLALHRSYLTPGDSSSGWTAGAAAYYVGYLQPRTFLLKYNENGTITDAVDCALDPLSETKCTLKSFTVEKGIYQTSNFRVQPTESIVRFPNITNLCPFGEVFNATRFASVYAWNRKRISNCVADYSVLYNSASFSTFKCYGVSPTKLNDLCFTNVYADSFVIRGDEVRQIAPGQTGKIADYNYKLPDDFTGCVIAWNSNNLDSKVGGNYNYLYRLFRKSNLKPFERDISTEIYQAGSTPCNGVEGFNCYFPLQSYGFQPTNGVGYQPYRVVVLSFELLHAPATVCGPKKSTNLVKNKCVNFNFNGLTGTGVLTESNKKFLPFQQFGRDIADTTDAVRDPQTLEILDITPCSFGGVSVITPGTNTSNQVAVLYQGVNCTEVPVAIHADQLTPTWRVYSTGSNVFQTRAGCLIGAEHVNNSYECDIPIGAGICASYQTQTNSPRRARSVASQSIIAYTMSLGAENSVAYSNNSIAIPTNFTISVTTEILPVSMTKTSVDCTMYICGDSTECSNLLLQYGSFCTQLNRALTGIAVEQDKNTQEVFAQVKQIYKTPPIKDFGGFNFSQILPDPSKPSKRSFIEDLLFNKVTLADAGFIKQYGDCLGDIAARDLICAQKFNGLTVLPPLLTDEMIAQYTSALLAGTITSGWTFGAGAALQIPFAMQMAYRFNGIGVTQNVLYENQKLIANQFNSAIGKIQDSLSSTASALGKLQDVVNQNAQALNTLVKQLSSNFGAISSVLNDILSRLDKVEAEVQIDRLITGRLQSLQTYVTQQLIRAAEIRASANLAATKMSECVLGQSKRVDFCGKGYHLMSFPQSAPHGVVFLHVTYVPAQEKNFTTAPAICHDGKAHFPREGVFVSNGTHWFVTQRNFYEPQIITTDNTFVSGNCDVVIGIVNNTVYDPLQPELDSGGGGSDIDPYKEFGSSYQLLNFLPLDFFPDLNALVDTATALYEEELTGREHCSPHHTAIRQALVCWDELTKLIAWMSSNITSEQVRTIIVNHVNDTWGLKVRQSLWFHLSCLTFGQHTVQEFLVSFGVWIRTPAPYRPPNAPILSTLPEHTVIC

SEQ ID NO: 10709 - protein, 1301 aa, Artificial Sequence
  SARS-CoV-2/Iceland/189/2020__EPI_ISL_417709 spike protein (1-1147) WhcAg construct
MFVFLVLLPLVSSQCVNLTTRTQLPPAYTNSFTRGVYYPDKVFRSSVLHSTQDLFLPFFSNVTWFHAIHVSGTNGTKRFDNPVLPFNDGVYFASTEKSNIIRGWIFGTTLDSKTQSLLIVNNATNVVIKVCEFQFCNDPFLGVYYHKNNKSWMESEFRVYSSANNCTFEYVSQPFLMDLEGKQGNFKNLREFVFKNIDGYFKIYSKHTPINLVRDLPQGFSALEPLVDLPIGINITRFQTLLALHRSYLTPGDSSSGWTAGAAAYYVGYLQPRTFLLKYNENGTITDAVDCALDPLSETKCTLKSFTVEKGIYQTSNFRVQPTESIVRFPNITNLCPFGEVFNATRFASVYAWNRKRISNCVADYSVLYNSASFSTFKCYGVSPTKLNDLCFTNVYADSFVIRGDEVRQIAPGQTGKIADYNYKLPDDFTGCVIAWNSNNLDSKVGGNYNYLYRLFRKSNLKPFERDISTEIYQAGSTPCNGVEGFNCYFPLQSYGFQPTNGVGYQPYRVVVLSFELLHAPATVCGPKKSTNLVKNKCVNFNFNGLTGTGVLTESNKKFLPFQQFGRDIADTTDAVRDPQTLEILDITPCSFGGVSVITPGTNTSNQVAVLYQGVNCTEVPVAIHADQLTPTWRVYSTGSNVFQTRAGCLIGAEHVNNSYECDIPIGAGICASYQTQTNSPRRARSVASQSIIAYTMSLGAENSVAYSNNSIAIPTNFTISVTTEILPVSMTKTSVDCTMYICGDSTECSNLLLQYGSFCTQLNRALTGIAVEQDKNTQEVFAQVKQIYKTPPIKDFGGFNFSQILPDPSKPSKRSFIEDLLFNKVTLADAGFTKQYGDCLGDIAARDLICAQKFNGLTVLPPLLTDEMIAQYTSALLAGTITSGWTFGAGAALQIPFAMQMAYRFNGIGVTQNVLYENQKLIANQFNSAIGKIQDSLSSTASALGKLQDVVNQNAQALNTLVKQLSSNFGAISSVLNDILSRLDKVEAEVQIDRLITGRLQSLQTYVTQQLIRAAEIRASANLAATKMSECVLGQSKRVDFCGKGYHLMSFPQSAPHGVVFLHVTYVPAQEKNFTTAPAICHDGKAHFPREGVFVSNGTHWFVTQRNFYEPQIITTDNTFVSGNCDVVIGIVNNTVYDPLQPELDSGGGGSDIDPYKEFGSSYQLLNFLPLDFFPDLNALVDTATALYEEELTGREHCSPHHTAIRQALVCWDELTKLIAWMSSNITSEQVRTIIVNHVNDTWGLKVRQSLWFHLSCLTFGQHTVQEFLVSFGVWIRTPAPYRPPNAPILSTLPEHTVIC

SEQ ID NO: 10710 - protein, 1301 aa, Artificial Sequence
  SARS-CoV-2/Australia/NSW56/2020__EPI_ISL_417408 spike protein (1-1147) WhcAg construct
MFVFLVLLPLVSSQCVNLTTRTQLPPAYTNSFTRGVYYPDKVFRSSVLHSTQDLFLPFFSNVTWFHAIHVSGTNGTKRFDNPVLPFNDGVYFASTEKSNIIRGWIFGTTLDSKTQSLLIVNNATNVVIKVCEFQFCNDPFLGVYYHKNNKSWMESEFRVYSSANNCTFEYVSQPFLMDLEGKQGNFKNLREFVFKNIDGYFKIYSKHTPINLVRDLPQGFSALEPLVDLPIGINITRFQTLLALHRSYLTPGDSSSGWTAGAAAYYVGYLQPRTFLLKYNENGTITDAVDCALDPLSETKCTLKSFTVEKGIYQTSNFRVQPTESIVRFPNITNLCPFGEVFNATRFASVYAWNRKRISNCVADYSVLYNSASFSTFKCYGVSPTKLNDLCFTNVYADSFVIRGDEVRQIAPGQTGKIADYNYKLPDDFTGCVIAWNSNNLDSKVGGNYNYLYRLFRKSNLKPFERDISTEIYQAGSTPCNGVEGFNCYFPLQSYGFQPTNGVGYQPYRVVVLSFELLHAPATVCGPKKSTNLVKNKCVNFNFNGLTGTGVLTESNKKFLPFQQFGRDIADTTDAVRDPQTLEILDITPCSFGGVSVITPGTNTSNQVAVLYQDVNCTEVPVAIHADQLTPTWRVYSTGSNVFQTRAGCLIGAEHVNNSYECDIPIGAGICASYQTQTNSPRRARSVASQSIIAYTMSLGAENSVAYSNNSIAIPTNFTISVTTEILPVSMTKTSVDCTMYICGDSTECSNLLLQYGSFCTQLNRALTGIAVEQDKNTQEVFAQVKQIYKTPPIKDFGGFNFSQILPDSSKPSKRSFIEDLLFNKVTLADAGFIKQYGDCLGDIAARDLICAQKFNGLTVLPPLLTDEMIAQYTSALLAGTITSGWTFGAGAALQIPFAMQMAYRFNGIGVTQNVLYENQKLIANQFNSAIGKIQDSLSSTASALGKLQDVVNQNAQALNTLVKQLSSNFGAISSVLNDILSRLDKVEAEVQIDRLITGRLQSLQTYVTQQLIRAAEIRASANLAATKMSECVLGQSKRVDFCGKGYHLMSFPQSAPHGVVFLHVTYVPAQEKNFTTAPAICHDGKAHFPREGVFVSNGTHWFVTQRNFYEPQIITTDNTFVSGNCDVVIGIVNNTVYDPLQPELDSGGGGSDIDPYKEFGSSYQLLNFLPLDFFPDLNALVDTATALYEEELTGREHCSPHHTAIRQALVCWDELTKLIAWMSSNITSEQVRTIIVNHVNDTWGLKVRQSLWFHLSCLTFGQHTVQEFLVSFGVWIRTPAPYRPPNAPILSTLPEHTVIC

SEQ ID NO: 10711 - protein, 1301 aa, Artificial Sequence
  SARS-CoV-2/Iceland/280/2020__EPI_ISL_417608 spike protein (1-1147) WhcAg construct
MFVFLVLLPLVSSQCVNLTTRTQLPPAYTNSFTRGVYYPDKVFRSSVLHSTQDLFLPFFSNVTWFHAIHVSGTNGTKRFDNPVLPFNDGVYFASTEKSNIIRGWIFGTTLDSKTQSLLIVNNATNVVIKVCEFQFCNDPFLGVYYHKNNKSWMESEFRVYSSANNCTFEYVSQPFLMDLEGKQGNFKNLREFVFKNIDGYFKIYSKHTPINLVRDLPQGFSALEPLVDLPIGINITRFQTLLALHRSYLTPGDSSSGWTAGAAAYYVGYLQPRTFLLKYNENGTITDAVDCALDPLSETKCTLKSFTVEKGIYQTSNFRVQPTESIVRFPNITNLCPFGEVFNATRFASVYAWNRKRISNCVADYSVLYNSASFSTFKCYGVSPTKLNDLCFTNVYADSFVIRGDEVRQIAPGQTGKIADYNYKLPDDFTGCVIAWNSNNLDSKVGGNYNYLYRLFRKSNLKPFERDISTEIYQAGSTPCNGVEGFNCYFPLQSYGFQPTNGVGYQPYRVVVLSFELLHAPATVCGPKKSTNLVKNKCVNFNFNGLTGTGVLTESNKKFLPFQQFGRDIADTTDAVRDPQTLEILDITPCSFGGVSVITPGTNTSNQVAVLYQGVNCTEVPVAIHADQLTPTWRVYSTGSNVFQTRAGCLIGAEHVNNSYECDIPIGAGICASYHTQTNSPRRARSVASQSIIAYTMSLGAENSVAYSNNSIAIPTNFTISVTTEILPVSMTKTSVDCTMYICGDSTECSNLLLQYGSFCTQLNRALTGIAVEQDKNTQEVFAQVKQIYKTPPIKDFGGFNFSQILPDPSKPSKRSFIEDLLFNKVTLADAGFIKQYGDCLGDIAARDLICAQKFNGLTVLPPLLTDEMIAQYTSALLAGTITSGWTFGAGAALQIPFAMQMAYRFNGIGVTQNVLYENQKLIANQFNSAIGKIQDSLSSTASALGKLQDVVNQNAQALNTLVKQLSSNFGAISSVLNDILSRLDKVEAEVQIDRLITGRLQSLQTYVTQQLIRAAEIRASANLAATKMSECVLGQSKRVDFCGKGYHLMSFPQSAPHGVVFLHVTYVPAQEKNFTTAPAICHDGKAHFPREGVFVSNGTHWFVTQRNFYEPQIITTDNTFVSGNCDVVIGIVNNTVYDPLQPELDSGGGGSDIDPYKEFGSSYQLLNFLPLDFFPDLNALVDTATALYEEELTGREHCSPHHTAIRQALVCWDELTKLIAWMSSNITSEQVRTIIVNHVNDTWGLKVRQSLWFHLSCLTFGQHTVQEFLVSFGVWIRTPAPYRPPNAPILSTLPEHTVIC

SEQ ID NO: 10712 - protein, 1301 aa, Artificial Sequence; identical to SEQ ID NO: 10667
  SARS-CoV-2/Iceland/247/2020__EPI_ISL_417575 spike protein (1-1147) WhcAg construct

SEQ ID NO: 10713 - protein, 1301 aa, Artificial Sequence
  SARS-CoV-2/Iceland/238/2020__EPI_ISL_417566 spike protein (1-1147) WhcAg construct
MFVFLVLLPLVSSQCVNLTTRTQLPPAYTNSFTRGVYYPDKVFRSSVLHSTQDLFLPFFSNVTWFHAIHVSGTNGTKRFDNPVLPFNDGVYFASTEKSNIIRGWIFGTTLDSKTQSLLIVNNATNVVIKVCEFQFCNDPFLGVYYHKNNKSWMESEFRVYSSANNCTFEYVSQPFLMDLEGKQGNFKNLREFVFKNIDGYFKIYSKHTPINLVRDLPQGFSALEPLVDLPIGINITRFQTLLALHRSYLTPGDSSSGWTAGAAAYYVGYLQPRTFLLKYNENGTITDAVDCALDPLSETKCTLKSFTVEKGIYQTSNFRVQPTESIVRFPNITNLCPFGEVFNATRFASVYAWNRKRISNCVADYSVLYNSASFSTFKCYGVSPTKLNDLCFTNVYADSFVIRGDEVRQIAPGQTGKIADYNYKLPDDFTGCVIAWNSNNLDSKVGGNYNYLYRLFRKSNLKPFERDISTEIYQAGSTPCNGVEGFNCYFPLQSYGFQPTNGVGYQPYRVVVLSFELLHAPATVCGPKKSTNLVKNKCVNFNFNGLTGTGVLTESNKKFLPFQQFGRDIADTTDAVRDPQTLEILDITPCSFGGVSVITPGTNTSNQVAVLYQGVNCTEVPVAIHADQLTPTWRVYSTGSNVFQTRAGCLIGAEHVNNSYECDIPIGAGICASYQTQTNSPRRARSVASQSIIAYTMSLGAENSVAYSNNSIAIPTNFTISVTTEILPVSMTKTSVDCTMYICGDSTECSNLLLQYGSFCTQLNRALTGIAVEQDKNTQEVFAQVKQIYKTPPIKDFGGFNFSQILPDPSKPSKRSFIEDLLFNKVTLADVGFIKQYGDCLGDIAARDLICAQKFNGLTVLPPLLTDEMIAQYTSALLAGTITSGWTFGAGAALQIPFAMQMAYRFNGIGVTQNVLYENQKLIANQFNSAIGKIQDSLSSTASALGKLQDVVNQNAQALNTLVKQLSSNFGAISSVLNDILSRLDKVEAEVQIDRLITGRLQSLQTYVTQQLIRAAEIRASANLAATKMSECVLGQSKRVDFCGKGYHLMSFPQSAPHGVVFLHVTYVPAQEKNFTTAPAICHDGKAHFPREGVFVSNGTHWFVTQRNFYEPQIITTDNTFVSGNCDVVIGIVNNTVYDPLQPELDSGGGGSDIDPYKEFGSSYQLLNFLPLDFFPDLNALVDTATALYEEELTGREHCSPHHTAIRQALVCWDELTKLIAWMSSNITSEQVRTIIVNHVNDTWGLKVRQSLWFHLSCLTFGQHTVQEFLVSFGVWIRTPAPYRPPNAPILSTLPEHTVIC

SEQ ID NO: 10714 - protein, 1301 aa, Artificial Sequence
  SARS-CoV-2/Greece/16/2020__EPI_ISL_418265 spike protein (1-1147) WhcAg construct
MFVFLVLLPLVSSQCVNLTTRTQLPPAYTNSFTRGVYYPDKVFRSSVLHSTQDLFLPFFSNVTWFHAIHVSGTNGTKRFDNPVLPFNDGVYFASTEKSNIIRGWIFGTTLDSKTQSLLIVNNATNVVIKVCEFQFCNDPFLGVYYHKNNKSWMESEFRVYSSANNCTFEYVSQPFLMDLEGKQGNFKNLREFVFKNVDGYFKIYSKHTPINLVRDLPQGFSALEPLVDLPIGINITRFQTLLALHRSYLTPGDSSSGWTAGAAAYYVGYLQPRTFLLKYNENGTITDAVDCALDPLSETKCTLKSFTVEKGIYQTSNFRVQPTESIVRFPNITNLCPFGEVFNATRFASVYAWNRKRISNCVADYSVLYNSASFSTFKCYGVSPTKLNDLCFTNVYADSFVIRGDEVRQIAPGQTGKIADYNYKLPDDFTGCVIAWNSNNLDSKVGGNYNYLYRLFRKSNLKPFERDISTEIYQAGSTPCNGVEGFNCYFPLQSYGFQPTNGVGYQPYRVVVLSFELLHAPATVCGPKKSTNLVKNKCVNFNFNGLTGTGVLTESNKKFLPFQQFGRDIADTTDAVRDPQTLEILDITPCSFGGVSVITPGTNTSNQVAVLYQDVNCTEVPVAIHADQLTPTWRVYSTGSNVFQTRAGCLIGAEHVNNSYECDIPIGAGICASYQTQTNSPRRARSVASQSIIAYTMSLGAENSVAYSNNSIAIPTNFTISVTTEILPVSMTKTSVDCTMYICGDSTECSNLLLQYGSFCTQLNRALTGIAVEQDKNTQEVFAQVKQIYKTPPIKDFGGFNFSQILPDPSKPSKRSFIEDLLFNKVTLADAGFIKQYGDCLGDIAARDLICAQKFNGLTVLPPLLTDEMIAQYTSALLAGTITSGWTFGAGAALQIPFAMQMAYRFNGIGVTQNVLYENQKLIANQFNSAIGKIQDSLSSTASALGKLQDVVNQNAQALNTLVKQLSSNFGAISSVLNDILSRLDKVEAEVQIDRLITGRLQSLQTYVTQQLIRAAEIRASANLAATKMSECVLGQSKRVDFCGKGYHLMSFPQSAPHGVVFLHVTYVPAQEKNFTTAPAICHDGKAHFPREGVFVSNGTHWFVTQRNFYEPQIITTDNTFVSGNCDVVIGIVNNTVYDPLQPELDSGGGGSDIDPYKEFGSSYQLLNFLPLDFFPDLNALVDTATALYEEELTGREHCSPHHTAIRQALVCWDELTKLIAWMSSNITSEQVRTIIVNHVNDTWGLKVRQSLWFHLSCLTFGQHTVQEFLVSFGVWIRTPAPYRPPNAPILSTLPEHTVIC

SEQ ID NO: 10715 - protein, 1301 aa, Artificial Sequence
  SARS-CoV-2/Iceland/319/2020__EPI_ISL_417648 spike protein (1-1147) WhcAg construct
MFVFLVLLPLVSSQCVNLTTRTQLPPAYTNSFTRGVYYPDKVFRSSVLHSTQDLFLPFFSNVTWFHAIHVSGTNGTKRFDNPVLPFNDGVYFASTEKSNIIRGWIFGTTLDSKTQSLLIVNNATNVVIKVCEFQFCNDPFLGVYYHKNNKSWMESEFRVYSSANNCTFEYVSQPFLIDLEGKQGNFKNLREFVFKNIDGYFKIYSKHTPINLVRDLPQGFSALEPLVDLPIGINITRFQTLLALHRSYLTPGDSSSGWTAGAAAYYVGYLQPRTFLLKYNENGTITDAVDCALDPLSETKCTLKSFTVEKGIYQTSNFRVQPTESIVRFPNITNLCPFGEVFNATRFASVYAWNRKRISNCVADYSVLYNSASFSTFKCYGVSPTKLNDLCFTNVYADSFVIRGDEVRQIAPGQTGKIADYNYKLPDDFTGCVIAWNSNNLDSKVGGNYNYLYRLFRKSNLKPFERDISTEIYQAGSTPCNGVEGFNCYFPLQSYGFQPTNGVGYQPYRVVVLSFELLHAPATVCGPKKSTNLVKNKCVNFNFNGLTGTGVLTESNKKFLPFQQFGRDIADTTDAVRDPQTLEILDITPCSFGGVSVITPGTNTSNQVAVLYQGVNCTEVPVAIHADQLTPTWRVYSTGSNVFQTRAGCLIGAEHVNNSYECDIPIGAGICASYQTQTNSPRRARSVASQSIIAYTMSLGAENSVAYSNNSIAIPTNFTISVTTEILPVSMTKTSVDCTMYICGDSTECSNLLLQYGSFCTQLNRALTGIAVEQDKNTQEVFAQVKQIYKTPPIKDFGGFNFSQILPDPSKPSKRSFIEDLLFNKVTLADAGFIKQYGDCLGDIAARDLICAQKFNGLTVLPPLLTDEMIAQYTSALLAGTITSGWTFGAGAALQIPFAMQMAYRFNGIGVTQNVLYENQKLIANQFNSAIGKIQDSLSSTASALGKLQDVVNQNAQALNTLVKQLSSNFGAISSVLNDILSRLDKVEAEVQIDRLITGRLQSLQTYVTQQLIRAAEIRASANLAATKMSECVLGQSKRVDFCGKGYHLMSFPQSAPHGVVFLHVTYVPAQEKNFTTAPAICHDGKAHFPREGVFVSNGTHWFVTQRNFYEPQIITTDNTFVSGNCDVVIGIVNNTVYDPLQPELDSGGGGSDIDPYKEFGSSYQLLNFLPLDFFPDLNALVDTATALYEEELTGREHCSPHHTAIRQALVCWDELTKLIAWMSSNITSEQVRTIIVNHVNDTWGLKVRQSLWFHLSCLTFGQHTVQEFLVSFGVWIRTPAPYRPPNAPILSTLPEHTVIC

SEQ ID NO: 10716 - protein, 1301 aa, Artificial Sequence
  SARS-CoV-2/Congo/94/2020__EPI_ISL_417947 spike protein (1-1147) WhcAg construct
MFVFLVLLPLVSSQCVNLTTRTQLPPAYTNSFTRGVYYPDKVFRSSVLHSTQDLFLPFFSNVTWFHAIHVSGTNGTKRFDNPVLPFNDGVYFASTEKSNIIRGWIFGTTLDSKTQSLLIVNNATNVVIKVCEFQFCNDPFLGVYYHKNNKSWMESEFRVYSSANNCTFEYVSQPFLMDLEGKQGNFKNLREFVFKNIDGYFKIYSKHTPINLVRDLPQGFSALEPLVDLPIGINITRFQTLLALHRSYLTPGDSSSGWTAGAAAYYVGYLQPRTFLLKYNENGTITDAVDCALDPLSETKCTLKSFTVEKGIYQTSNFRVQPTESIVRFPNITNLCPFGEVFNATRFASVYAWNRKRISNCVADYSVLYNSASFSTFKCYGVSPTKLNDLCFTNVYADSFVIRGDEVRQIAPGQTGKIADYNYKLPDDFTGCVIAWNSNNLDSKVGGNYNYLYRLFRKSNLKPFERDISTEIYQAGSTPCNGVEGFNCYFPLQSYGFQPTNGVGYQPYRVVVLSFELLHAPATVCGPKKSTNLVKNKCVNFNFNGLTGTGVLTESNKKFLPFQQFGRDIADTTDAVRDPQTLEILDITPCSFGGVSVITPGTNTSNQVAVLYQGVNCTEVPVAIHADQLTPTWRVYSTGSNVFQTRAGCLIGAEHVNNSYECDIPIGAGICASYQTQTNSPRRARSVASQSIIAYTMSLGAENSVAYSNNSIAIPTNFTISVTTEILPVSMTKTSVDCTMYICGDSTECSNLLLQYGSFCTQLNRALTGIAVEQDKNTQEVFAQVKQIYKTPPIKDFGGFNFSQILPDPSKPSKRSFIEDILFNKVTLADAGFIKQYGDCLGDIAARDLICAQKFNGLTVLPPLLTDEMIAQYTSALLAGTITSGWTFGAGAALQIPFAMQMAYRFNGIGVTQNVLYENQKLIANQFNSAIGKIQDSLSSTASALGKLQDVVNQNAQALNTLVKQLSSNFGAISSVLNDILSRLDKVEAEVQIDRLITGRLQSLQTYVTQQLIRAAEIRASANLAATKMSECVLGQSKRVDFCGKGYHLMSFPQSAPHGVVFLHVTYVPAQEKNFTTAPAICHDGKAHFPREGVFVSNGTHWFVTQRNFYEPQIITTDNTFVSGNCDVVIGIVNNTVYDPLQPELDSGGGGSDIDPYKEFGSSYQLLNFLPLDFFPDLNALVDTATALYEEELTGREHCSPHHTAIRQALVCWDELTKLIAWMSSNITSEQVRTIIVNHVNDTWGLKVRQSLWFHLSCLTFGQHTVQEFLVSFGVWIRTPAPYRPPNAPILSTLPEHTVIC

SEQ ID NO: 10717 - protein, 1301 aa, Artificial Sequence
  SARS-CoV-2/Congo/158/2020__EPI_ISL_417950 spike protein (1-1147) WhcAg construct
MFVFLVLLPLVSSQCVNLTTRTQLPPAYTNSFTRGVYYPDKVFRSSVLHSTQDLFLPFFSNVTWFHAIHVSGTNGTKRFDNPVLPFNDGVYFASTEKSNIIRGWIFGTTLDSKTQSLLIVNNATNVVIKVCEFQFCNDPFLGVYYHKNNKSWMESEFRVYSSANNCTFEYVSQPFLMDLEGKQGNFKNLREFVFKNIDGYFKIYSKHTPINLVRDLPQGFSALEPLVDLPIGINITRFQTLLALHRSYLTPGDSSSGWTAGAAAYYVGYLQPRTFLLKYNENGTITDAVDCALDPLSETKCTLKSFTVEKGIYQTSNFRVQPTESIVRFPNITNLCPFGEVFNATRFASVYAWNRKRISNCVADYSVLYNSASFSTFKCYGVSPTKLNDLCFTNVYADSFVIRGDEVRQIAPGQTGKIADYNYKLPDDFTGCVIAWNSNNLDSKVGGNYNYLYRLFRKSNLKPFERDISTEIYQAGSTPCNGVEGFNCYFPLQSYGFQPTNGVGYQPYRVVVLSFELLHAPATVCGPKKSTNLVKNKCVNFNFNGLTGTGVLTESNKKFLPFQQFGRDIADTTDAVRDPQTLEILDITPCSFGGVSVITPGTNTSNQVAVLYQDVNCTEVPVAIHADQLTPTWRVYSTGSNVFQTRAGCLIGAEHVNNSYECDIPIGAGICASYQTQTNSPRRARSVASQSIIAYTMSLGAENSVAYSNNSIAIPTNFTISVTTEILPVSMTKTSVDCTMYICGDSTECSNLLLQYGSFCTQLNRALTGIAVEQDKNTQEVFAQVKQIYKTPPIKDFGGFNFSQILPDPSKPSKRSFIEDLLFNKVTLADAGFIKQYGDCLGDIAARDLICAQKFNGLTVLPPLLTDEMIAQYTSALLAGTITSGWTFGAGAALQIPFAMQMAYRFNGIGVTQNVLYENQKLIANQFNSAIGKIQDSLSSTASALGKLQDVVNQNAQALNTLVKQLSSNFGAISSVLNDILSRLDKVEAEVQIDRLITGRLQSLQTYVTQQLIRAAEIRASANLAATKMSECVLGQSKRVDFCGKGYHLMSFPQSAPHGVVFLHVTYVPAQEKNFTTAPAICHDGKAHFPREGVFVSNGTHWFVTQRNFYEPQIITTDNTFLSGNCDVVIGIVNNTVYDPLQPELDSGGGGSDIDPYKEFGSSYQLLNFLPLDFFPDLNALVDTATALYEEELTGREHCSPHHTAIRQALVCWDELTKLIAWMSSNITSEQVRTIIVNHVNDTWGLKVRQSLWFHLSCLTFGQHTVQEFLVSFGVWIRTPAPYRPPNAPILSTLPEHTVIC

SEQ ID NO: 10718 - protein, 1301 aa, Artificial Sequence
  SARS-CoV-2/USA/UT-00034/2020__EPI_ISL_417977 spike protein (1-1147) WhcAg construct
MFVFLVLLPLVSSQCVNLTTRTQLPPAYTNSFTRGVYYPDKVFRSSVLHSTQDLFLPFFSNVTWFHAIHVSGTNGTKRFDNPVLPFNDGVYFASTEKSNIIRGWIFGTTLDSKTQSLLIVNNATNVVIKVCEFQFCNDPFLGVYYYKNNKSWMESEFRVYSSANNCTFEYVSQPFLMDLEGKQGNFKNLREFVFKNIDGYFKIYSKHTPINLVRDLPQGFSALEPLVDLPIGINITRFQTLLALHRSYLTPGDSSSGWTAGAAAYYVGYLQPRTFLLKYNENGTITDAVDCALDPLSETKCTLKSFTVEKGIYQTSNFRVQPTESIVRFPNITNLCPFGEVFNATRFASVYAWNRKRISNCVADYSVLYNSASFSTFKCYGVSPTKLNDLCFTNVYADSFVIRGDEVRQIAPGQTGKIADYNYKLPDDFTGCVIAWNSNNLDSKVGGNYNYLYRLFRKSNLKPFERDISTEIYQAGSTPCNGVEGFNCYFPLQSYGFQPTNGVGYQPYRVVVLSFELLHAPATVCGPKKSTNLVKNKCVNFNFNGLTGTGVLTESNKKFLPFQQFGRDIADTTDAVRDPQTLEILDITPCSFGGVSVITPGTNTSNQVAVLYQGVNCTEVPVAIHADQLTPTWRVYSTGSNVFQTRAGCLIGAEHVNNSYECDIPIGAGICASYQTQTNSPRRARSVASQSIIAYTMSLGAENSVAYSNNSIAIPTNFTISVTTEILPVSMTKTSVDCTMYICGDSTECSNLLLQYGSFCTQLNRALTGIAVEQDKNTQEVFAQVKQIYKTPPIKDFGGFNFSQILPDPSKPSKRSFIEDLLFNKVTLADAGFIKQYGDCLGDIAARDLICAQKFNGLTVLPPLLTDEMIAQYTSALLAGTITSGWTFGAGAALQIPFAMQMAYRFNGIGVTQNVLYENQKLIANQFNSAIGKIQDSLSSTASALGKLQDVVNQNAQALNTLVKQLSSNFGAISSVLNDILSRLDKVEAEVQIDRLITGRLQSLQTYVTQQLIRAAEIRASANLAATKMSECVLGQSKRVDFCGKGYHLMSFPQSAPHGVVFLHVTYVPAQEKNFTTAPAICHDGKAHFPREGVFVSNGTHWFVTQRNFYEPQIITTDNTFVSGNCDVVIGIVNNTVYDPLQPELDSGGGGSDIDPYKEFGSSYQLLNFLPLDFFPDLNALVDTATALYEEELTGREHCSPHHTAIRQALVCWDELTKLIAWMSSNITSEQVRTIIVNHVNDTWGLKVRQSLWFHLSCLTFGQHTVQEFLVSFGVWIRTPAPYRPPNAPILSTLPEHTVIC

SEQ ID NO: 10719 - protein, 1301 aa, Artificial Sequence
  SARS-CoV-2/USA/UT-00033/2020__EPI_ISL_417976 spike protein (1-1147) WhcAg construct
MFVFLVLLPLVSSQCVNLTTRTQLPPAYTNSFTRGVYYPDKVFRSSVLHSTQDLFLPFFSNVTWFHAIHVSGTNGTKRFDNPVLPFNDGVYFASTEKSNIIRGWIFGTTLDSKTQSLLIVNNATNVVIKVCEFQFCNDPFLGVYYHKNNKSWMESEFRVYSSANNCTFEYVSQPFLMDLEGKQGNFKNLREFVFKNIDGYFKIYSKHTPINLVRDLPQGFSALEPLVDLPIGINITRFQTLLALHRSYLTPGDSSSGLTAGAAAYYVGYLQPRTFLLKYNENGTITDAVDCALDPLSETKCTLKSFTVEKGIYQTSNFRVQPTESIVRFPNITNLCPFGEVFNATRFASVYAWNRKRISNCVADYSVLYNSASFSTFKCYGVSPTKLNDLCFTNVYADSFVIRGDEVRQIAPGQTGKIADYNYKLPDDFTGCVIAWNSNNLDSKVGGNYNYLYRLFRKSNLKPFERDISTEIYQAGSTPCNGVEGFNCYFPLQSYGFQPTNGVGYQPYRVVVLSFELLHAPATVCGPKKSTNLVKNKCVNFNFNGLTGTGVLTESNKKFLPFQQFGRDIADTTDAVRDPQTLEILDITPCSFGGVSVITPGTNTSNQVAVLYQGVNCTEVPVAIHADQLTPTWRVYSTGSNVFQTRAGCLIGAEHVNNSYECDIPIGAGICASYQTQTNSPRRARSVASQSIIAYTMSLGAENSVAYSNNSIAIPTNFTISVTTEILPVSMTKTSVDCTMYICGDSTECSNLLLQYGSFCTQLNRALTGIAVEQDKNTQEVFAQVKQIYKTPPIKDFGGFNFSQILPDPSKPSKRSFIEDLLFNKVTLADAGFIKQYGDCLGDIAARDLICAQKFNGLTVLPPLLTDEMIAQYTSALLAGTITSGWTFGAGAALQIPFAMQMAYRFNGIGVTQNVLYENQKLIANQFNSAIGKIQDSLSSTASALGKLQDVVNQNAQALNTLVKQLSSNFGAISSVLNDILSRLDKVEAEVQIDRLITGRLQSLQTYVTQQLIRAAEIRASANLAATKMSECVLGQSKRVDFCGKGYHLMSFPQSAPHGVVFLHVTYVPAQEKNFTTAPAICHDGKAHFPREGVFVSNGTHWFVTQRNFYEPQIITTDNTFVSGNCDVVIGIVNNTVYDPLQPELDSGGGGSDIDPYKEFGSSYQLLNFLPLDFFPDLNALVDTATALYEEELTGREHCSPHHTAIRQALVCWDELTKLIAWMSSNITSEQVRTIIVNHVNDTWGLKVRQSLWFHLSCLTFGQHTVQEFLVSFGVWIRTPAPYRPPNAPILSTLPEHTVIC

SEQ ID NO: 10720 - protein, 1301 aa, Artificial Sequence
  SARS-CoV-2/USA/WI-13/2020__EPI_ISL_417516 spike protein (1-1147) WhcAg construct
MFVFLVLLPLVSSQCVNLTTRTQLPPAYTNSFTRGVYYPDKVFRSSVLHSTQDLFLPFFSNVTWFHAIHVSGTNGTKRFDNPVLPFNDGVYFASTEKSNIIRGWIFGTTLDSKTQSLLIVNNATNVVIKVCEFQFCNDPFLGVYYHKNNKSWMESEFRVYSSANNCTFEYVSQPFLMDLEGKQGNFKNLREFVFKNIDGYFKIYSKHTPINLVRDLPQGFSALEPLVDLPIGINITRFQTLLALHRSYLTPGDSSSGWTAGAAAYYVGYLQPRTFLLKYNENGTITDAVDCALDPLSETKCTLKSFTVEKGIYQTSNFRVLPTESIVRFPNITNLCPFGEVFNATRFASVYAWNRKRISNCVADYSVLYNSASFSTFKCYGVSPTKLNDLCFTNVYADSFVIRGDEVRQIAPGQTGKIADYNYKLPDDFTGCVIAWNSNNLDSKVGGNYNYLYRLFRKSNLKPFERDISTEIYQAGSTPCNGVEGFNCYFPLQSYGFQPTNGVGYQPYRVVVLSFELLHAPATVCGPKKSTNLVKNKCVNFNFNGLTGTGVLTESNKKFLPFQQFGRDIADTTDAVRDPQTLEILDITPCSFGGVSVITPGTNTSNQVAVLYQGVNCTEVPVAIHADQLTPTWRVYSTGSNVFQTRAGCLIGAEHVNNSYECDIPIGAGICASYQTQTNSPRRARSVASQSIIAYTMSLGAENSVAYSNNSIAIPTNFTISVTTEILPVSMTKTSVDCTMYICGDSTECSNLLLQYGSFCTQLNRALTGIAVEQDKNTQEVFAQVKQIYKTPPIKDFGGFNFSQILPDPSKPSKRSFIEDLLFNKVTLADAGFIKQYGDCLGDIAARDLICAQKFNGLTVLPPLLTDEMIAQYTSALLAGTITSGWTFGAGAALQIPFAMQMAYRFNGIGVTQNVLYENQKLIANQFNSAIGKIQDSLSSTASALGKLQDVVNQNAQALNTLVKQLSSNFGAISSVLNDILSRLDKVEAEVQIDRLITGRLQSLQTYVTQQLIRAAEIRASANLAATKMSECVLGQSKRVDFCGKGYHLMSFPQSAPHGVVFLHVTYVPAQEKNFTTAPAICHDGKAHFPREGVFVSNGTHWFVTQRNFYEPQIITTDNTFVSGNCDVVIGIVNNTVYDPLQPELDSGGGGSDIDPYKEFGSSYQLLNFLPLDFFPDLNALVDTATALYEEELTGREHCSPHHTAIRQALVCWDELTKLIAWMSSNITSEQVRTIIVNHVNDTWGLKVRQSLWFHLSCLTFGQHTVQEFLVSFGVWIRTPAPYRPPNAPILSTLPEHTVIC

SEQ ID NO: 10721 - protein, 1300 aa, Artificial Sequence
  SARS-CoV-2/India/1-27/2020__EPI_ISL_413522 spike protein (1-1146) WhcAg construct
MFVFLVLLPLVSSQCVNLTTRTQLPPAYTNSFTRGVYYPDKVFRSSVLHSTQDLFLPFFSNVTWFHAIHVSGTNGTKRFDNPVLPFNDGVYFASTEKSNIIRGWIFGTTLDSKTQSLLIVNNATNVVIKVCEFQFCNDPFLGVYHKNNKSWMESEFRVYSSANNCTFEYVSQPFLMDLEGKQGNFKNLREFVFKNIDGYFKIYSKHTPINLVRDLPQGFSALEPLVDLPIGINITRFQTLLALHRSYLTPGDSSSGWTAGAAAYYVGYLQPRTFLLKYNENGTITDAVDCALDPLSETKCTLKSFTVEKGIYQTSNFRVQPTESIVRFPNITNLCPFGEVFNATRFASVYAWNRKRISNCVADYSVLYNSASFSTFKCYGVSPTKLNDLCFTNVYADSFVIRGDEVIQIAPGQTGKIADYNYKLPDDFTGCVIAWNSNNLDSKVGGNYNYLYRLFRKSNLKPFERDISTEIYQAGSTPCNGVEGFNCYFPLQSYGFQPTNGVGYQPYRVVVLSFELLHAPATVCGPKKSTNLVKNKCVNFNFNGLTGTGVLTESNKKFLPFQQFGRDIADTTDAVRDPQTLEILDITPCSFGGVSVITPGTNTSNQVAVLYQDVNCTEVPVAIHADQLTPTWRVYSTGSNVFQTRAGCLIGAEHVNNSYECDIPIGAGICASYQTQTNSPRRARSVASQSIIAYTMSLGAENSVAYSNNSIAIPTNFTISVTTEILPVSMTKTSVDCTMYICGDSTECSNLLLQYGSFCTQLNRALTGIAVEQDKNTQEVFAQVKQIYKTPPIKDFGGFNFSQILPDPSKPSKRSFIEDLLFNKVTLADAGFIKQYGDCLGDIAARDLICAQKFNGLTVLPPLLTDEMIAQYTSALLAGTITSGWTFGAGAALQIPFAMQMAYRFNGIGVTQNVLYENQKLIANQFNSAIGKIQDSLSSTASALGKLQDVVNQNAQALNTLVKQLSSNFGAISSVLNDILSRLDKVEAEVQIDRLITGRLQSLQTYVTQQLIRAAEIRASANLAATKMSECVLGQSKRVDFCGKGYHLMSFPQSAPHGVVFLHVTYVPAQEKNFTTAPAICHDGKAHFPREGVFVSNGTHWFVTQRNFYEPQIITTDNTFVSGNCDVVIGIVNNTVYDPLQPELDSGGGGSDIDPYKEFGSSYQLLNFLPLDFFPDLNALVDTATALYEEELTGREHCSPHHTAIRQALVCWDELTKLIAWMSSNITSEQVRTIIVNHVNDTWGLKVRQSLWFHLSCLTFGQHTVQEFLVSFGVWIRTPAPYRPPNAPILSTLPEHTVIC

SEQ ID NO: 10722 - protein, 1295 aa, Artificial Sequence
  SARS-CoV-2/pangolin/Guangxi/P4L/2017__EPI_ISL_410538 spike protein (1-1141) WhcAg construct
MFVFLFVLPLVSSQCVNLTTRTGIPPGYTNSSTRGVYYPDKVFRSSILHLTQDLFLPFFSNVTWFNTINYQGGFKKFDNPVLPFNDGVYFASTEKSNIIRGWIFGTTLDARTQSLLIVNNATNVVIKVCEFQFCTDPFLGVYYHNNNKTWVENEFRVYSSANNCTFEYISQPFLMDLEGKQGNFKNLREFVFKNVDGYFKIYSKHTPIDLVRDLPRGFAALEPLVDLPIGINITRFQTLLALHRSYLTPGNLESGWTTGAAAYYVGYLQQRTFLLSYNQNGTITDAVDCSLDPLSETKCTLKSLTVEKGIYQTSNFRVQPTISIVRFPNITNLCPFGEVFNASKFASVYAWNRKRISNCVADYSVLYNSTSFSTFKCYGVSPTKLNDLCFTNVYADSFVVKGDEVRQIAPGQTGVIADYNYKLPDDFTGCVIAWNSVKQDALTGGNYGYLYRLFRKSKLKPFERDISTEIYQAGSTPCNGQVGLNCYYPLERYGFHPTTGVNYQPFRVVVLSFELLNGPATVCGPKLSTTLVKDKCVNFNFNGLTGTGVLTTSKKQFLPFQQFGRDISDTTDAVRDPQTLEILDITPCSFGGVSVITPGTNTSNQVAVLYQDVNCTEVPMAIHAEQLTPAWRVYSAGANVFQTRAGCLVGAEHVNNSYECDIPVGAGICASYHSMSSLRSVNQRSIIAYTMSLGAENSVAYSNNSIAIPTNFTISVTTEILPVSMTKTSVDCTMYICGDSIECSNLLLQYGSFCTQLNRALTGIAVEQDKNTQEVFAQVKQIYKTPPIKDFGGFNFSQILPDPSKPSKRSFIEDLLFNKVTLADAGFIKQYGDCLGDIAARDLICAQKFNGLTVLPPLLTDEMIAQYTSALLAGTITSGWTFGAGAALQIPFAMQMAYRFNGIGVTQNVLYENQKLIANQFNSAIGKIQDSLSSTASALGKLQDVVNQNAQALNTLVKQLSSNFGAISSVLNDILSRLDKVEAEVQIDRLITGRLQSLQTYVTQQLIRAAEIRASANLAATKMSECVLGQSKRVDFCGKGYHLMSFPQSAPHGVVFLHVTYVPAQEKNFTTAPAICHEGKAHFPREGVFVSNGTHWFITQRNFYEPQIITTDNTFVSGSCDVVIGIVNNTVYDPLQPELDSGGGGSDIDPYKEFGSSYQLLNFLPLDFFPDLNALVDTATALYEEELTGREHCSPHHTAIRQALVCWDELTKLIAWMSSNITSEQVRTIIVNHVNDTWGLKVRQSLWFHLSCLTFGQHTVQEFLVSFGVWIRTPAPYRPPNAPILSTLPEHTVIC

SEQ ID NO: 10723 - protein, 1295 aa, Artificial Sequence
  SARS-CoV-2/pangolin/Guangxi/P5L/2017__EPI_ISL_410540 spike protein (1-1141) WhcAg construct
MFVFLFVLPLVSSQCVNLTTRTGIPPGYTNSSTRGVYYPDKVFRSSILHLTQDLFLPFFSNVTWFNTINYQGGFKKFDNPVLPFNDGVYFASTEKSNIIRGWIFGTTLDARTQSLLIVNNATNVVIKVCEFQFCTDPFLGVYYHNNNKTWVENEFRVYSSANNCTFEYISQPFLMDLEGKQGNFKNLREFVFKNVDGYFKIYSKHTPIDLVRDLPRGFAALEPLVDLPIGINITRFQTLLALHRSYLTPGKLESGWTTGAAAYYVGYLQQRTFLLSYNQNGTITDAVDCSLDPLSETKCTLKSLTVEKGIYQTSNFRVQPTISIVRFPNITNLCPFGEVFNASKFASVYAWNRKRISNCVADYSVLYNSTSFSTFKCYGVSPTKLNDLCFTNVYADSFVVKGDEVRQIAPGQTGVIADYNYKLPDDFTGCVIAWNSVKQDALTGGNYGYLYRLFRKSKLKPFERDISTEIYQAGSTPCNGQVGLNCYYPLERYGFHPTTGVNYQPFRVVVLSFELLNGPATVCGPKLSTTLVKDKCVNFNFNGLTGTGVLTTSKKQFLPFQQFGRDISDTTDAVRDPQTLEILDITPCSFGGVSVITPGTNTSNQVAVLYQDVNCTEVPMAIHAEQLTPAWRVYSAGANVFQTRAGCLVGAEHVNNSYECDIPVGAGICASYHSMSSFRSVNQRSIIAYTMSLGAENSVAYSNNSIAIPTNFTISVTTEILPVSMTKTSVDCTMYICGDSIECSNLLLQYGSFCTQLNRALTGIAVEQDKNTQEVFAQVKQIYKTPPIKDFGGFNFSQILPDPSKPSKRSFIEDLLFNKVTLADAGFIKQYGDCLGDIAARDLICAQKFNGLTVLPPLLTDEMIAQYTSALLAGTITSGWTFGAGAALQIPFAMQMAYRFNGIGVTQNVLYENQKLIANQFNSAIGKIQDSLSSTASALGKLQDVVNQNAQALNTLVKQLSSNFGAISSVLNDILSRLDKVEAEVQIDRLITGRLQSLQTYVTQQLIRAAEIRASANLAATKMSECVLGQSKRVDFCGKGYHLMSFPQSAPHGVVFLHVTYVPAQEKNFTTAPAICHEGKAHFPREGVFVSNGTHWFITQRNFYEPQIITTDNTFVSGSCDVVIGIVNNTVYDPLQPELDSGGGGSDIDPYKEFGSSYQLLNFLPLDFFPDLNALVDTATALYEEELTGREHCSPHHTAIRQALVCWDELTKLIAWMSSNITSEQVRTIIVNHVNDTWGLKVRQSLWFHLSCLTFGQHTVQEFLVSFGVWIRTPAPYRPPNAPILSTLPEHTVIC

SEQ ID NO: 10724 - protein, 1295 aa, Artificial Sequence
  SARS-CoV-2/pangolin/Guangxi/P5E/2017__EPI_ISL_410541 spike protein (1-1141) WhcAg construct
MFVFLFVLPLVSSQCVNLTTRTGIPPGYTNSSTRGVYYPDKVFRSSILHLTQDLFLPFFSNVTWFNTITYQGGSKKFDNPVLPFNDGVYFASTEKSNIIRGWIFGTTLDARTQSLLIVNNATNVVIKVCEFQFCTDPFLGVYYHNNNKTWVENEFRVYSSANNCTFEYISQPFLMDLEGKQGNFKNLREFVFKNVDGYFKIYSKHTPIDLVRDLPRGFAALEPLVDLPIGINITRFQTLLALHRSYLTPGKLESGWTTGAAAYYVGYLQQRTFLLSYNQNGTITDAVDCSLDPLSETKCTLKSLTVEKGIYQTSNFRVQPTISIVRFPNITNLCPFGEVFNASKFASVYAWNRKRISNCVADYSVLYNSTSFSTFKCYGVSPTKLNDLCFTNVYADSFVVKGDEVRQIAPGQTGVIADYNYKLPDDFTGCVIAWNSVKQDALTGDNYGYLYRLFRKSKLKPFERDISTEIYQAGSTPCNGQVGLNCYYPLERYGFHPTTGVNYQPFRVVVLSFELLNGPATVCGPKLSTTLVKDKCVNFNFNGLTGTGVLTTSKKQFLPFQQFGRDISDTTDAVRDPQTLEILDITPCSFGGVSVITPGTNTSNQVAVLYQDVNCTEVPMAIHAEQLTPAWRVYSAGANVFQTRAGCLVGAEHVNNSYECDIPVGAGICASYHSMSSFRSVNQRSIIAYTMSLGAENSVAYSNNSIAIPTNFTISVTTEILPVSMTKTSVDCTMYICGDSIECSNLLLQYGSFCTQLNRALTGIAVEQDKNTQEVFAQVKQIYKTPPIKDFGGFNFSQILPDPSKPSKRSFIEDLLFNKVTLADAGFIKQYGDCLGDIAARDLICAQKFNGLTVLPPLLTDEMIAQYTSALLAGTITSGWTFGAGAALQIPFAMQMAYRFNGIGVTQNVLYENQKLIANQFNSAIGKIQDSLSSTASALGKLQDVVNQNAQALNTLVKQLSSNFGAISSVLNDILSRLDKVEAEVQIDRLITGRLQSLQTYVTQQLIRAAEIRASANLAATKMSECVLGQSKRVDFCGKGYHLMSFPQSAPHGVVFLHVTYVPAQEKNFTTAPAICHEGKAHFPREGVFVSNGTHWFITQRNFYEPQIITTDNTFVSGSCDVVIGIVNNTVYDPLQPELDSGGGGSDIDPYKEFGSSYQLLNFLPLDFFPDLNALVDTATALYEEELTGREHCSPHHTAIRQALVCWDELTKLIAWMSSNITSEQVRTIIVNHVNDTWGLKVRQSLWFHLSCLTFGQHTVQEFLVSFGVWIRTPAPYRPPNAPILSTLPEHTVIC

SEQ ID NO: 10725 - protein, 1293 aa, Artificial Sequence
  SARS-CoV-2/pangolin/Guangxi/P1E/2017__EPI_ISL_410539 spike protein (1-1139) WhcAg construct
MFVFLFVLPLVSSQCVNLTTRTGIQPGYTNSSTRGVYYPDKVFRSSILHLTQDLFLPFFSNVTWFNTINYQGGFKKFDNPVLPFNDGVYFASTEKSNIIRGWIFGTTLDARTQSLLIVNNATNVVIKVCEFQFCTDPFLGVYYHNNNKTWVENEFRVYSSANNCTFEYISQPFLMDLEGKQGNFKNLREFVFKNVDGYFKIYSKHTPIDLVRDLPRGFAALEPLVDLPIGINITRFQTLLALHRSYLTPGKLESGWTTGAAAYYVGYLQQRTFLLSYNQNGTITDAVDCSLDPLSETKCTLKSLTVEKGIYQTSNFRVQPTISIVRFPNITNLCPFGEVFNASKFASVYAWNRKRISNCVADYSVLYNSTSFSTFKCYGVSPTKLNDLCFTNVYADSFVVKGDEVRQIAPGQTGVIADYNYKLPDDFTGCVIAWNSVKQDALTGGNYLYRLFRKSKLKPFERDISTEIYQAGSTPCNGQVGLNCYYPLERYGFHPTTGVNYQPFRVVVLSFELLNGPATVCGPKLSTTLVKDKCVNFNFNGLTGTGVLTTSKKQFLPFQQFGRDISDTTDAVRDPQTLEILDITPCSFGGVSVITPGTNTSNQVAVLYQDVNCTEVPMAIHAEQLTPAWRVYSAGANVFQTRAGCLVGAEHVNNSYECDIPVGAGICASYHSMSSLRSVNQRSIIAYTMSLGAENSVAYSNNSIAIPTNFTISVTTEILPVSMTKTSVDCTMYICGDSIECSNLLLQYGSFCTQLNRALTGIAVEQDKNTQEVFAQVKQIYKTPPIKDFGGFNFSQILPDPSKPSKRSFIEDLLFNKVTLADAGFIKQYGDCLGDIAARDLICAQKFNGLTVLPPLLTDEMIAQYTSALLAGTITSGWTFGAGAALQIPFAMQMAYRFNGIGVTQNVLYENQKLIANQFNSAIGKIQDSLSSTASALGKLQDVVNQNAQALNTLVKQLSSNFGAISSVLNDILSRLDKVEAEVQIDRLITGRLQSLQTYVTQQLIRAAEIRASANLAATKMSECVLGQSKRVDFCGKGYHLMSFPQSAPHGVVFLHVTYVPAQEKNFTTAPAICHEGKAHFPREGVFVSNGTHWFITQRNFYEPQIITTDNTFVSGSCDVVIGIVNNTVYDPLQPELDSGGGGSDIDPYKEFGSSYQLLNFLPLDFFPDLNALVDTATALYEEELTGREHCSPHHTAIRQALVCWDELTKLIAWMSSNITSEQVRTIIVNHVNDTWGLKVRQSLWFHLSCLTFGQHTVQEFLVSFGVWIRTPAPYRPPNAPILSTLPEHTVIC

SEQ ID NO: 10726 - protein, 1301 aa, Artificial Sequence
  SARS-CoV-2/Wuhan/WIV05/2019__EPI_ISL_402128 spike protein (1-1147)(K986P_V987P) WhcAg construct
MFVFLVLLPLVSSQCVNLTTRTQLPPAYTNSFTRGVYYPDKVFRSSVLHSTQDLFLPFFSNVTWFHAIHVSGTNGTKRFDNPVLPFNDGVYFASTEKSNIIRGWIFGTTLDSKTQSLLIVNNATNVVIKVCEFQFCNDPFLGVYYHKNNKSWMESEFRVYSSANNCTFEYVSQPFLMDLEGKQGNFKNLREFVFKNIDGYFKIYSKHTPINLVRDLPQGFSALEPLVDLPIGINITRFQTLLALHRSYLTPGDSSSGWTAGAAAYYVGYLQPRTFLLKYNENGTITDAVDCALDPLSETKCTLKSFTVEKGIYQTSNFRVQPTESIVRFPNITNLCPFGEVFNATRFASVYAWNRKRISNCVADYSVLYNSASFSTFKCYGVSPTKLNDLCFTNVYADSFVIRGDEVRQIAPGQTGKIADYNYKLPDDFTGCVIAWNSNNLDSKVGGNYNYLYRLFRKSNLKPFERDISTEIYQAGSTPCNGVEGFNCYFPLQSYGFQPTNGVGYQPYRVVVLSFELLHAPATVCGPKKSTNLVKNKCVNFNFNGLTGTGVLTESNKKFLPFQQFGRDIADTTDAVRDPQTLEILDITPCSFGGVSVITPGTNTSNQVAVLYQDVNCTEVPVAIHADQLTPTWRVYSTGSNVFQTRAGCLIGAEHVNNSYECDIPIGAGICASYQTQTNSPRRARSVASQSIIAYTMSLGAENSVAYSNNSIAIPTNFTISVTTEILPVSMTKTSVDCTMYICGDSTECSNLLLQYGSFCTQLNRALTGIAVEQDKNTQEVFAQVKQIYKTPPIKDFGGFNFSQILPDPSKPSKRSFIEDLLFNKVTLADAGFIKQYGDCLGDIAARDLICAQKFNGLTVLPPLLTDEMIAQYTSALLAGTITSGWTFGAGAALQIPFAMQMAYRFNGIGVTQNVLYENQKLIANQFNSAIGKIQDSLSSTASALGKLQDVVNQNAQALNTLVKQLSSNFGAISSVLNDILSRLDPPEAEVQIDRLITGRLQSLQTYVTQQLIRAAEIRASANLAATKMSECVLGQSKRVDFCGKGYHLMSFPQSAPHGVVFLHVTYVPAQEKNFTTAPAICHDGKAHFPREGVFVSNGTHWFVTQRNFYEPQIITTDNTFVSGNCDVVIGIVNNTVYDPLQPELDSGGGGSDIDPYKEFGSSYQLLNFLPLDFFPDLNALVDTATALYEEELTGREHCSPHHTAIRQALVCWDELTKLIAWMSSNITSEQVRTIIVNHVNDTWGLKVRQSLWFHLSCLTFGQHTVQEFLVSFGVWIRTPAPYRPPNAPILSTLPEHTVIC

SEQ ID NO: 10727 - protein, 1297 aa, Artificial Sequence
  SARS-CoV-2/bat/Yunnan/RaTG13/2013__EPI_ISL_402131 spike protein (1-1143)(K982P_V983P) WhcAg construct
MFVFLVLLPLVSSQCVNLTTRTQLPPAYTNSSTRGVYYPDKVFRSSVLHLTQDLFLPFFSNVTWFHAIHVSGTNGIKRFDNPVLPFNDGVYFASTEKSNIIRGWIFGTTLDSKTQSLLIVNNATNVVIKVCEFQFCNDPFLGVYYHKNNKSWMESEFRVYSSANNCTFEYVSQPFLMDLEGKQGNFKNLREFVFKNIDGYFKIYSKHTPINLVRDLPPGFSALEPLVDLPIGINITRFQTLLALHRSYLTPGDSSSGWTAGAAAYYVGYLQPRTFLLKYNENGTITDAVDCALDPLSETKCTLKSFTVEKGIYQTSNFRVQPTDSIVRFPNITNLCPFGEVFNATTFASVYAWNRKRISNCVADYSVLYNSTSFSTFKCYGVSPTKLNDLCFTNVYADSFVITGDEVRQIAPGQTGKIADYNYKLPDDFTGCVIAWNSKHIDAKEGGNFNYLYRLFRKANLKPFERDISTEIYQAGSKPCNGQTGLNCYYPLYRYGFYPTDGVGHQPYRVVVLSFELLNAPATVCGPKKSTNLVKNKCVNFNFNGLTGTGVLTESNKKFLPFQQFGRDIADTTDAVRDPQTLEILDITPCSFGGVSVITPGTNASNQVAVLYQDVNCTEVPVAIHADQLTPTWRVYSTGSNVFQTRAGCLIGAEHVNNSYECDIPIGAGICASYQTQTNSRSVASQSIIAYTMSLGAENSVAYSNNSIAIPTNFTISVTTEILPVSMTKTSVDCTMYICGDSTECSNLLLQYGSFCTQLNRALTGIAVEQDKNTQEVFAQVKQIYKTPPIKDFGGFNFSQILPDPSKPSKRSFIEDLLFNKVTLADAGFIKQYGDCLGDIAARDLICAQKFNGLTVLPPLLTDEMIAQYTSALLAGTITSGWTFGAGAALQIPFAMQMAYRFNGIGVTQNVLYENQKLIANQFNSAIGKIQDSLSSTASALGKLQDVVNQNAQALNTLVKQLSSNFGAISSVLNDILSRLDPPEAEVQIDRLITGRLQSLQTYVTQQLIRAAEIRASANLAATKMSECVLGQSKRVDFCGKGYHLMSFPQSAPHGVVFLHVTYVPAQEKNFTTAPAICHDGKAHFPREGVFVSNGTHWFVTQRNFYEPQIITTDNTFVSGSCDVVIGIVNNTVYDPLQPELDSGGGGSDIDPYKEFGSSYQLLNFLPLDFFPDLNALVDTATALYEEELTGREHCSPHHTAIRQALVCWDELTKLIAWMSSNITSEQVRTIIVNHVNDTWGLKVRQSLWFHLSCLTFGQHTVQEFLVSFGVWIRTPAPYRPPNAPILSTLPEHTVIC

SEQ ID NO: 10728 - protein, 1301 aa, Artificial Sequence
  SARS-CoV-2/Wuhan/HBCDC-HB-01/2019__EPI_ISL_402132 spike protein (1-1147)(K986P_V987P) WhcAg construct
MFVFLVLLPLVSSQCVNLTTRTQLPPAYTNSITRGVYYPDKVFRSSVLHSTQDLFLPFFSNVTWFHAIHVSGTNGTKRFDNPVLPFNDGVYFASTEKSNIIRGWIFGTTLDSKTQSLLIVNNATNVVIKVCEFQFCNDPFLGVYYHKNNKSWMESEFRVYSSANNCTFEYVSQPFLMDLEGKQGNFKNLREFVFKNIDGYFKIYSKHTPINLVRDLPQGFSALEPLVDLPIGINITRFQTLLALHRSYLTPGDSSSGWTAGAAAYYVGYLQPRTFLLKYNENGTITDAVDCALDPLSETKCTLKSFTVEKGIYQTSNFRVQPTESIVRFPNITNLCPFGEVFNATRFASVYAWNRKRISNCVADYSVLYNSASFSTFKCYGVSPTKLNDLCFTNVYADSFVIRGDEVRQIAPGQTGKIADYNYKLPDDFTGCVIAWNSNNLDSKVGGNYNYLYRLFRKSNLKPFERDISTEIYQAGSTPCNGVEGFNCYFPLQSYGFQPTNGVGYQPYRVVVLSFELLHAPATVCGPKKSTNLVKNKCVNFNFNGLTGTGVLTESNKKFLPFQQFGRDIADTTDAVRDPQTLEILDITPCSFGGVSVITPGTNTSNQVAVLYQDVNCTEVPVAIHADQLTPTWRVYSTGSNVFQTRAGCLIGAEHVNNSYECDIPIGAGICASYQTQTNSPRRARSVASQSIIAYTMSLGAENSVAYSNNSIAIPTNFTISVTTEILPVSMTKTSVDCTMYICGDSTECSNLLLQYGSFCTQLNRALTGIAVEQDKNTQEVFAQVKQIYKTPPIKDFGGFNFSQILPDPSKPSKRSFIEDLLFNKVTLADAGFIKQYGDCLGDIAARDLICAQKFNGLTVLPPLLTDEMIAQYTSALLAGTITSGWTFGAGAALQIPFAMQMAYRFNGIGVTQNVLYENQKLIANQFNSAIGKIQDSLSSTASALGKLQDVVNQNAQALNTLVKQLSSNFGAISSVLNDILSRLDPPEAEVQIDRLITGRLQSLQTYVTQQLIRAAEIRASANLAATKMSECVLGQSKRVDFCGKGYHLMSFPQSAPHGVVFLHVTYVPAQEKNFTTAPAICHDGKAHFPREGVFVSNGTHWFVTQRNFYEPQIITTDNTFVSGNCDVVIGIVNNTVYDPLQPELDSGGGGSDIDPYKEFGSSYQLLNFLPLDFFPDLNALVDTATALYEEELTGREHCSPHHTAIRQALVCWDELTKLIAWMSSNITSEQVRTIIVNHVNDTWGLKVRQSLWFHLSCLTFGQHTVQEFLVSFGVWIRTPAPYRPPNAPILSTLPEHTVIC

SEQ ID NO: 10729 - protein, 1301 aa, Artificial Sequence
  SARS-CoV-2/Guangdong/20SF028/2020__EPI_ISL_403936 spike protein (1-1147)(K986P_V987P) WhcAg construct
MFVFLVLLPLVSSQCVNLTTRTQLPPAYTNSFTRGVYYPDKVFRSSVLYSTQDLFLPFFSNVTWFHAIHVSGTNGTKRFDNPVLPFNDGVYFASTEKSNIIRGWIFGTTLDSKTQSLLIVNNATNVVIKVCEFQFCNDPFLGVYYHKNNKSWMESEFRVYSSANNCTFEYVSQPFLMDLEGKQGNFKNLREFVFKNIDGYFKIYSKHTPINLVRDLPQGFSALEPLVDLPIGINITRFQTLLALHRSYLTPGDSSSGWTAGAAAYYVGYLQPRTFLLKYNENGTITDAVDCALDPLSETKCTLKSFTVEKGIYQTSNFRVQPTESIVRFPNITNLCPFGEVFNATRFASVYAWNRKRISNCVADYSVLYNSASFSTFKCYGVSPTKLNDLCFTNVYADSFVIRGDEVRQIAPGQTGKIADYNYKLPDDFTGCVIAWNSNNLDSKVGGNYNYLYRLFRKSNLKPFERDISTEIYQAGSTPCNGVEGFNCYFPLQSYGFQPTNGVGYQPYRVVVLSFELLHAPATVCGPKKSTNLVKNKCVNFNFNGLTGTGVLTESNKKFLPFQQFGRDIADTTDAVRDPQTLEILDITPCSFGGVSVITPGTNTSNQVAVLYQDVNCTEVPVAIHADQLTPTWRVYSTGSNVFQTRAGCLIGAEHVNNSYECDIPIGAGICASYQTQTNSPRRARSVASQSIIAYTMSLGAENSVAYSNNSIAIPTNFTISVTTEILPVSMTKTSVDCTMYICGDSTECSNLLLQYGSFCTQLNRALTGIAVEQDKNTQEVFAQVKQIYKTPPIKDFGGFNFSQILPDPSKPSKRSFIEDLLFNKVTLADAGFIKQYGDCLGDIAARDLICAQKFNGLTVLPPLLTDEMIAQYTSALLAGTITSGWTFGAGAALQIPFAMQMAYRFNGIGVTQNVLYENQKLIANQFNSAIGKIQDSLSSTASALGKLQDVVNQNAQALNTLVKQLSSNFGAISSVLNDILSRLDPPEAEVQIDRLITGRLQSLQTYVTQQLIRAAEIRASANLAATKMSECVLGQSKRVDFCGKGYHLMSFPQSAPHGVVFLHVTYVPAQEKNFTTAPAICHDGKAHFPREGVFVSNGTHWFVTQRNFYEPQIITTDNTFVSGNCDVVIGIVNNTVYDPLQPELDSGGGGSDIDPYKEFGSSYQLLNFLPLDFFPDLNALVDTATALYEEELTGREHCSPHHTAIRQALVCWDELTKLIAWMSSNITSEQVRTIIVNHVNDTWGLKVRQSLWFHLSCLTFGQHTVQEFLVSFGVWIRTPAPYRPPNAPILSTLPEHTVIC

SEQ ID NO: 10730 - protein, 1301 aa, Artificial Sequence
  SARS-CoV-2/Shenzhen/SZTH-001/2020__EPI_ISL_406592 spike protein (1-1147)(K986P_V987P) WhcAg construct
MFVFLVLLPLVSSQCVNLTTRTQLPPAYTNSFTRGVYYPDKVFRSSVLHSTQDLFLPFFSNVTWFHAIHVSGTNGTKRFDNPVLPFNDGVYFASTEKSNIIRGWIFGTTLDSKTQSLLIVNNATNVVIKVCEFQFCNDPFLGVYYHKNNKSWMESEFRVYSSANNCTFEYVSQPFLMDLEGKQGNFKNLREFVFKNIDGYFKIYSKHTPINLVRDLPQGFSALEPLVDLPIGINITRFQTLLALHRSYLTPGDSSSGWTAGAAAYYVGYLQPRTFLLKYNENGTITDAVDCALDPLSETKCTLKSFTVEKGIYQTSNFRVQPTESIVRFPNITNLCPFGEVFNATRFASVYAWNRKRISNCVADYSVLYNSASFSTFKCYGVSPTKLNDLCFTNVYADSFVIRGDEVRQIAPGQTGKIADYNYKLPDDFTGCVIAWNSNNLDSKVGGNYNYLYRLFRKSNLKPFERDISTEIYQAGSTPCNGVEGFNCYFPLQSYGFQPTNGVGYQPYRVVVLSFELLHAPATVCGPKKSTNLVKNKCVNFNFNGLTGTGVLTESNKKFLPFQQFGRDIADTTDAVRDPQTLEILDITPCSFGGVSVITPGTNTSNQVAVLYQDVNCTEVPVAIHADQLTPTWRVYSTGSNVFQTRAGCLIGAEHVNNSYECDIPIGAGICASYQTQTNSPRRARSVASQSIIAYTMSLGAENSVAYSNNSIAIPTNFTISVTTEILPVSMTKTSVDCTMYICGDSTECSNLLLQYGSFCTQLNRALTGIAVEQDKNTQEVFAQVKQIYKTPPIKDFGGFNFSQILPDPSKPSKRSFIEDLLFNKVTLADAGFIKQYGDCLGDIAARDLICAQKFNGLTVLPPLLTDEMIAQYTSALLAGTITSGWTFGAGAALQIPFAMQMAYRFNGIGVTQNVLYENQKLIANQFNSAIGKIQDSLSSTASALGKLQDVVNQNAQALNTLVKQLSSNFGAISSVLNDILSRLDPPEAEVQIDRLITGRLQSLQTYVTQQLIRAAEIRASANLAATKMSECVLGQSKRVDFCGKGYHLMSFPQSAPHGVVFLHVTYVPAQEKNFTTAPAICHDGKAHFPREGVFVSNGTHWFVTQRNFYEPQIITTDNTFVSGNCDVLIGIVNNTVYDPLQPELDSGGGGSDIDPYKEFGSSYQLLNFLPLDFFPDLNALVDTATALYEEELTGREHCSPHHTAIRQALVCWDELTKLIAWMSSNITSEQVRTIIVNHVNDTWGLKVRQSLWFHLSCLTFGQHTVQEFLVSFGVWIRTPAPYRPPNAPILSTLPEHTVIC

SEQ ID NO: 10731 - protein, 1301 aa, Artificial Sequence
  SARS-CoV-2/Shenzhen/SZTH-004/2020__EPI_ISL_406595 spike protein (1-1147)(K986P_V987P) WhcAg construct
MFVFLVLLPLVSSQCVNLTTRTQLPPAYTNSFTRGVYYPDKVFRSSVLHSTQDLFLPFFSNVTWFHAIHVSGTNGTKRFDNPVLPFNDGVYFASTEKSNIIRGWIFGTTLDSKTQSLLIVNNATNVVIKVCEFQFCNDPFLGVYYHKNNKSWMESEFRVYSSANNCTFEYVSQPFLMDLEGKQGNFKNLREFVFKNIDGYFKIYSKHTPINLVRDLPQGFSALEPLVDLPIGINITRFQTLLALHRSYLTPGDSSSGWTAGAAAYYVGYLQPRTFLLKYNENGTITDAVDCALDPLSETKCTLKSFTVEKGIYQTSNFRVQPTESIVRFPNITNLCPFGEVFNATRFASVYAWDRKRISNCVAYYSVLYNSASFSTFKCYGVSPTKLNDLCFTNVYADSFVIRGDEVRQIAPGQTGKIADYNYKLPDDFTGCVIAWNSNNLDSKVGGNYNYLYRLFRKSNLKPFERDISTEIYQAGSTPCNGVEGFNCYFPLQSYGFQPTNGVGYQPYRVVVLSFELLHAPATVCGPKKSTNLVKNKCVNFNFNGLTGTGVLTESNKKFLPFQQFGRDIADTTDAVRDPQTLEILDITPCSFGGVSVITPGTNTSNQVAVLYQDVNCTEVPVAIHADQLTPTWRVYSTGSNVFQTRAGCLIGAEHVNNSYECDIPIGAGICASYQTQTNSPRRARSVASQSIIAYTMSLGAENSVAYSNNSIAIPTNFTISVTTEILPVSMTKTSVDCTMYICGDSTECSNLLLQYGSFCTQLNRALTGIAVEQDKNTQEVFAQVKQIYKTPPIKDFGGFNFSQILPDPSKPSKRSFIEDLLFNKVTLADAGFIKQYGDCLGDIAARDLICAQKFNGLTVLPPLLTDEMIAQYTSALLAGTITSGWTFGAGAALQIPFAMQMAYRFNGIGVTQNVLYENQKLIANQFNSAIGKIQDSLSSTASALGKLQDVVNQNAQALNTLVKQLSSNFGAISSVLNDILSRLDPPEAEVQIDRLITGRLQSLQTYVTQQLIRAAEIRASANLAATKMSECVLGQSKRVDFCGKGYHLMSFPQSAPHGVVFLHVTYVPAQEKNFTTAPAICHDGKAHFPREGVFVSNGTHWFVTQRNFYEPQIITTDNTFVSGNCDVVIGIVNNTVYDPLQPELDSGGGGSDIDPYKEFGSSYQLLNFLPLDFFPDLNALVDTATALYEEELTGREHCSPHHTAIRQALVCWDELTKLIAWMSSNITSEQVRTIIVNHVNDTWGLKVRQSLWFHLSCLTFGQHTVQEFLVSFGVWIRTPAPYRPPNAPILSTLPEHTVIC

SEQ ID NO: 10732 - protein, 1301 aa, Artificial Sequence
  SARS-CoV-2/France/IDF0372/2020__EPI_ISL_406596 spike protein (1-1147)(K986P_V987P) WhcAg construct
MFVFLVLLPLVSSQCVNLTTRTQLPPAYTNSFTRGVYYPDKVFRSSVLHSTQDLFLPFFSNVTWFHAIHVSGTNGTKRFDNPVLPFNDGVYFASTEKSNIIRGWIFGTTLDSKTQSLLIVNNATNVVIKVCEFQFCNDPFLGVYYHKNNKSWMESEFRVYSSANNCTFEYVSQPFLMDLEGKQGNFKNLREFVFKNIDGYFKIYSKHTPINLVRDLPQGFSALEPLVDLPIGINITRFQTLLALHRSYLTPGDSSSGWTAGAAAYYVGYLQPRTFLLKYNENGTITDAVDCALDPLSETKCTLKSFTVEKGIYQTSNFRVQPTESIVRFPNITNLCPFGEVFNATRFASVYAWNRKRISNCVADYSFLYNSASFSTFKCYGVSPTKLNDLCFTNVYADSFVIRGDEVRQIAPGQTGKIADYNYKLPDDFTGCVIAWNSNNLDSKVGGNYNYLYRLFRKSNLKPFERDISTEIYQAGSTPCNGVEGFNCYFPLQSYGFQPTNGVGYQPYRVVVLSFELLHAPATVCGPKKSTNLVKNKCVNFNFNGLTGTGVLTESNKKFLPFQQFGRDIADTTDAVRDPQTLEILDITPCSFGGVSVITPGTNTSNQVAVLYQDVNCTEVPVAIHADQLTPTWRVYSTGSNVFQTRAGCLIGAEHVNNSYECDIPIGAGICASYQTQTNSPRRARSVASQSIIAYTMSLGAENSVAYSNNSIAIPTNFTISVTTEILPVSMTKTSVDCTMYICGDSTECSNLLLQYGSFCTQLNRALTGIAVEQDKNTQEVFAQVKQIYKTPPIKDFGGFNFSQILPDPSKPSKRSFIEDLLFNKVTLADAGFIKQYGDCLGDIAARDLICAQKFNGLTVLPPLLTDEMIAQYTSALLAGTITSGWTFGAGAALQIPFAMQMAYRFNGIGVTQNVLYENQKLIANQFNSAIGKIQDSLSSTASALGKLQDVVNQNAQALNTLVKQLSSNFGAISSVLNDILSRLDPPEAEVQIDRLITGRLQSLQTYVTQQLIRAAEIRASANLAATKMSECVLGQSKRVDFCGKGYHLMSFPQSAPHGVVFLHVTYVPAQEKNFTTAPAICHDGKAHFPREGVFVSNGTHWFVTQRNFYEPQIITTDNTFVSGNCDVVIGIVNNTVYDPLQPELDSGGGGSDIDPYKEFGSSYQLLNFLPLDFFPDLNALVDTATALYEEELTGREHCSPHHTAIRQALVCWDELTKLIAWMSSNITSEQVRTIIVNHVNDTWGLKVRQSLWFHLSCLTFGQHTVQEFLVSFGVWIRTPAPYRPPNAPILSTLPEHTVIC

SEQ ID NO: 10733 - protein, 1301 aa, Artificial Sequence
  SARS-CoV-2/Australia/VIC01/2020__EPI_ISL_406844 spike protein (1-1147)(K986P_V987P) WhcAg construct
MFVFLVLLPLVSSQCVNLTTRTQLPPAYTNSFTRGVYYPDKVFRSSVLHSTQDLFLPFFSNVTWFHAIHVSGTNGTKRFDNPVLPFNDGVYFASTEKSNIIRGWIFGTTLDSKTQSLLIVNNATNVVIKVCEFQFCNDPFLGVYYHKNNKSWMESEFRVYSSANNCTFEYVSQPFLMDLEGKQGNFKNLREFVFKNIDGYFKIYSKHTPINLVRDLPQGFSALEPLVDLPIGINITRFQTLLALHRRYLTPGDSSSGWTAGAAAYYVGYLQPRTFLLKYNENGTITDAVDCALDPLSETKCTLKSFTVEKGIYQTSNFRVQPTESIVRFPNITNLCPFGEVFNATRFASVYAWNRKRISNCVADYSVLYNSASFSTFKCYGVSPTKLNDLCFTNVYADSFVIRGDEVRQIAPGQTGKIADYNYKLPDDFTGCVIAWNSNNLDSKVGGNYNYLYRLFRKSNLKPFERDISTEIYQAGSTPCNGVEGFNCYFPLQSYGFQPTNGVGYQPYRVVVLSFELLHAPATVCGPKKSTNLVKNKCVNFNFNGLTGTGVLTESNKKFLPFQQFGRDIADTTDAVRDPQTLEILDITPCSFGGVSVITPGTNTSNQVAVLYQDVNCTEVPVAIHADQLTPTWRVYSTGSNVFQTRAGCLIGAEHVNNSYECDIPIGAGICASYQTQTNSPRRARSVASQSIIAYTMSLGAENSVAYSNNSIAIPTNFTISVTTEILPVSMTKTSVDCTMYICGDSTECSNLLLQYGSFCTQLNRALTGIAVEQDKNTQEVFAQVKQIYKTPPIKDFGGFNFSQILPDPSKPSKRSFIEDLLFNKVTLADAGFIKQYGDCLGDIAARDLICAQKFNGLTVLPPLLTDEMIAQYTSALLAGTITSGWTFGAGAALQIPFAMQMAYRFNGIGVTQNVLYENQKLIANQFNSAIGKIQDSLSSTASALGKLQDVVNQNAQALNTLVKQLSSNFGAISSVLNDILSRLDPPEAEVQIDRLITGRLQSLQTYVTQQLIRAAEIRASANLAATKMSECVLGQSKRVDFCGKGYHLMSFPQSAPHGVVFLHVTYVPAQEKNFTTAPAICHDGKAHFPREGVFVSNGTHWFVTQRNFYEPQIITTDNTFVSGNCDVVIGIVNNTVYDPLQPELDSGGGGSDIDPYKEFGSSYQLLNFLPLDFFPDLNALVDTATALYEEELTGREHCSPHHTAIRQALVCWDELTKLIAWMSSNITSEQVRTIIVNHVNDTWGLKVRQSLWFHLSCLTFGQHTVQEFLVSFGVWIRTPAPYRPPNAPILSTLPEHTVIC

SEQ ID NO: 10734 - protein, 1301 aa, Artificial Sequence
  SARS-CoV-2/Germany/BavPat1/2020__EPI_ISL_406862 spike protein (1-1147)(K986P_V987P) WhcAg construct
MFVFLVLLPLVSSQCVNLTTRTQLPPAYTNSFTRGVYYPDKVFRSSVLHSTQDLFLPFFSNVTWFHAIHVSGTNGTKRFDNPVLPFNDGVYFASTEKSNIIRGWIFGTTLDSKTQSLLIVNNATNVVIKVCEFQFCNDPFLGVYYHKNNKSWMESEFRVYSSANNCTFEYVSQPFLMDLEGKQGNFKNLREFVFKNIDGYFKIYSKHTPINLVRDLPQGFSALEPLVDLPIGINITRFQTLLALHRSYLTPGDSSSGWTAGAAAYYVGYLQPRTFLLKYNENGTITDAVDCALDPLSETKCTLKSFTVEKGIYQTSNFRVQPTESIVRFPNITNLCPFGEVFNATRFASVYAWNRKRISNCVADYSVLYNSASFSTFKCYGVSPTKLNDLCFTNVYADSFVIRGDEVRQIAPGQTGKIADYNYKLPDDFTGCVIAWNSNNLDSKVGGNYNYLYRLFRKSNLKPFERDISTEIYQAGSTPCNGVEGFNCYFPLQSYGFQPTNGVGYQPYRVVVLSFELLHAPATVCGPKKSTNLVKNKCVNFNFNGLTGTGVLTESNKKFLPFQQFGRDIADTTDAVRDPQTLEILDITPCSFGGVSVITPGTNTSNQVAVLYQGVNCTEVPVAIHADQLTPTWRVYSTGSNVFQTRAGCLIGAEHVNNSYECDIPIGAGICASYQTQTNSPRRARSVASQSIIAYTMSLGAENSVAYSNNSIAIPTNFTISVTTEILPVSMTKTSVDCTMYICGDSTECSNLLLQYGSFCTQLNRALTGIAVEQDKNTQEVFAQVKQIYKTPPIKDFGGFNFSQILPDPSKPSKRSFIEDLLFNKVTLADAGFIKQYGDCLGDIAARDLICAQKFNGLTVLPPLLTDEMIAQYTSALLAGTITSGWTFGAGAALQIPFAMQMAYRFNGIGVTQNVLYENQKLIANQFNSAIGKIQDSLSSTASALGKLQDVVNQNAQALNTLVKQLSSNFGAISSVLNDILSRLDPPEAEVQIDRLITGRLQSLQTYVTQQLIRAAEIRASANLAATKMSECVLGQSKRVDFCGKGYHLMSFPQSAPHGVVFLHVTYVPAQEKNFTTAPAICHDGKAHFPREGVFVSNGTHWFVTQRNFYEPQIITTDNTFVSGNCDVVIGIVNNTVYDPLQPELDSGGGGSDIDPYKEFGSSYQLLNFLPLDFFPDLNALVDTATALYEEELTGREHCSPHHTAIRQALVCWDELTKLIAWMSSNITSEQVRTIIVNHVNDTWGLKVRQSLWFHLSCLTFGQHTVQEFLVSFGVWIRTPAPYRPPNAPILSTLPEHTVIC

SEQ ID NO: 10735 - protein, 1301 aa, Artificial Sequence
  SARS-CoV-2/Wuhan/HBCDC-HB-02/2020__EPI_ISL_412978 spike protein (1-1147)(K986P_V987P) WhcAg construct
MFVFLVLLPLVSSQCVNLTTRTQLPPAYTNSFTRGVYYPDKVFRSSVLHSTQDLFLPFFSNVTWFHAIHVSGTNGTKRFDNPVLPFNDGVYFASTEKSNIIRGWIFGTTLDSKTQSLLIVNNATNVVIKVCEFQFCNDPFLGVYYHKNNKSWMESEFRVYSSANNCTFEYVSQPFLMDLEGKQGNFKNLREFVFKNIDGYFKIYSKHTPINLVRDLPQGFSALEPLVDLPIGINITRFQTLLALHRSYLTPGDSSSGWTAGAAAYYVGYLQPRTFLLKYNENGTITDAVDCALDPLSETKCTLKSFTVEKGIYQTSNFRVQPTESIVRFPNITNLCPFGEVFNATRFASVYAWNRKRISNCVADYSVLYNSASFSTFKCYGVSPTKLNDLCFTNVYADSFVIRGDEVRQIAPGQTGKIADYNYKLPDDFTGCVIAWNSNNLDSKVGGNYNYLYRLFRKSNLKPFERDISTEIYQAGSTPCNGVEGFNCYFPLQSYGFQPTNGVGYQPYRVVVLSFELLHAPATVCGPKKSTNLVKNKCVNFNFNGLTGTGVLTESNKKFLPFQQFGRDIADTTDAVRDPQTLEILDITPCSFGGVSVITPGTNTSNQVAVLYQDVNCTEVPVAIHADQLTPTWRVYSTGSNVFQTRAGCLIGAEHVNNSYECDIPIGAGICASYQTQTNSPRRARSVASQSIIAYTMSLGAENSVAYSNNSIAIPTNFTISVTTEILPVSMTKTSVDCTMYICGDSTECSNFLLQYGSFCTQLNRALTGIAVEQDKNTQEVFAQVKQIYKTPPIKDFGGFNFSQILPDPSKPSKRSFIEDLLFNKVTLADAGFIKQYGDCLGDIAARDLICAQKFNGLTVLPPLLTDEMIAQYTSALLAGTITSGWTFGAGAALQIPFAMQMAYRFNGIGVTQNVLYENQKLIANQFNSAIGKIQDSLSSTASALGKLQDVVNQNAQALNTLVKQLSSNFGAISSVLNDILSRLDPPEAEVQIDRLITGRLQSLQTYVTQQLIRAAEIRASANLAATKMSECVLGQSKRVDFCGKGYHLMSFPQSAPHGVVFLHVTYVPAQEKNFTTAPAICHDGKAHFPREGVFVSNGTHWFVTQRNFYEPQIITTDNTFVSGNCDVVIGIVNNTVYDPLQPELDSGGGGSDIDPYKEFGSSYQLLNFLPLDFFPDLNALVDTATALYEEELTGREHCSPHHTAIRQALVCWDELTKLIAWMSSNITSEQVRTIIVNHVNDTWGLKVRQSLWFHLSCLTFGQHTVQEFLVSFGVWIRTPAPYRPPNAPILSTLPEHTVIC

SEQ ID NO: 10736 - protein, 1301 aa, Artificial Sequence
  SARS-CoV-2/Australia/QLD02/2020__EPI_ISL_407896 spike protein (1-1147)(K986P_V987P) WhcAg construct
MFVFLVLLPLVSSQCVNLTTRTQLPPAYTNSFTRGVYYPDKVFRSSVLHSTQDLFLPFFSNVTWFHAIHVSGTNGTKRFDNPVLPFNDGVYFASTEKSNIIRGWIFGTTLDSKTQSLLIVNNATNVVIKVCEFQFCNDPFLGVYYHKNNKSWMESEFRVYSSANNCTFEYVSQPFLMDLEGKQGNFKNLREFVFKNIDGYFKIYSKHTPINLVRDLPQGFSALEPLVDLPIGINITRFQTLLALHRSYLTPGDSSSGWTAGAAAYYVGYLQPRTFLLKYNENGTITDAVDCALDPLSETKCTLKSFTVEKGIYQTSNFRVQPTESIVRFPNITNLCPFGEVFNATRFASVYAWNRKRISNCVADYSVLYNSASFSTFKCYGVSPTKLNDLCFTNVYADSFVIRGDEVRQIAPGQTGKIADYNYKLPDDFTGCVIAWNSNNLDSKVGGNYNYLYRLFRKSNLKPFERDISTEIYQAGSTPCNGVEGFNCYFPLQSYGFQPTNGVGYQPYRVVVLSFELLHAPATVCGPKKSTNLVKNKCVNFNFNGLTGTGVLTESNKKFLPFQQFGRDIADTTDAVRDPQTLEILDITPCSFGGVSVITPGTNTSNQVAVLYQDVNCTEVPVAIHADQLTPTWRVYSTGSNVFQTRAGCLIGAEHVNNSYECDIPIGAGICASYQTQTNSPRRARSVASQSIIAYTMSLGAENSVAYSNNSIAIPTNFTISVTTEILPVSMTKTSVDCTMYICGDSTECSNLLLQYGSFCTQLNRALTGIAVEQDKNTQEVFAQVKQIYKTPPIKDFGGFNFSQILPDPSKPSKRSFIEDLLFNKVTLADAGFIKQYGDCLGDIAARDLICAQKFNGLTVLPPLLTDEMIAQYTSALLAGTITSGWTFGAGAALQIPFAMQMAYRFNGIGVTQNVLYENQKLIANQFNSAIGKIQDSLSSTASALGKLQDVVNQNAQALNTLVKQLSSNFGAISSVLNDILSRLDPPEAEVQIDRLITGRLQSLQTYVTQQLIRAAEIRASANLAATKMSECVLGQSKRVDFCGKGYHLMSFPQSAPHGVVFLHVTYVPAQEKNFTTAPAICHDGKAHFPREGVFVSNGTHWFVTQRNFYEPQIITTDNTFVSGNCDVVIGIVNNTVYDPLQLELDSGGGGSDIDPYKEFGSSYQLLNFLPLDFFPDLNALVDTATALYEEELTGREHCSPHHTAIRQALVCWDELTKLIAWMSSNITSEQVRTIIVNHVNDTWGLKVRQSLWFHLSCLTFGQHTVQEFLVSFGVWIRTPAPYRPPNAPILSTLPEHTVIC

SEQ ID NO: 10737 - protein, 1301 aa, Artificial Sequence
  SARS-CoV-2/India/1-31/2020__EPI_ISL_413523 spike protein (1-1147)(K986P_V987P) WhcAg construct
MFVFLVLLPLVSSQCVNLTTRTQLPPAYTNSFTRGVYYPDKVFRSSVLHSTQDLFLPFFSNVTWFHAIHVSGTNGTKRFDNPVLPFNDGVYFASTEKSNIIRGWIFGTTLDSKTQSLLIVNNATNVVIKVCEFQFCNDPFLGVYYHKNNKSWMESEFRVYSSANNCTFEYVSQPFLMDLEGKQGNFKNLREFVFKNIDGYFKIYSKHTPINLVRDLPQGFSALEPLVDLPIGINITRFQTLLALHRSYLTPGDSSSGWTAGAAAYYVGYLQPRTFLLKYNENGTITDAVDCALDPLSETKCTLKSFTVEKGIYQTSNFRVQPTESIVRFPNITNLCPFGEVFNATRFASVYAWNRKRISNCVADYSVLYNSASFSTFKCYGVSPTKLNDLCFTNVYADSFVIRGDEVRQIAPGQTGKIADYNYKLPDDFTGCVIAWNSNNLDSKVGGNYNYLYRLFRKSNLKPFERDISTEIYQAGSTPCNGVEGFNCYFPLQSYGFQPTNGVGYQPYRVVVLSFELLHAPATVCGPKKSTNLVKNKCVNFNFNGLTGTGVLTESNKKFLPFQQFGRDIADTTDAVRDPQTLEILDITPCSFGGVSVITPGTNTSNQVAVLYQDVNCTEVPVAIHADQLTPTWRVYSTGSNVFQTRAGCLIGAEHVNNSYECDIPIGAGICASYQTQTNSPRRARSVASQSIIAYTMSLGAENSVAYSNNSIAIPTNFTISVTTEILPVSMTKTSVDCTMYICGDSTECSNLLLQYGSFCTQLNRALTGIAVEQDKNTQEVFAQVKQIYKTPPIKDFGGFNFSQILPDPSKPSKRSFIEDLLFNKVTLADAGFIKQYGDCLGDIAARDLICAQKFNGLTVLPPLLTDEMIAQYTSALLAGTITSGWTFGAGAALQIPFAMQMAYRFNGIGVTQNVLYENQKLIANQFNSVIGKIQDSLSSTASALGKLQDVVNQNAQALNTLVKQLSSNFGAISSVLNDILSRLDPPEAEVQIDRLITGRLQSLQTYVTQQLIRAAEIRASANLAATKMSECVLGQSKRVDFCGKGYHLMSFPQSAPHGVVFLHVTYVPAQEKNFTTAPAICHDGKAHFPREGVFVSNGTHWFVTQRNFYEPQIITTDNTFVSGNCDVVIGIVNNTVYDPLQPELDSGGGGSDIDPYKEFGSSYQLLNFLPLDFFPDLNALVDTATALYEEELTGREHCSPHHTAIRQALVCWDELTKLIAWMSSNITSEQVRTIIVNHVNDTWGLKVRQSLWFHLSCLTFGQHTVQEFLVSFGVWIRTPAPYRPPNAPILSTLPEHTVIC

SEQ ID NO: 10738 - protein, 1301 aa, Artificial Sequence
  SARS-CoV-2/Guangdong/GD2020087-P0008/2020__EPI_ISL_413863 spike protein (1-1147)(K986P_V987P) WhcAg construct
MFVFLVLLPLVSSQCVNLTTRTQLPPAYTNSFTRGVYYPDKVFRSSVLHSTQDLFLPFFSNVTWFHAIHVSGTNGTKRFDNPVLPFNDGVYFASTEKSNIIRGWIFGTTLDSKTQSLLIVNNATNVVIKVCEFQFCNDPFLGVYYHKNNKSWMESEFRVYSSANNCTFEYVSQPFLMDLEGKQGNFKNLREFVFKNIDGYFKIYSKHTPINLVRDLPQGFSALEPLVDLPIGINITRFQTLLALHRSYLTPGDSSSGWTAGAAAYYVGYLQPRTFLLKYNENGTITDAVDCALDPLSETKCTLKSFTVEKGIYQTSNFRVQPTESIVRFPNITNLCPFGEVFNATRFASVYAWNRKRISNCVADYSVLYNSASFSTFKCYGVSPTKLNDLCFTNVYADSFVIRGDEVREIAPGQTGKIADYNYKLPDDFTGCVIAWNSNNLDSKVGGNYNYLYRLFRKSNLKPFERDISTEIYQAGSTPCNGVEGFNCYFPLQSYGFQPTNGVGYQPYRVVVLSFELLHAPATVCGPKKSTNLVKNKCVNFNFNGLTGTGVLTESNKKFLPFQQFGRDIADTTDAVRDPQTLEILDITPCSFGGVSVITPGTNTSNQVAVLYQDVNCTEVPVAIHADQLTPTWRVYSTGSNVFQTRAGCLIGAEHVNNSYECDIPIGAGICASYQTQTNSPRRARSVASQSIIAYTMSLGAENSVAYSNNSIAIPTNFTISVTTEILPVSMTKTSVDCTMYICGDSTECSNLLLQYGSFCTQLNRALTGIAVEQDKNTQEVFAQVKQIYKTPPIKDFGGFNFSQILPDPSKPSKRSFIEDLLFNKVTLADAGFIKQYGDCLGDIAARDLICAQKFNGLTVLPPLLTDEMIAQYTSALLAGTITSGWTFGAGAALQIPFAMQMAYRFNGIGVTQNVLYENQKLIANQFNSAIGKIQDSLSSTASALGKLQDVVNQNAQALNTLVKQLSSNFGAISSVLNDILSRLDPPEAEVQIDRLITGRLQSLQTYVTQQLIRAAEIRASANLAATKMSECVLGQSKRVDFCGKGYHLMSFPQSAPHGVVFLHVTYVPAQEKNFTTAPAICHDGKAHFPREGVFVSNGTHWFVTQRNFYEPQIITTDNTFVSGNCDVVIGIVNNTVYDPLQPELDSGGGGSDIDPYKEFGSSYQLLNFLPLDFFPDLNALVDTATALYEEELTGREHCSPHHTAIRQALVCWDELTKLIAWMSSNITSEQVRTIIVNHVNDTWGLKVRQSLWFHLSCLTFGQHTVQEFLVSFGVWIRTPAPYRPPNAPILSTLPEHTVIC

SEQ ID NO: 10739 - protein, 1301 aa, Artificial Sequence
  SARS-CoV-2/Sweden/01/2020__EPI_ISL_411951 spike protein (1-1147)(K986P_V987P) WhcAg construct
MFVFLVLLPLVSSQCVNLTTRTQLPPAYTNSFTRGVYYPDKVFRSSVLHSTQDLFLPFFSNVTWFHAIHVSGTNGTKRFDNPVLPFNDGVYFASTEKSNIIRGWIFGTTLDSKTQSLLIVNNATNVVIKVCEFQFCNDPFLGVYYHKNNKSWMESEFRVYSSANNCTFEYVSQPFLMDLEGKQGNFKNLREFVFKNIDGYFKIYSKHTPINLVRDLPQGFSALEPLVDLPIGINITRFQTLLALHRSYLTPGDSSSGWTAGAAAYYVGYLQPRTFLLKYNENGTITDAVDCALDPLSETKCTLKSFTVEKGIYQTSNFRVQPTESIVRFPNITNLCPFGEVFNATRFASVYAWNRKRISNCVADYSVLYNSASFSTFKCYGVSPTKLNDLCFTNVYADSFVIRGDEVRQIAPGQTGKIADYNYKLPDDFTGCVIAWNSNNLDSKVGGNYNYLYRLFRKSNLKPFERDISTEIYQAGSTPCNGVEGFNCYFPLQSYGFQPTNGVGYQPYRVVVLSFELLHAPATVCGPKKSTNLVKNKCVNFNFNGLTGTGVLTESNKKFLPFQQFGRDIADTTDAVRDPQTLEILDITPCSFGGVSVITPGTNTSNQVAVLYQDVNCTEVPVAIHADQLTPTWRVYSTGSNVFQTRAGCLIGAEHVNNSYECDIPIGAGICASYQTQTNSPRRARSVASQSIIAYTMSLGAENSVAYSNNSIAIPTNFTISVTTEILPVSMTKTSVDCTMYICGDSTECSNLLLQYGSFCTQLNRALTGIAVEQDKNTQEVFAQVKQIYKTPPIKDCGGFNFSQILPDPSKPSKRSFIEDLLFNKVTLADAGFIKQYGDCLGDIAARDLICAQKFNGLTVLPPLLTDEMIAQYTSALLAGTITSGWTFGAGAALQIPFAMQMAYRFNGIGVTQNVLYENQKLIANQFNSAIGKIQDSLSSTASALGKLQDVVNQNAQALNTLVKQLSSNFGAISSVLNDILSRLDPPEAEVQIDRLITGRLQSLQTYVTQQLIRAAEIRASANLAATKMSECVLGQSKRVDFCGKGYHLMSFPQSAPHGVVFLHVTYVPAQEKNFTTAPAICHDGKAHFPREGVFVSNGTHWFVTQRNFYEPQIITTDNTFVSGNCDVVIGIVNNTVYDPLQPELDSGGGGSDIDPYKEFGSSYQLLNFLPLDFFPDLNALVDTATALYEEELTGREHCSPHHTAIRQALVCWDELTKLIAWMSSNITSEQVRTIIVNHVNDTWGLKVRQSLWFHLSCLTFGQHTVQEFLVSFGVWIRTPAPYRPPNAPILSTLPEHTVIC

SEQ ID NO: 10740 - protein, 1301 aa, Artificial Sequence
  SARS-CoV-2/Tianmen/HBCDC-HB-07/2020__EPI_ISL_412983 spike protein (1-1147)(K986P_V987P) WhcAg construct
MFVFLVLLPLVSSQCVNLTTRTQLPPAYTNSFTRGVYYPDKVFRSSVLHSTQDLFLPFFSNVTWFHAIHVSGTNGTKRFDNPVLPFNDGVYFASTEKSNIIRGWIFGTTLDSKTQSLLIVNNATNVVIKVCEFQFCNDPFLGVYYHKNNKSWMESEFRVYSSANNCTFEYVSQPFLMDLEGKQGNFKNLREFVFKNIDGYFKIYSKHTPINLVRDLPQGFSALEPLVDLPIGINITRFQTLLALHRSYLTPGDSSSGWTAGAAAYYVGYLQPRTFLLKYNENGTITDAVDCALDPLSETKCTLKSFTVEKGIYQTSNFRVQPTESIVRFPNITNLCPFGEVFNATRFASVYAWNRKRISNCVADYSVLYNSASFSTFKCYGVSPTKLNDLCFTNVYADSFVIRGDEVRQIAPGQTGKIADYNYKLPDDFTGCVIAWNSNNLDSKVGGNYNYLYRLFRKSNLKPFERDISTEIYQAGSTPCNGVEGFNCYFPLQSYGFQPTNGVGYQPYRVVVLSFELLHAPATVCGPKKSTNLVKNKCVNFNFNGLTGTGVLTESNKKFLPFQQFGRDIADTTDAVRDPQTLEILDITPCSFGGVSVITPGTNTSNQVAVLYQDLNCTEVPVAIHADQLTPTWRVYSTGSNVFQTRAGCLIGAEHVNNSYECDIPIGAGICASYQTQTNSPRRARSVASQSIIAYTMSLGAENSVAYSNNSIAIPTNFTISVTTEILPVSMTKTSVDCTMYICGDSTECSNLLLQYGSFCTQLNRALTGIAVEQDKNTQEVFAQVKQIYKTPPIKDFGGFNFSQILPDPSKPSKRSFIEDLLFNKVTLADAGFIKQYGDCLGDIAARDLICAQKFNGLTVLPPLLTDEMIAQYTSALLAGTITSGWTFGAGAALQIPFAMQMAYRFNGIGVTQNVLYENQKLIANQFNSAIGKIQDSLSSTASALGKLQDVVNQNAQALNTLVKQLSSNFGAISSVLNDILSRLDPPEAEVQIDRLITGRLQSLQTYVTQQLIRAAEIRASANLAATKMSECVLGQSKRVDFCGKGYHLMSFPQSAPHGVVFLHVTYVPAQEKNFTTAPAICHDGKAHFPREGVFVSNGTHWFVTQRNFYEPQIITTDNTFVSGNCDVVIGIVNNTVYDPLQPELDSGGGGSDIDPYKEFGSSYQLLNFLPLDFFPDLNALVDTATALYEEELTGREHCSPHHTAIRQALVCWDELTKLIAWMSSNITSEQVRTIIVNHVNDTWGLKVRQSLWFHLSCLTFGQHTVQEFLVSFGVWIRTPAPYRPPNAPILSTLPEHTVIC

SEQ ID NO: 10741 - protein, 1301 aa, Artificial Sequence
  SARS-CoV-2/Hong Kong/case42_VM20002493/2020__EPI_ISL_414527 spike protein (1-1147)(K986P_V987P) WhcAg construct
MFVFLVLLPLVSSQCVNLTTRTQLPPAYTNSFTRGVYYPDKVFRSSVLHSTQDLFLPFFSNVTWFHAIHVSGTNGTKRFDNPVLPFNDGVYFASTEKSNIIRGWIFGTTLDSKTQSLLIVNNATNVVIKVCEFQFCNDPFLGVYYHKNNKSWMESEFRVYSSANNCTFEYVSQPFLMDLEGKQGNFKNLREFVFKNIDGYFKIYSKHTPINLVRDLPQGFSALEPLVDLPIGINITRFQTLLALHRSYLTPGDSSSGWTAGAAAYYVGYLQPRTFLLKYNENGTITDAVDCALDPLSETKCTLKSFTVEKGIYQTSNFRVQPTESIVRFPNITNLCPFGEVFNATRFASVYAWNRKRISNCVADYSVLYNSASFSTFKCYGVSPTKLNDLCFTNVYADSFVIRGDEVRQIAPGQTGKIADYNYKLPDDFTGCVIAWNSNNLDSKVGGNYNYLYRLFRKSNLKPFERDISTEIYQAGSTPCNGVEGFNCYFPLQSYGFQPTNGVGYQPYRVVVLSFELLHAPATVCGPKKSTNLVKNKCVNFNFNGLTGTGVLTESNKKFLPFQQFGRDIADTTDAVRDPQTLEILDITPCSFGGVSVITPGTNTSNQVAVLYQDVNCTEVPVAIHADQLTPTWRVYSTGSNVFQTRAGCLIGAEHVNNSYECDIPIGAGICASYQTQTNSPRRARSVASQSIIAYTMSLGAENSVAYSNNSIAIPTNFAISVTTEILPVSMTKTSVDCTMYICGDSTECSNLLLQYGSFCTQLNRALTGIAVEQDKNTQEVFAQVKQIYKTPPIKDFGGFNFSQILPDPSKPSKRSFIEDLLFNKVTLADAGFIKQYGDCLGDIAARDLICAQKFNGLTVLPPLLTDEMIAQYTSALLAGTITSGWTFGAGAALQIPFAMQMAYRFNGIGVTQNVLYENQKLIANQFNSAIGKIQDSLSSTASALGKLQDVVNQNAQALNTLVKQLSSNFGAISSVLNDILSRLDPPEAEVQIDRLITGRLQSLQTYVTQQLIRAAEIRASANLAATKMSECVLGQSKRVDFCGKGYHLMSFPQSAPHGVVFLHVTYVPAQEKNFTTAPAICHDGKAHFPREGVFVSNGTHWFVTQRNFYEPQIITTDNTFVSGNCDVVIGIVNNTVYDPLQPELDSGGGGSDIDPYKEFGSSYQLLNFLPLDFFPDLNALVDTATALYEEELTGREHCSPHHTAIRQALVCWDELTKLIAWMSSNITSEQVRTIIVNHVNDTWGLKVRQSLWFHLSCLTFGQHTVQEFLVSFGVWIRTPAPYRPPNAPILSTLPEHTVIC

SEQ ID NO: 10742 - protein, 1301 aa, Artificial Sequence
  SARS-CoV-2/USA/CruiseA-23/2020__EPI_ISL_414482 spike protein (1-1147)(K986P_V987P) WhcAg construct
MFVFLVLLPLVSSQCVNLTTRTQLPPAYTNSFTRGVYYPDKVFRSSVLHSTQDLFLPFFSNVTWFHAIHVSGTNGTKRFDNPVLPFNDGVYFASTEKSNIIRGWIFGTTLDSKTQSLLIVNNATNVVIKVCEFQFCNDPFLGVYYHKNNKSWMESEFRVYSSANNCTFEYVSQPFLMDLEVKQGNFKNLREFVFKNIDGYFKIYSKHTPINLVRDLPQGFSALEPLVDLPIGINITRFQTLLALHRSYLTPGDSSSGWTAGAAAYYVGYLQPRTFLLKYNENGTITDAVDCALDPLSETKCTLKSFTVEKGIYQTSNFRVQPTESIVRFPNITNLCPFGEVFNATRFASVYAWNRKRISNCVADYSVLYNSASFSTFKCYGVSPTKLNDLCFTNVYADSFVIRGDEVRQIAPGQTGKIADYNYKLPDDFTGCVIAWNSNNLDSKVGGNYNYLYRLFRKSNLKPFERDISTEIYQAGSTPCNGVEGFNCYFPLQSYGFQPTNGVGYQPYRVVVLSFELLHAPATVCGPKKSTNLVKNKCVNFNFNGLTGTGVLTESNKKFLPFQQFGRDIADTTDAVRDPQTLEILDITPCSFGGVSVITPGTNTSNQVAVLYQDVNCTEVPVAIHADQLTPTWRVYSTGSNVFQTRAGCLIGAEHVNNSYECDIPIGAGICASYQTQTNSPRRARSVASQSIIAYTMSLGAENSVAYSNNSIAIPTNFTISVTTEILPVSMTKTSVDCTMYICGDSTECSNLLLQYGSFCTQLNRALTGIAVEQDKNTQEVFAQVKQIYKTPPIKDFGGFNFSQILPDPSKPSKRSFIEDLLFNKVTLADAGFIKQYGDCLGDIAARDLICAQKFNGLTVLPPLLTDEMIAQYTSALLAGTITSGWTFGAGAALQIPFAMQMAYRFNGIGVTQNVLYENQKLIANQFNSAIGKIQDSLSSTASALGKLQDVVNQNAQALNTLVKQLSSNFGAISSVLNDILSRLDPPEAEVQIDRLITGRLQSLQTYVTQQLIRAAEIRASANLAATKMSECVLGQSKRVDFCGKGYHLMSFPQSAPHGVVFLHVTYVPAQEKNFTTAPAICHDGKAHFPREGVFVSNGTHWFVTQRNFYEPQIITTDNTFVSGNCDVVIGIVNNTVYDPLQPELDSGGGGSDIDPYKEFGSSYQLLNFLPLDFFPDLNALVDTATALYEEELTGREHCSPHHTAIRQALVCWDELTKLIAWMSSNITSEQVRTIIVNHVNDTWGLKVRQSLWFHLSCLTFGQHTVQEFLVSFGVWIRTPAPYRPPNAPILSTLPEHTVIC

SEQ ID NO: 10743 - protein, 1301 aa, Artificial Sequence
  SARS-CoV-2/Hong Kong/case85_VM20002868/2020__EPI_ISL_414519 spike protein (1-1147)(K986P_V987P) WhcAg construct
MFVFLVLVPLVSSQCVNLTTRTQLPPAYTNSFTRGVYYPDKVFRSSVLHSTQDLFLPFFSNVTWFHAIHVSGTNGTKRFDNPVLPFNDGVYFASTEKSNIIRGWIFGTTLDSKTQSLLIVNNATNVVIKVCEFQFCNDPFLGVYYHKNNKSWMESEFRVYSSANNCTFEYVSQPFLMDLEGKQGNFKNLREFVFKNIDGYFKIYSKHTPINLVRDLPQGFSALEPLVDLPIGINITRFQTLLALHRSYLTPGDSSSGWTAGAAAYYVGYLQPRTFLLKYNENGTITDAVDCALDPLSETKCTLKSFTVEKGIYQTSNFRVQPTESIVRFPNITNLCPFGEVFNATRFASVYAWNRKRISNCVADYSVLYNSASFSTFKCYGVSPTKLNDLCFTNVYADSFVIRGDEVRQIAPGQTGKIADYNYKLPDDFTGCVIAWNSNNLDSKVGGNYNYLYRLFRKSNLKPFERDISTEIYQAGSTPCNGVEGFNCYFPLQSYGFQPTNGVGYQPYRVVVLSFELLHAPATVCGPKKSTNLVKNKCVNFNFNGLTGTGVLTESNKKFLPFQQFGRDIADTTDAVRDPQTLEILDITPCSFGGVSVITPGTNTSNQVAVLYQDVNCTEVPVAIHADQLTPTWRVYSTGSNVFQTRAGCLIGAEHVNNSYECDIPIGAGICASYQTQTNSPRRARSVASQSIIAYTMSLGAENSVAYSNNSIAIPTNFTISVTTEILPVSMTKTSVDCTMYICGDSTECSNLLLQYGSFCTQLNRALTGIAVEQDKNTQEVFAQVKQIYKTPPIKDFGGFNFSQILPDPSKPSKRSFIEDLLFNKVTLADAGFIKQYGDCLGDIAARDLICAQKFNGLTVLPPLLTDEMIAQYTSALLAGTITSGWTFGAGAALQIPFAMQMAYRFNGIGVTQNVLYENQKLIANQFNSAIGKIQDSLSSTASALGKLQDVVNQNAQALNTLVKQLSSNFGAISSVLNDILSRLDPPEAEVQIDRLITGRLQSLQTYVTQQLIRAAEIRASANLAATKMSECVLGQSKRVDFCGKGYHLMSFPQSAPHGVVFLHVTYVPAQEKNFTTAPAICHDGKAHFPREGVFVSNGTHWFVTQRNFYEPQIITTDNTFVSGNCDVVIGIVNNTVYDPLQPELDSGGGGSDIDPYKEFGSSYQLLNFLPLDFFPDLNALVDTATALYEEELTGREHCSPHHTAIRQALVCWDELTKLIAWMSSNITSEQVRTIIVNHVNDTWGLKVRQSLWFHLSCLTFGQHTVQEFLVSFGVWIRTPAPYRPPNAPILSTLPEHTVIC

SEQ ID NO: 10744 - protein, 1301 aa, Artificial Sequence; identical to SEQ ID NO: 10734
  SARS-CoV-2/England/200990660/2020__EPI_ISL_414523 spike protein (1-1147)(K986P_V987P) WhcAg construct

SEQ ID NO: 10745 - protein, 1301 aa, Artificial Sequence
  SARS-CoV-2/Australia/NSW09/2020__EPI_ISL_413595 spike protein (1-1147)(K986P_V987P) WhcAg construct
MFVFLVLLPLVSSQCVNLTTRTQLPPAYTNSFTRGVYYPDKVFRSSVLHSTQDLFLPFFSNVTWFHAIHVSGTNGTKRFDNPVLPFNDGVYFASTEKSNIIRGWIFGTTLDSKTQSLLIVNNATNVVIKVCEFQFCNDPFLGVYYHKNNKSWMESEFRVYSSANNCTFEYVSQPFLMDLEGKQGNFKNLREFVFKNIDGYFKIYSKHTPINLVRDLPQGFSALEPLVDLPIGINITRFQTLLALHRSYLTPGDSSSGWTAGAAAYYVGYLQPRTFLLKYNENGTITDAVDCALDPLSETKCTLKSFTVEKGIYQTSNFRVQPTESIVRFPNITNLCPFGEVFNATRFASVYAWNRKRISNCVADYSVLYNSASFSTFKCYGVSPTKLNDLCFTNVYADSFVIRGDEVRQIAPGQTGKIADYNYKLPDDFTGCVIAWNSNNLDSKVGGNYNYLYRLFRKSNLKPFERDISTEIYQAGSTPCNGVEGFNCYFPLQSYGFQPTNGVGYQPYRVVVLSFELLHAPATVCGPKKSTNLVKNKCVNFNFNGLTGTGVLTESNKKFLPFQQFGRDIADTTDAVRDPQTLEILDITPCSFGGVSVITPGTNTSNQVAVLYQDVNCTEVPVAIHADQLTPTWRVYSTGSNVFQTRAGCLIGAEHVNNSYECDIPIGAGICASYQTQTNSPRRARSVASQSIIAYTMSLGAENSVAYSNNSIAIPTNFTISVTTEILPVSMTKTSVDCTMYICGDSTECSNLLLQYGSFCTQLNRALTGIAVEQDKNTQEVFAQVKQIYKTPPIKDFGGFNFSQILPDPSKPSKRSFIEDLLFNKVTLADAGFIKQYGDCLGDIAARDLICAQKFNGLTVLPPLLTDEMIAQYTSALLAGTITSGWTFGAGAALQIPFAMQMAYRFNGIGVTQNVLYENQKLIANQFNSAIGKIQDSLSFTASALGKLQDVVNQNAQALNTLVKQLSSNFGAISSVLNDILSRLDPPEAEVQIDRLITGRLQSLQTYVTQQLIRAAEIRASANLAATKMSECVLGQSKRVDFCGKGYHLMSFPQSAPHGVVFLHVTYVPAQEKNFTTAPAICHDGKAHFPREGVFVSNGTHWFVTQRNFYEPQIITTDNTFVSGNCDVVIGIVNNTVYDPLQPELDSGGGGSDIDPYKEFGSSYQLLNFLPLDFFPDLNALVDTATALYEEELTGREHCSPHHTAIRQALVCWDELTKLIAWMSSNITSEQVRTIIVNHVNDTWGLKVRQSLWFHLSCLTFGQHTVQEFLVSFGVWIRTPAPYRPPNAPILSTLPEHTVIC

SEQ ID NO: 10746 - protein, 1301 aa, Artificial Sequence; identical to SEQ ID NO: 10726
  SARS-CoV-2/Australia/NSW10/2020__EPI_ISL_413596 spike protein (1-1147)(K986P_V987P) WhcAg construct

SEQ ID NO: 10747 - protein, 1301 aa, Artificial Sequence
  SARS-CoV-2/Switzerland/1000477797/2020__EPI_ISL_413023 spike protein (1-1147)(K986P_V987P) WhcAg construct
MFVFLVLLPLVSSQCVNLTTRTQLPPAYTNSFTRGVYYPDKVFRSSVLHSTQDLFLPFFSNVTWFHAIHVSGTNGTKRFDNPVLPFNDGVYFASTEKSNIIRGWIFGTTLDSKTQSLLIVNNATNVVIKVCEFQFCNDPFLGVYYHKNNKSWMESEFRVYSSANNCTFEYVSQPFLMDLEGKQGNFKNLREFVFKNIDGYFNIYSKHTPINLVRDLPQGFSALEPLVDLPIGINITRFQTLLALHRSYLTPGDSSSGWTAGAAAYYVGYLQPRTFLLKYNENGTITDAVDCALDPLSETKCTLKSFTVEKGIYQTSNFRVQPTESIVRFPNITNLCPFGEVFNATRFASVYAWNRKRISNCVADYSVLYNSASFSTFKCYGVSPTKLNDLCFTNVYADSFVIRGDEVRQIAPGQTGKIADYNYKLPDDFTGCVIAWNSNNLDSKVGGNYNYLYRLFRKSNLKPFERDISTEIYQAGSTPCNGVEGFNCYFPLQSYGFQPTNGVGYQPYRVVVLSFELLHAPATVCGPKKSTNLVKNKCVNFNFNGLTGTGVLTESNKKFLPFQQFGRDIADTTDAVRDPQTLEILDITPCSFGGVSVITPGTNTSNQVAVLYQGVNCTEVPVAIHADQLTPTWRVYSTGSNVFQTRAGCLIGAEHVNNSYECDIPIGAGICASYQTQTNSPRRARSVASQSIIAYTMSLGAENSVAYSNNSIAIPTNFTISVTTEILPVSMTKTSVDCTMYICGDSTECSNLLLQYGSFCTQLNRALTGIAVEQDKNTQEVFAQVKQIYKTPPIKDFGGFNFSQILPDPSKPSKRSFIEDLLFNKVTLADAGFIKQYGDCLGDIAARDLICAQKFNGLTVLPPLLTDEMIAQYTSALLAGTITSGWTFGAGAALQIPFAMQMAYRFNGIGVTQNVLYENQKLIANQFNSAIGKIQDSLSSTASALGKLQDVVNQNAQALNTLVKQLSSNFGAISSVLNDILSRLDPPEAEVQIDRLITGRLQSLQTYVTQQLIRAAEIRASANLAATKMSECVLGQSKRVDFCGKGYHLMSFPQSAPHGVVFLHVTYVPAQEKNFTTAPAICHDGKAHFPREGVFVSNGTHWFVTQRNFYEPQIITTDNTFVSGNCDVVIGIVNNTVYDPLQPELDSGGGGSDIDPYKEFGSSYQLLNFLPLDFFPDLNALVDTATALYEEELTGREHCSPHHTAIRQALVCWDELTKLIAWMSSNITSEQVRTIIVNHVNDTWGLKVRQSLWFHLSCLTFGQHTVQEFLVSFGVWIRTPAPYRPPNAPILSTLPEHTVIC

SEQ ID NO: 10748 - protein, 1301 aa, Artificial Sequence
  SARS-CoV-2/Belgium/BA-02291/2020__EPI_ISL_415159 spike protein (1-1147)(K986P_V987P) WhcAg construct
MFVFLVLLPLVSSQCVNLTTRTQLPPAYTNSFTRGVYYPDKVFRSSVLHSTQDLFLPFFSNVTWFHAIHVSGTNGTKRFDNPVLPFNDGVYFASTEKSNIIRGWIFGTTLDSKTQSLLIVNNATNVVIKVCEFQFCNDPFLGVYYHKNNKSWMESEFRVYSSANNCTFEYVSQPFLMDLEGKQGNFKNLREFVFKNIDGYFKIYSKHTPINLVRDLPQGFSALEPLVDLPIGINITRFQTLLALHRSYLTPGDSSSGWTAGAAAYYVGYLQPRTFLLKYNENGTITDAVDCALDPLSETKCTLKSFTVEKGIYQTSNFRVQPTESIVRFPNITNLCPFGEVFNATRFASVYAWNRKRISNCVADYSVLYNSASFSTFKCYGVSPTKLNDLCFTNVYADSFVIRGDEVRQIAPGQTGKIADYNYKLPDDFTGCVIAWNSNNLDSKVGGNYNYLYRLFRRSNLKPFERDISTEIYQAGSTPCNGVEGFNCYFPLQSYGFQPTNGVGYQPYRVVVLSFELLPAPATVCGPKKSTNLVKNKCVNFNFNGLTGTGVLTESNKKFLPFQQFGRDIADTTDAVRDPQTLEILDITPCSFGGVSVITPGTNTSNQVAVLYQGVNCTEVPVAIHADQLTPTWRVYSTGSNVFQTRAGCLIGAEHVNNSYECDIPIGAGICASYQTQTNSPRRARSVASQSIIAYTMSLGAENSVAYSNNSIAIPTNFTISVTTEILPVSMTKTSVDCTMYICGDSTECSNLLLQYGSFCTQLNRALTGIAVEQDKNTQEVFAQVKQIYKTPPIKDFGGFNFSQILPDPSKPSKRSFIEDLLFNKVTLADAGFIKQYGDCLGDIAARDLICAQKFNGLTVLPPLLTDEMIAQYTSALLAGTITSGWTFGAGAALQIPFAMQMAYRFNGIGVTQNVLYENQKLIANQFNSAIGKIQDSLSSAAPALGKLQDVVNQNAQALNTLVKQLSSNFGAISSVLNDILSRLDPPEAEVQIDRLITGRLQSLQTYVTQQLIRAAEIRASANLAATKMSECVLGQSKRVDFCGKGYHLMSFPQSAPHGVVFLHVTYVPAQEKNFTTAPAICHDGKAHFPREGVFVSNGTHWFVTQRNFYEPQIITTDNTFVSGNCDVVIGIVNNTVYDPLQPELDSGGGGSDIDPYKEFGSSYQLLNFLPLDFFPDLNALVDTATALYEEELTGREHCSPHHTAIRQALVCWDELTKLIAWMSSNITSEQVRTIIVNHVNDTWGLKVRQSLWFHLSCLTFGQHTVQEFLVSFGVWIRTPAPYRPPNAPILSTLPEHTVIC

SEQ ID NO: 10749 - protein, 1301 aa, Artificial Sequence
  SARS-CoV-2/USA/WA8-UW5/2020__EPI_ISL_413486 spike protein (1-1147)(K986P_V987P) WhcAg construct
MFVFLVLLPLVSSQCVNLTTRTQLPPAYTNSFTRGVYYPDKVFRSSVLHSTQDLFLPFFSNVTWFHAIHVSGTNGTKRFDNPVLPFNDGVYFASTEKSNIIRGWIFGTTLDSKTQSLLIVNNATNVVIKVCEFQFCNDPFLGVYYHKNNKSWMESEFRVYSSANNCTFEYVSQPFLMDLEGKQGNFKNLREFVFKNIDGYFKIYSKHTPINLVRDLPQGFSALEPLVDLPIGINITRFQTLLALHRSYLTPGDSSSGWTAGAAAYYVGYLQPRTFLLKYNENGTITDAVDCALDPLSETKCTLKSFTVEKGIYQTSNFRVQPTESIVRFPNITNLCPFGEVFNATRFASVYAWNRKRISNCVADYSVLYNSASFSTFKCYGVSPTKLNDLCFTNVYADSFVIRGDEVRQIAPGQTGKIADYNYKLPDDFTGCVIAWNSNNLDSKVGGNYNYLYRLFRKSNLKPFERDISTEIYQAGSTPCNGVEGFNCYFPLQSYGFQPTNGVGYQPYRVVVLSFELLHAPATVCGPKKSTNLVKNKCVNFNFNGLTGTGVLTESNKKFLPFQQFGRDIADTTDAVRDPQTLEILDITPCSFGGVSVITPGTNTSNQVAVLYQDVNCTEVPVAIHADQLTPTWRVYSTGSNVFQTRAGCLIGAEYVNNSYECDIPIGAGICASYQTQTNSPRRARSVASQSIIAYTMSLGAENSVAYSNNSIAIPTNFTISVTTEILPVSMTKTSVDCTMYICGDSTECSNLLLQYGSFCTQLNRALTGIAVEQDKNTQEVFAQVKQIYKTPPIKDFGGFNFSQILPDPSKPSKRSFIEDLLFNKVTLADAGFIKQYGDCLGDIAARDLICAQKFNGLTVLPPLLTDEMIAQYTSALLAGTITSGWTFGAGAALQIPFAMQMAYRFNGIGVTQNVLYENQKLIANQFNSAIGKIQDSLSSTASALGKLQDVVNQNAQALNTLVKQLSSNFGAISSVLNDILSRLDPPEAEVQIDRLITGRLQSLQTYVTQQLIRAAEIRASANLAATKMSECVLGQSKRVDFCGKGYHLMSFPQSAPHGVVFLHVTYVPAQEKNFTTAPAICHDGKAHFPREGVFVSNGTHWFVTQRNFYEPQIITTDNTFVSGNCDVVIGIVNNTVYDPLQPELDSGGGGSDIDPYKEFGSSYQLLNFLPLDFFPDLNALVDTATALYEEELTGREHCSPHHTAIRQALVCWDELTKLIAWMSSNITSEQVRTIIVNHVNDTWGLKVRQSLWFHLSCLTFGQHTVQEFLVSFGVWIRTPAPYRPPNAPILSTLPEHTVIC

SEQ ID NO: 10750 - protein, 1301 aa, Artificial Sequence
  SARS-CoV-2/England/20102000506/2020__EPI_ISL_415147 spike protein (1-1147)(K986P_V987P) WhcAg construct
MFVFLVLLPLVSSQCVNLTTRTQLPPAYTNSFTRGVYYPDKVFRSSVLHSTQDLFLPFFSNVTWFHAIHVSGTNGTKRFDNPVLPFNDGVYFASTEKSNIIRGWIFGTTLDSKTQSLLIVNNATNVVIKVCEFQFCNDPFLGVYYHKNNKSWMESEFRVYSSANNCTFEYVSQPFLMDLEGKQGNFKNLREFVFKNIDGYFKIYSKHTPINLVRDLPQGFSALEPLVDLPIGINITRFQTLLALHRSYLTPGDSSSGWTAGAAAYYVGYLQPRTFLLKYNENGTITDAVDCALDPLSETKCTLKSFTVEKGIYQTSNFRVQPTESIVRFPNITNLCPFGEVFNATRFASVYAWNRKRISNCVADYSVLYNSASFSTFKCYGVSPTKLNDLCFTNVYADSFVIRGDEVRQIAPGQTGKIADYNYKLPDDFTGCVIAWNSNNLDSKVGGNYNYLYRLFRKSNLKPFERDISTEIYQAGSTPCNGVEGFNCYFPLQSYGFQPTNGVGYQPYRVVVLSFELLHAPATVCGPKKSTNLVKNKCVNFNFNGLTGTGVLTESNKKFLPFQQFGRDIADTTDAVRDPQTLEILDITPCSFGGVSVITPGTNTSNQVAVLYQGVNCTEVPVAIHADQLTPTWRVYSTGSNVFQTRAGCLIGAEHVNNSYECDIPIGAGICASYQTQTNSPRRARSVASQSIIAYTMSLGAENSVAYSNNSIAIPTNFTISVTTEILPVSMTKTSVDCTMYICGDSTECSNLLLQYGSFCTQLNRALTGIAVEQDKNTQEVFAQVKQIYKTPPIKDFGGFNFSQILPDPSKPSKRSFIEDLLFNKVTLADAGFIKQYGYCLGDIAARDLICAQKFNGLTVLPPLLTDEMIAQYTSALLAGTITSGWTFGAGAALQIPFAMQMAYRFNGIGVTQNVLYENQKLIANQFNSAIGKIQDSLSSTASALGKLQDVVNQNAQALNTLVKQLSSNFGAISSVLNDILSRLDPPEAEVQIDRLITGRLQSLQTYVTQQLIRAAEIRASANLAATKMSECVLGQSKRVDFCGKGYHLMSFPQSAPHGVVFLHVTYVPAQEKNFTTAPAICHDGKAHFPREGVFVSNGTHWFVTQRNFYEPQIITTDNTFVSGNCDVVIGIVNNTVYDPLQPELDSGGGGSDIDPYKEFGSSYQLLNFLPLDFFPDLNALVDTATALYEEELTGREHCSPHHTAIRQALVCWDELTKLIAWMSSNITSEQVRTIIVNHVNDTWGLKVRQSLWFHLSCLTFGQHTVQEFLVSFGVWIRTPAPYRPPNAPILSTLPEHTVIC

SEQ ID NO: 10751 - protein, 1301 aa, Artificial Sequence
  SARS-CoV-2/Belgium/VAG-03013/2020__EPI_ISL_415155 spike protein (1-1147)(K986P_V987P) WhcAg construct
MFVFLVLLPLVSSQCVNLTTRTQLPPAYTNSFTRGVYYPDKVFRSSVLHSTQDLFLPFFSNVTWFHAIHVSGTNGTKRFDNPVLPFNDGVYFASTEKSNIIRGWIFGTTLDSKTQSLLIVNNATNVVIKVCEFQFCNDPFLGVYYHKNNKSWMESEFRVYSSANNCTFEYVSQPFLMDLEGKQGNFKNLREFVFKNIDGYFKIYSKHTPINLVRDLPQGFSALEPLVDLPIGINITRFQTLLALHRSYLTPGDSSSGWTAGAAAYYVGYLQPRTFLLKYNENGTITDAVDCALDPLSETKCTLKSFTVEKGIYQTSNFRVQPTESIVRFPNITNLCPFGEVFNATRFASVYAWNRKRISNCVADYSVLYNSASFSTFKCYGVSPTKLNDLCFTNVYADSFVIRGDEVRQIAPGQTGKIADYNYKLPDDFTGCVIAWNSNNLDSKVGGNYNYLYRLFRKSNLKPFERDISTEIYQAGSTPCNGVEGFNCYFPLQSYGFQPTNGVGYQPYRVVVLSFELLHAPATVCGPKKSTNLVKNKCVNFNFNGLTGTGVLTESNKKFLPFQQFGRDIADTTDAVRDPQTLEILDITPCSFGGVSVITPGTNTSNQVAVLYQGVNCTEVPVAIHADQLTPTWRVYSTGSNVFQTRAGCLIGAEHVNNSYECDIPIGAGICASYQTQTNSPRRARSVASQSIIAYTMSLGAENSVAYSNNSIAIPTNFTISVTTEILPVSMTKTSVDCTMYICGDSTECSNLLLQYGSFCTQLNRALTGIAVEQDKNTQEVFAQVKQIYKTPPIKDFGGFNFSQILPDPSKPSKRSFIEDLLFNKVTLADAGFIKQYGDCLGDIAARDLICAQKFNGLTVLPPLLTDEMIAQYTSALLAGTITSGWTFGAGAALQIPFAMQMAYRFNGIGVTQNVLYENQKLIANQFNSAIGKIQDSLSSTATALGKLQDVVNQNAQALNTLVKQLSSNFGAISSVLNDILSRLDPPEAEVQIDRLITGRLQSLQTYVTQQLIRAAEIRASANLAATKMSECVLGQSKRVDFCGKGYHLMSFPQSAPHGVVFLHVTYVPAQEKNFTTAPAICHDGKAHFPREGVFVSNGTHWFVTQRNFYEPQIITTDNTFVSGNCDVVIGIVNNTVYDPLQPELDSGGGGSDIDPYKEFGSSYQLLNFLPLDFFPDLNALVDTATALYEEELTGREHCSPHHTAIRQALVCWDELTKLIAWMSSNITSEQVRTIIVNHVNDTWGLKVRQSLWFHLSCLTFGQHTVQEFLVSFGVWIRTPAPYRPPNAPILSTLPEHTVIC

SEQ ID NO: 10752 - protein, 1301 aa, Artificial Sequence
  SARS-CoV-2/Belgium/BC-03016/2020__EPI_ISL_415157 spike protein (1-1147)(K986P_V987P) WhcAg construct
MFVFLVLLPLVSSQCVNLTTRTQLPPAYTNSFTRGVYYPDKVFRSSVLHSTQDLFLPFFSNVTWFHAIHVSGTNGTKRFDNPVLPFNDGVYFASTEKSNIIRGWIFGTTLDSKTQSLLIVNNATNVVIKVCEFQFCNDPFLGVYYHKNNKSWMESEFRVYSSANNCTFEYVSQPFLMDLEGKQGNFKNLREFVFKNIDGYFKIYSKHTPINLVRDLPQGFSALEPLVDLPIGINITRFQTLLALHRSYLTPGDSSSGWTAGAAAYYVGYLQPRTFLLKYNENGTITDAVDCALDPLSETKCTLKSFTVEKGIYQTSNFRVQPTESIVRFPNITNLCPFGEVFNATRFASVYAWNRKRISNCVADYSVLYNSASFSTFKCYGVSPTKLNDLCFTNVYADSFVIRGDEVRQIAPGQTGKIADYNYKLPDDFTGCVIAWNSNNLDSKVGGNYNYLYRLFRKSNLKPFERDISTEIYQAGSTPCNGVEGFNCYFPLQSYGFQPTNGVGYQPYRVVVLSFELLHAPATVCGPKKSTNLVKNKCVNFNFNGLTGTGVLTESNKKFLPFQQFGRDIADTTDAVRDPQTLEILDITPCSFGGVSVITPGTNTSNQVAVLYQGVNCTEVPVAIHADQLTPTWRVYSTGSNVFQTRAGCLIGAEHVNNSYECDIPIGAGICASYQTQTNSPRRARSVASQSIIAYTMSLGAENSVAYSNNSIAIPTNFTISVTTEILPVSMTKTSVDCTMYICGDSTECSNLLLQYGSFCTQLNRALTGIAVEQDKNTQEVFAQVKQIYKTPPIKDFGGFNFSQILPDPSKPSKRSFIEDLLFNKVTLADAGFIKQYGDCLGDIAARDLICAQKFNGLTVLPPLLTDEMIAQYTSALLAGTITSGWTFGAGAALQIPFAMQMAYRFNGIGVTQNVLYENQKLIANQFNSAIGKIQDSLSSTAPALGKLQDVVNQNAQALNTLVKQLSSNFGAISSVLNDILSRLDPPEAEVQIDRLITGRLQSLQTYVTQQLIRAAEIRASANLAATKMSECVLGQSKRVDFCGKGYHLMSFPQSAPHGVVFLHVTYVPAQEKNFTTAPAICHDGKAHFPREGVFVSNGTHWFVTQRNFYEPQIITTDNTFVSGNCDVVIGIVNNTVYDPLQPELDSGGGGSDIDPYKEFGSSYQLLNFLPLDFFPDLNALVDTATALYEEELTGREHCSPHHTAIRQALVCWDELTKLIAWMSSNITSEQVRTIIVNHVNDTWGLKVRQSLWFHLSCLTFGQHTVQEFLVSFGVWIRTPAPYRPPNAPILSTLPEHTVIC

SEQ ID NO: 10753 - protein, 1301 aa, Artificial Sequence
  SARS-CoV-2/Germany/BavPat3/2020__EPI_ISL_414521 spike protein (1-1147)(K986P_V987P) WhcAg construct
MFVFLVLLPLVSSQCVNLTTRTQLPPAYTNSFTRGVYYPDKVFRSSVLHSTQDLFLPFFSNVTWFHAIHVSGTNGTKRFDNPVLPFNDGVYFASTEKSNIIRGWIFGTTLDSKTQSLLIVNNATNVVIKVCEFQFCNDPFLGVYYHKNNKSWMESEFRVYSSANNCTFEYVSQPFLMDLEGKQGNFKNLREFVFKNIDGYFKIYSKHTPINLVRDLPQGFSALEPLVDLPIGINITRFQTLLALHRSYLTPGDSSSGWTAGAAAYYVGYLQPRTFLLKYNENGTITDAVDCALDPLSETKCTLKSFTVEKGIYQTSNFRVQPTESIVRFPNITNLCPFGEVFNATRFASVYAWNRKRISNCVADYSVLYNSASFSTFKCYGVSPTKLNDLCFTNVYADSFVIRGDEVRQIAPGQTGKIADYNYKLPDDFTGCVIAWNSNNLDSKVGGNYNYLYRLFRKSNLKPFERDISTEIYQAGSTPCNGVEGFNCYFPLQSYGFQPTNGVGYQPYRVVVLSFELLHAPATVCGPKKSTNLVKNKCVNFNFNGLTGTGVLTESNKKFLPFQQFGRDIADTTDAVRDPQTLEILDITPCSFGGVSVITPGTNTSNQVAVLYQDVNCTEVPVAIHADQLTPTWRVYSTGSNVFQTRAGCLIGAEHVNNSYECDIPIGAGICASYQTQTNSPRRARSVASQSIIAYTMSLGAENSVAYSNNSIAIPTNFTISVTTEILPVSMTKTSVDCTMYICGDSTECSNLLLQYGSFCTQLNRALTGIAVEQDKNTQQVFAQVKQIYKTPPIKDFGGFNFSQILPDPSKPSKRSFIEDLLFNKVTLADAGFIKQYGDCLGDIAARDLICAQKFNGLTVLPPLLTDEMIAQYTSALLAGTITSGWTFGAGAALQIPFAMQMAYRFNGIGVTQNVLYENQKLIANQFNSAIGKIQDSLSSTASALGKLQDVVNQNAQALNTLVKQLSSNFGAISSVLNDILSRLDPPEAEVQIDRLITGRLQSLQTYVTQQLIRAAEIRASANLAATKMSECVLGQSKRVDFCGKGYHLMSFPQSAPHGVVFLHVTYVPAQEKNFTTAPAICHDGKAHFPREGVFVSNGTHWFVTQRNFYEPQIITTDNTFVSGNCDVVIGIVNNTVYDPLQPELDSGGGGSDIDPYKEFGSSYQLLNFLPLDFFPDLNALVDTATALYEEELTGREHCSPHHTAIRQALVCWDELTKLIAWMSSNITSEQVRTIIVNHVNDTWGLKVRQSLWFHLSCLTFGQHTVQEFLVSFGVWIRTPAPYRPPNAPILSTLPEHTVIC

SEQ ID NO: 10754 - protein, 1301 aa, Artificial Sequence
  SARS-CoV-2/France/HF1805/2020__EPI_ISL_414628 spike protein (1-1147)(K986P_V987P) WhcAg construct
MFVFLVLLPLVSSQCVNLTTRTQLPPAYTNSFTRGVYYPDKVFRSSVLHSTQDLFLPFFSNVTWFHAIHVSGTNGTKRFDNPVLPFNDGVYFASTEKSNIIRGWIFGTTLDSKTQSLLIVNNATNVVIKVCEFQFCNDPFLGVYYHKNNKSWMESEFRVYSSANNCTFEYVSQPFLMDLEGKQGNFKNLREFVFKNIDGYFKIYSKHTPINLVRDLPQGFSALEPLVDLPIGINITRFQTLLALHRSYLTPGDSSSGWTAGAAAYYVGYLQPRTFLLKYNENGTITDAVDCALDPLSETKCTLKSFTVEKGIYQTSNFRVQPTESIVRFPNITNLCPFGEVFNATRFASVYAWNRKRISNCVADYSVLYNSASFSTFKCYGVSPTKLNDLCFTNVYADSFVIRGDEVRQIAPGQTGKIADYNYKLPDDFTGCVIAWNSNNLDSKVGGNYNYLYRLFRKSNLKPFERDISTEIYQAGSTPCNGVEGFNCYFPLQSYGFQPTNGVGYQPYRVVVLSFELLHAPATVCGPKKSTNLVKNKCVNFNFNGLTGTGVLTESNKKFLPFQQFGRDIADTTDAVRDPQTLEILDITPCSFGGVSVITPGTNTSNQVAVLYQGVNCTEVPVAIHADQLTPTWRVYSTGSNVFQTRAGCLIGAEHVNNSYECDIPIGAGICASYQTQTNSPRRARSVASQSIIAYTMSLGAENSVAYSNNSIAIPTNFTISVTTEILPVSMTKTSVDCTMYICGDSTECSNLLLQYGSFCTQLNRALTGIAVEQDKNTQEVFAQVKQIYKTPPIKDFGGFNFSQILPDPSKPSKRSFIEDLLFNKVTLADAGFIKQYGDCLGDIAARDLICAQKFNGLTVLPPLLTDEMIAQYTSALLAGTITSGWTFGAGAALQIPFAMQMAYRFNGIGVTQNVLYENQKLIANQFNSAIGKIQDSLSSTASALGKLQDVVNQNAQALNTLVKQLSSNFGAISSVLNDILSRLDPPEAEVQIDRLITGRLQSLQTYVTQQLIRAAEIRASANLAATKMSECVLGQSKRVDFCGKGYHLMSFPQSAPHGVVFLHVTYVPAQEKNFTTAPAICHDGKAHFPREGVFVSNGTHWFVTQRNFYEPQIITTDNTFVSGNCDVVIGVVNNTVYDPLQPELDSGGGGSDIDPYKEFGSSYQLLNFLPLDFFPDLNALVDTATALYEEELTGREHCSPHHTAIRQALVCWDELTKLIAWMSSNITSEQVRTIIVNHVNDTWGLKVRQSLWFHLSCLTFGQHTVQEFLVSFGVWIRTPAPYRPPNAPILSTLPEHTVIC

SEQ ID NO: 10755 - protein, 1301 aa, Artificial Sequence
  SARS-CoV-2/Netherlands/ZuidHolland_9/2020__EPI_ISL_414445 spike protein (1-1147)(K986P_V987P) WhcAg construct
MFVFLVLLPLVSSQCVNLTTRTQLPPAYTNSFTRGVYYPDKVFRSSVLHSTQDLFLPFFSNVTWFHAIHVSGTNGTKRFDNPVLPFNDGVYFASTEKSNIIRGWIFGTTLDSKTQSLLIVNNATNVVIKVCEFQFCNDPFLGVYYHKNNKSWMESEFRVYSSANNCTFEYVSQPFLMDLEGKQGNFKNLREFVFKNIDGYFKIYSKHTPINLVRDLPQGFSALEPLVDLPIGINITRFQTLLALHRSYLTPGDSSSGWTAGAAAYYVGYLQPRTFLLKYNENGTITDAVDCALDPLSETKCTLKSFTVEKGIYQTSNFRVQPTESIVRFPNITNLCPFGEVFNATRFASVYAWNRKRISNCVADYSVLYNSASFSTFKCYGVSPTKLNDLCFTNVYADSFVIRGDEVRQIAPGQTGKIADYNYKLPDDFTGCVIAWNSNNLDSKVGGNYNYLYRLFRKSNLKPFERDISTEIYQAGSTPCNGVEGFNCYFPLQSYGFQPTNGVGYQPYRVVVLSFELLHAPATVCGPKKSTNLVKNKCVNFNFNGLTGTGVLTESNKKFLPFQQFGRDIADTTDAVRDPQTLEILDITPCSFGGVSVITPGTNTSNQVAVLYQGVNCTEVPVAIHADQLTPTWRVYSTGSNVFQTRAGCLIGAEHVNNSYECDIPIGAGICASYQTQTNSPRRARSVASQSIIAYTMSLGAENSVAYSNNSIAIPTNFTISVTTEILPVSMTKTSVDCTMYICGDSTECSNLLLQYGSFCTQLNRALTGIAVEQDKNTQEVFAQVKQIYKTPPIKDFGGFNFSQILPDPSKPSKRSFIEDLLFNKVTLADAGFIKQYGDCLGDIAARDLICVQKFNGLTVLPPLLTDEMIAQYTSALLAGTITSGWTFGAGAALQIPFAMQMAYRFNGIGVTQNVLYENQKLIANQFNSAIGKIQDSLSSTASALGKLQDVVNQNAQALNTLVKQLSSNFGAISSVLNDILSRLDPPEAEVQIDRLITGRLQSLQTYVTQQLIRAAEIRASANLAATKMSECVLGQSKRVDFCGKGYHLMSFPQSAPHGVVFLHVTYVPAQEKNFTTAPAICHDGKAHFPREGVFVSNGTHWFVTQRNFYEPQIITTDNTFVSGNCDVVIGIVNNTVYDPLQPELDSGGGGSDIDPYKEFGSSYQLLNFLPLDFFPDLNALVDTATALYEEELTGREHCSPHHTAIRQALVCWDELTKLIAWMSSNITSEQVRTIIVNHVNDTWGLKVRQSLWFHLSCLTFGQHTVQEFLVSFGVWIRTPAPYRPPNAPILSTLPEHTVIC

SEQ ID NO: 10756 - protein, 1301 aa, Artificial Sequence
  SARS-CoV-2/Finland/FIN03032020A/2020__EPI_ISL_413602 spike protein (1-1147)(K986P_V987P) WhcAg construct
MFVFLVLLPLVSSQCVNLTTRTQLPPAYTNSFTRGVYYPDKVFRSSVLHSTQDLFLPFFSNVTWFHAIHVSGTNGTKRFDNPVLPFNDGVYFASTEKSNIIRGWIFGTTLDSKTQSLLIVNNATNVVIKVCEFQFCNDPFLGVYYHKNNKSWMESEFRVYSSANNCTFEYVSQPFLMDLEGKQGNFKNLREFVFKNIDGYFKIYSKHTPINLVRDLPQGFSALEPLVDLPIGINITRFQTLLALHRSYLTPGDSSSGWTAGAAAYYVGYLQPRTFLLKYNENGTITDAVDCALDPLSETKCTLKSFTVEKGIYQTSNFRVQPTESIVRFPNITNLCPFGEVFNATRFASVYAWNRKRISNCVADYSVLYNSASFSTFKCYGVSPTKLNDLCFTNVYADSFVIRGDEVRQIAPGQTGKIADYNYKLPDDFTGCVISWNSNNLDSKVGGNYNYLYRLFRKSNLKPFERDISTEIYQAGSTPCNGVEGFNCYFPLQSYGFQPTNGVGYQPYRVVVLSFELLHAPATVCGPKKSTNLVKNKCVNFNFNGLTGTGVLTESNKKFLPFQQFGRDIADTTDAVRDPQTLEILDITPCSFGGVSVITPGTNTSNQVAVLYQGVNCTEVPVAIHADQLTPTWRVYSTGSNVFQTRAGCLIGAEHVNNSYECDIPIGAGICASYQTQTNSPRRARSVASQSIIAYTMSLGAENSVAYSNNSIAIPTNFTISVTTEILPVSMTKTSVDCTMYICGDSTECSNLLLQYGSFCTQLNRALTGIAVEQDKNTQEVFAQVKQIYKTPPIKDFGGFNFSQILPDPSKPSKRSFIEDLLFNKVTLADAGFIKQYGDCLGDIAARDLICAQKFNGLTVLPPLLTDEMIAQYTSALLAGTITSGWTFGAGAALQIPFAMQMAYRFNGIGVTQNVLYENQKLIANQFNSAIGKIQDSLSSTASALGKLQDVVNQNAQALNTLVKQLSSNFGAISSVLNDILSRLDPPEAEVQIDRLITGRLQSLQTYVTQQLIRAAEIRASANLAATKMSECVLGQSKRVDFCGKGYHLMSFPQSAPHGVVFLHVTYVPAQEKNFTTAPAICHDGKAHFPREGVFVSNGTHWFVTQRNFYEPQIITTDNTFVSGNCDVVIGIVNNTVYDPLQPELDSGGGGSDIDPYKEFGSSYQLLNFLPLDFFPDLNALVDTATALYEEELTGREHCSPHHTAIRQALVCWDELTKLIAWMSSNITSEQVRTIIVNHVNDTWGLKVRQSLWFHLSCLTFGQHTVQEFLVSFGVWIRTPAPYRPPNAPILSTLPEHTVIC

SEQ ID NO: 10757 - protein, 1301 aa, Artificial Sequence
  SARS-CoV-2/France/GE1977/2020__EPI_ISL_414632 spike protein (1-1147)(K986P_V987P) WhcAg construct
MFVFLVLLPLVSSQCVNLTTRTQLPPAYTNSFTRGVYYPDKVFRSSVLHSTQDLFLPFFSNVTWFHAIHVSGTNGTKRFDNPVLPFNDGVYFASTEKSNIIRGWIFGTTLDSKTQSLLIVNNATNVVIKVCEFQFCNDPFLGVYYHKNNKSWMESEFRVYSSANNCTFEYVSQPFLMDLEGKQGNFKNLREFVFKNIDGYFKIYSKHTPINLVRDLPQGFSALEPLVDLPIGINITRFQTLLALHRSYLTPGDSSSGWTAGAAAYYVGYLQPRTFLLKYNENGTITDAVDCALDPLSETKCTLKSFTVEKGIYQTSNFRVQPTESIVRFPNITNLCPFGEVFNATRFASVYAWNRKRISNCVADYSVLYNSASFSTFKCYGVSPTKLNDLCFTNVYADSFVIRGDEVRQIAPGQTGKIADYNYKLPDDFTGCVIAWNSNNLDSKVGGNYNYLYRLFRKSNLKPFERDISTEIYQAGSTPCNGVEGFNCYFPLQSYGFQPTNGVGYQPYRVVVLSFELLHAPATVCGPKKSTNLVKNKCVNFNFNGLTGTGVLTESNKKFLPFQQFGRDIADTTDAVRDPQTLEILDITPCSFGGVSVITPGTNTSNQVAVLYQGVNCTEVPVAIHADQLTPTWRVYSTGSNVFQTRAGCLIGAEHVNNSYECDIPIGAGICASYQTQTNSPRRARSVASQSIIAYTMSLGAENSVAYSNNSIAIPTNFTISVTTEILPVSMTKTSVDCTMYICGDSTECSNLLLQYGSFCTQLNRALTGIAVEQDKNTQEVFAQVKQIYKTPPIKDFGGFNFSQILPDPSKPSKRSFIEDLLFNKVTLADAGFIKQYGDCLGDIAARDLICAQKFNGLTVLPPLLTDEMIAQYTSALLAGTITSGWTFGAGAALQIPFAMQMAYRFNGIGVTQNVLYENQKLIANQFNSAIGKIQDSLFSTASALGKLQDVVNQNAQALNTLVKQLSSNFGAISSVLNDILSRLDPPEAEVQIDRLITGRLQSLQTYVTQQLIRAAEIRASANLAATKMSECVLGQSKRVDFCGKGYHLMSFPQSAPHGVVFLHVTYVPAQEKNFTTAPAICHDGKAHFPREGVFVSNGTHWFVTQRNFYEPQIITTDNTFVSGNCDVVIGIVNNTVYDPLQPELDSGGGGSDIDPYKEFGSSYQLLNFLPLDFFPDLNALVDTATALYEEELTGREHCSPHHTAIRQALVCWDELTKLIAWMSSNITSEQVRTIIVNHVNDTWGLKVRQSLWFHLSCLTFGQHTVQEFLVSFGVWIRTPAPYRPPNAPILSTLPEHTVIC

SEQ ID NO: 10758 - protein, 1301 aa, Artificial Sequence
  SARS-CoV-2/Finland/FIN-313/2020__EPI_ISL_414641 spike protein (1-1147)(K986P_V987P) WhcAg construct
MFVFLVLLPLVSSQCVNLTTRTQLPPAYTNSFTRGVYYPDKVFRSSVLHSTQDLFLPFFSNVTWFHAIHVSGTNGTKRFDNPVLPFNDGVYFASTEKSNIIRGWIFGTTLDSKTQSLLIVNNATNVVIKVCEFQFCNDPFLGVYYHKNNKSWMESEFRVYSSANNCTFEYVSQPFLMDLEGKQGNFKNLREFVFKNIDGYFKIYSKHTPINLVRDLPQGFSALEPLVDLPIGINITRFKTLLALHRSYLTPGDSSSGWTAGAAAYYVGYLQPRTFLLKYNENGTITDAVDCALDPLSETKCTLKSFTVEKGIYQTSNFRVQPTESIVRFPNITNLCPFGEVFNATRFASVYAWNRKRISNCVADYSVLYNSASFSTFKCYGVSPTKLNDLCFTNVYADSFVIRGDEVRQIAPGQTGKIADYNYKLPDDFTGCVIAWNSNNLDSKVGGNYNYLYRLFRKSNLKPFERDISTEIYQAGSTPCNGVEGFNCYFPLQSYGFQPTNGVGYQPYRVVVLSFELLHAPATVCGPKKSTNLVKNKCVNFNFNGLTGTGVLTESNKKFLPFQQFGRDIADTTDAVRDPQTLEILDITPCSFGGVSVITPGTNTSNQVAVLYQGVNCTEVPVAIHADQLTPTWRVYSTGSNVFQTRAGCLIGAEHVNNSYECDIPIGAGICASYQTQTNSPRRARSVASQSIIAYTMSLGAENSVAYSNNSIAIPTNFTISVTTEILPVSMTKTSVDCTMYICGDSTECSNLLLQYGSFCTQLNRALTGIAVEQDKNTQEVFAQVKQIYKTPPIKDFGGFNFSQILPDPSKPSKRSFIEDLLFNKVTLADAGFIKQYGDCLGDIAARDLICAQKFNGLTVLPPLLTDEMIAQYTSALLAGTITSGWTFGAGAALQIPFAMQMAYRFNGIGVTQNVLYENQKLIANQFNSAIGKIQDSLSSTASALGKLQDVVNQNAQALNTLVKQLSSNFGAISSVLNDILSRLDPPEAEVQIDRLITGRLQSLQTYVTQQLIRAAEIRASANLAATKMSECVLGQSKRVDFCGKGYHLMSFPQSAPHGVVFLHVTYVPAQEKNFTTAPAICHDGKAHFPREGVFVSNGTHWFVTQRNFYEPQIITTDNTFVSGNCDVVIGIVNNTVYDPLQPELDSGGGGSDIDPYKEFGSSYQLLNFLPLDFFPDLNALVDTATALYEEELTGREHCSPHHTAIRQALVCWDELTKLIAWMSSNITSEQVRTIIVNHVNDTWGLKVRQSLWFHLSCLTFGQHTVQEFLVSFGVWIRTPAPYRPPNAPILSTLPEHTVIC

SEQ ID NO: 10759 - protein, 1301 aa, Artificial Sequence
  SARS-CoV-2/Netherlands/ZuidHolland_2/2020__EPI_ISL_414556 spike protein (1-1147)(K986P_V987P) WhcAg construct
MFVFLVLLPLVSSQCVNLTTRTQLPPAYTNSFTRGVYYPDKVFRSSVLHSTQDLFLPFFSNVTWFHAIHVSGTNGTKRFDNPVLPFNDGVYFASTEKSNIIRGWIFGTTLDSKTQSLLIVNNATNVVIKVCEFQFCNDPFLGVYYHKNNKSWMESEFRVYSSANNCTFEYVSQPFLMDLEGKQGNFKNLREFVFKNIDGYFKIYSKHTPINLVRDLPQGFSALEPLVDLPIGINITRFQTLLALHRSYLTPGDSSSGWTAGAAAYYVGYLQPRTFLLKYNENGTITDAVDCALDPLSETKCTLKSFTVEKGIYQTSNFRVQPTESIVRFPNITNLCPFGEVFNATRFASVYAWNRKRISNCVADYSVLYNSASFSTFKCYGVSPTKLNDLCFTNVYADSFVIRGDEVRQIAPGQTGKIADYNYKLPDDFTGCVIAWNSNNLDSKVGGNYNYLYRLFRKSNLKPFERDISTEIYQAGSTPCNGVEGFNCYFPLQSYGFQPTNGVGYQPYRVVVLSFELLHAPATVCGPKKSTNLVKNKCVNFNFNGLTGTGVLTESNKKFLPFQQFGRDIADTTDAVRDPQTLEILDITPCSFGGVSVITPGTNTSNQVAVLYQGVNCTEVPVAIHADQLTPTWRVYSTGSNVFQTRAGCLIGAEHVNNSYECDIPIGAGICASYQTQTNSPRRARSVASQSIIAYTMSLGAENSVAYSNNSIAIPTNFTISVTTEILPVSMTKTSVDCTMYICGDSTECSNLLLQYGSFCTQLNRALTGIALEQDKNTQEVFAQVKQIYKTPPIKDFGGFNFSQILPDPSKPSKRSFIEDLLFNKVTLADAGFIKQYGDCLGDIAARDLICAQKFNGLTVLPPLLTDEMIAQYTSALLAGTITSGWTFGAGAALQIPFAMQMAYRFNGIGVTQNVLYENQKLIANQFNSAIGKIQDSLSSTASALGKLQDVVNQNAQALNTLVKQLSSNFGAISSVLNDILSRLDPPEAEVQIDRLITGRLQSLQTYVTQQLIRAAEIRASANLAATKMSECVLGQSKRVDFCGKGYHLMSFPQSAPHGVVFLHVTYVPAQEKNFTTAPAICHDGKAHFPREGVFVSNGTHWFVTQRNFYEPQIITTDNTFVSGNCDVVIGIVNNTVYDPLQPELDSGGGGSDIDPYKEFGSSYQLLNFLPLDFFPDLNALVDTATALYEEELTGREHCSPHHTAIRQALVCWDELTKLIAWMSSNITSEQVRTIIVNHVNDTWGLKVRQSLWFHLSCLTFGQHTVQEFLVSFGVWIRTPAPYRPPNAPILSTLPEHTVIC

SEQ ID NO: 10760 - protein, 1301 aa, Artificial Sequence
  SARS-CoV-2/USA/WA-UW31/2020__EPI_ISL_414618 spike protein (1-1147)(K986P_V987P) WhcAg construct
MFVFLVLLPLVSSQCVNLTTRTQLPPAYTNSFTRGVYYPDKVFRSSVLHSTQDLFLPFFSNVTWFHAIHVSGTNGTKRFDNPVLPFNDGVYFASTEKSNIIRGWIFGTTLDSKTQSLLIVNNATNVVIKVCEFQFCNDPFLGVYYHKNNKSWMESEFRVYSSANNCTFEYVSQPFLMDLEGKQGNFKNLREFVFKNIDGYFKIYSKHTPINLVRDLPQGFSALEPLVDLPIGINITRFQTLLALHRSYLTPGDSSSGWTAGAAAYYVGYLQPRTFLLKYNENGTITDAVDCALDPLSETKCTLKSFTVEKGIYQTSNFRVQPTESIVRFPNITNLCPFGEVFNATRFASVYAWNRKRISNCVADYSVLYNSASFSTFKCYGVSPTKLNDLCFTNVYADSFVIRGDEVRQIAPGQTGKIADYNYKLPDDFTGCVIAWNSNNLDSKVGGNYNYLYRLFRKSNLKPFERDISTEIYQAGSTPCNGAEGFNCYFPLQSYGFQPTNGVGYQPYRVVVLSFELLHAPATVCGPKKSTNLVKNKCVNFNFNGLTGTGVLTESNKKFLPFQQFGRDIADTTDAVRDPQTLEILDITPCSFGGVSVITPGTNTSNQVAVLYQDVNCTEVPVAIHADQLTPTWRVYSTGSNVFQTRAGCLIGAEHVNNSYECDIPIGAGICASYQTQTNSPRRARSVASQSIIAYTMSLGAENSVAYSNNSIAIPTNFTISVTTEILPVSMTKTSVDCTMYICGDSTECSNLLLQYGSFCTQLNRALTGIAVEQDKNTQEVFAQVKQIYKTPPIKDFGGFNFSQILPDPSKPSKRSFIEDLLFNKVTLADAGFIKQYGDCLGDIAARDLICAQKFNGLTVLPPLLTDEMIAQYTSALLAGTITSGWTFGAGAALQIPFAMQMAYRFNGIGVTQNVLYENQKLIANQFNSAIGKIQDSLSSTASALGKLQDVVNQNAQALNTLVKQLSSNFGAISSVLNDILSRLDPPEAEVQIDRLITGRLQSLQTYVTQQLIRAAEIRASANLAATKMSECVLGQSKRVDFCGKGYHLMSFPQSAPHGVVFLHVTYVPAQEKNFTTAPAICHDGKAHFPREGVFVSNGTHWFVTQRNFYEPQIITTDNTFVSGNCDVVIGIVNNTVYDPLQPELDSGGGGSDIDPYKEFGSSYQLLNFLPLDFFPDLNALVDTATALYEEELTGREHCSPHHTAIRQALVCWDELTKLIAWMSSNITSEQVRTIIVNHVNDTWGLKVRQSLWFHLSCLTFGQHTVQEFLVSFGVWIRTPAPYRPPNAPILSTLPEHTVIC

SEQ ID NO: 10761 - protein, 1301 aa, Artificial Sequence
  SARS-CoV-2/South Korea/SNU01/2020__EPI_ISL_411929 spike protein (1-1147)(K986P_V987P) WhcAg construct
MFVFLVLLPLVSSQCVNLTTRTQLPPAYTNSFTRGVYYPDKVFRSSVLHSTQDLFLPFFSNVTWFHAIHVSGTNGTKRFDNPVLPFNDGVYFASTEKSNIIRGWIFGTTLDSKTQSLLIVNNATNVVIKVCEFQFCNDPFLGVYYHKNNKSWMESEFRVYSSANNCTFEYVSQPFLMDLEGKQGNFKNLREFVFKNIDGYFKIYSKHTPINLVRDLPQGFWALEPLVDLPIGINITRFQTLLALHRSYLTPGDSSSGWTAGAAAYYVGYLQPRTFLLKYNENGTITDAVDCALDPLSETKCTLKSFTVEKGIYQTSNFRVQPTESIVRFPNITNLCPFGEVFNATRFASVYAWNRKRISNCVADYSVLYNSASFSTFKCYGVSPTKLNDLCFTNVYADSFVIRGDEVRQIAPGQTGKIADYNYKLPDDFTGCVIAWNSNNLDSKVGGNYNYLYRLFRKSNLKPFERDISTEIYQAGSTPCNGVEGFNCYFPLQSYGFQPTNGVGYQPYRVVVLSFELLHAPATVCGPKKSTNLVKNKCVNFNFNGLTGTGVLTESNKKFLPFQQFGRDIADTTDAVRDPQTLEILDITPCSFGGVSVITPGTNTSNQVAVLYQDVNCTEVPVAIHADQLTPTWRVYSTGSNVFQTRAGCLIGAEHVNNSYECDIPIGAGICASYQTQTNSPRRARSVASQSIIAYTMSLGAENSVAYSNNSIAIPTNFTISVTTEILPVSMTKTSVDCTMYICGDSTECSNLLLQYGSFCTQLNRALTGIAVEQDKNTQEVFAQVKQIYKTPPIKDFGGFNFSQILPDPSKPSKRSFIEDLLFNKVTLADAGFIKQYGDCLGDIAARDLICAQKFNGLTVLPPLLTDEMIAQYTSALLAGTITSGWTFGAGAALQIPFAMQMAYRFNGIGVTQNVLYENQKLIANQFNSAIGKIQDSLSSTASALGKLQDVVNQNAQALNTLVKQLSSNFGAISSVLNDILSRLDPPEAEVQIDRLITGRLQSLQTYVTQQLIRAAEIRASANLAATKMSECVLGQSKRVDFCGKGYHLMSFPQSAPHGVVFLHVTYVPAQEKNFTTAPAICHDGKAHFPREGVFVSNGTHWFVTQRNFYEPQIITTDNTFVSGNCDVVIGIVNNTVYDPLQPELDSGGGGSDIDPYKEFGSSYQLLNFLPLDFFPDLNALVDTATALYEEELTGREHCSPHHTAIRQALVCWDELTKLIAWMSSNITSEQVRTIIVNHVNDTWGLKVRQSLWFHLSCLTFGQHTVQEFLVSFGVWIRTPAPYRPPNAPILSTLPEHTVIC

SEQ ID NO: 10762 - protein, 1301 aa, Artificial Sequence
  SARS-CoV-2/China/WF0004/2020__EPI_ISL_413694 spike protein (1-1147)(K986P_V987P) WhcAg construct
MFVFLVLLPLVSSQCVNLTTRTQLPPAYTNSFTRGVYYPDKVFRSSVLHSTQDLFLPFFSNVTWFHAIHVSGTNGTKRFDNPVLPFNDGVYFASTEKSNIIRGWIFGTTLDSKTQSLLIVNNATNVVIKVCEFQFCNDPFLGVYYHKNNKSWTESEFRVYSSANNCTFEYVSQPFLMDLEGKQGNFKNLREFVFKNIDGYFKIYSKHTPINLVRDLPQGFSALEPLVDLPIGINITRFQTLLALHRSYLTPGDSSSGWTAGAAAYYVGYLQPRTFLLKYNENGTITDAVDCALDPLSETKCTLKSFTVEKGIYQTSNFRVQPTESIVRFPNITNLCPFGEVFNATRFASVYAWNRKRISNCVADYSVLYNSASFSTFKCYGVSPTKLNDLCFTNVYADSFVIRGDEVRQIAPGQTGKIADYNYKLPDDFTGCVIAWNSNNLDSKVGGNYNYLYRLFRKSNLKPFERDISTEIYQAGSTPCNGVEGFNCYFPLQSYGFQPTNGVGYQPYRVVVLSFELLHAPATVCGPKKSTNLVKNKCVNFNFNGLTGTGVLTESNKKFLPFQQFGRDIADTTDAVRDPQTLEILDITPCSFGGVSVITPGTNTSNQVAVLYQDVNCTEVPVAIHADQLTPTWRVYSTGSNVFQTRAGCLIGAEHVNNSYECDIPIGAGICASYQTQTNSPRRARSVASQSIIAYTMSLGAENSVAYSNNSIAIPTNFTISVTTEILPVSMTKTSVDCTMYICGDSTECSNLLLQYGSFCTQLNRALTGIAVEQDKNTQEVFAQVKQIYKTPPIKDFGGFNFSQILPDPSKPSKRSFIEDLLFNKVTLADAGFIKQYGDCLGDIAARDLICAQKFNGLTVLPPLLTDEMIAQYTSALLAGTITSGWTFGAGAALQIPFAMQMAYRFNGIGVTQNVLYENQKLIANQFNSAIGKIQDSLSSTASALGKLQDVVNQNAQALNTLVKQLSSNFGAISSVLNDILSRLDPPEAEVQIDRLITGRLQSLQTYVTQQLIRAAEIRASANLAATKMSECVLGQSKRFDFCGKGYHLMSFPQSAPHGVVFLHVTYVPAQEKNFTTAPAICHDGKAHFPREGVFVSNGTHWFVTQRNFYEPQIITTDNTFVSGNCDVVIGIVNNTVYDPLQPELDSGGGGSDIDPYKEFGSSYQLLNFLPLDFFPDLNALVDTATALYEEELTGREHCSPHHTAIRQALVCWDELTKLIAWMSSNITSEQVRTIIVNHVNDTWGLKVRQSLWFHLSCLTFGQHTVQEFLVSFGVWIRTPAPYRPPNAPILSTLPEHTVIC

SEQ ID NO: 10763 - protein, 1301 aa, Artificial Sequence
  SARS-CoV-2/China/WF0028/2020__EPI_ISL_413791 spike protein (1-1147)(K986P_V987P) WhcAg construct
MFVFLVLLPLVSSQCVNLTTRTQLPPAYTNSFTRGVYYPDKVFRSSVLHSTQDLFLPFFSNVTWFHAIHVSGTNGTKRFDNPVLPFNDGVYFASTEKSNIIRGWIFGTTLDSKTQSLLIVNNATNVVIKVCEFQFCNDPFLGVYYHKNNKSWMESEFRVYSSANNCTFEYVSQPFLMDLEGKQGNFKNLREFVFKNIDGYFKIYSKHTPINLVRDLPQGFSALEPLVDLPIGINITRFQTLLALHRSYLTPGDSSSGWTAGAAAYYVGYLQPRTFLLKYNENGTITDAVDCALDPLSETKCTLKSFTVEKGIYQTSNFRVQPTESIVRFPNITNLCPFGEVFNATRFASVYAWNRKRISNCVADYSVLYNSASFSTFKCYGVSPTKLNDLCFTNVYADSFVIRGDEVRQIAPGQTGKIADYNYKLPDDFTGCVIAWNSNNLDSKVGGNYNYLYRLFRKSNLKPFERDISTEIYQAGSTPCNGVEGFNCYFPLQSYGFQPTNGVGYQPYRVVVLSFELLHAPATVCGPKKSTNLVKNKCVNFNFNGLTGTGVLTESNKKFLPFQQFGRDIADTTDAVRDPQTLEILDITPCSFGGVSVITPGTNTSNQVAVLYQDVNCTEVPVAIHADQLTPTWRVYSTGSNVFQTRAGCLIGAEHVNNSYECDIPIGAGICASYQTQTNSPRRARSVASQSIIAYTMSLGAENSVAYSNNSIAIPTNFTISVTTEILPVSMTKTSVDCTMYICGDSTECSNLLLQYGSFCTQLNRALTGIAVEQDKNTQEVFAQVKQIYKTPPIKDFGGFNFSQILPDPSKPSKRSFIEDLLFNKVTLADAGFIKQYGDCLGDIAARDLICAQKFNGLTVLPPLLTDEMIAQYTSALLAGTITSGWTFGAGAALQIPFAMQMAYRFNGIGVTQNVLYENQKLIANQFNSAIGKIQDSLSSTASALGKLQDVVNQNAQALNTLVKQLSSNFGAISSVLNDILSRLDPPEAEVQIDRLITGRLQSLQTYVTQQLIRAAEIRASANLAATKMSECVLGQSKRVDFCGKGYHLMSFPQSAPHGVVFLHVTYVPAQEKNFTTAPAICHDGKAHFPREGVFVSNGTHWFVTQRNFYEPQIITTDNTFVSGNCDVVIGIVNNTVYDPLQPELESGGGGSDIDPYKEFGSSYQLLNFLPLDFFPDLNALVDTATALYEEELTGREHCSPHHTAIRQALVCWDELTKLIAWMSSNITSEQVRTIIVNHVNDTWGLKVRQSLWFHLSCLTFGQHTVQEFLVSFGVWIRTPAPYRPPNAPILSTLPEHTVIC

SEQ ID NO: 10764 - protein, 1301 aa, Artificial Sequence
  SARS-CoV-2/2019-nCoV/USA-CruiseA-18/2020__MT159716.1 spike protein (1-1147)(K986P_V987P) WhcAg construct
MFVFLVLLPLVSSQCVNLTTRTQLPPAYTNSFTRGVYYPDKVFRSSVLHSTQDLFLPFFSNVTWFHAIHVSGTNGTKRFDNPVLPFNDGVYFASTEKSNIIRGWIFGTTLDSKTQSLLIVNNATNVVIKVCEFQFCNDPFLGVYYHKNNKSWMESELRVYSSANNCTFEYVSQPFLMDLEGKQGNFKNLREFVFKNIDGYFKIYSKHTPINLVRDLPQGFSALEPLVDLPIGINITRFQTLLALHRSYLTPGDSSSGWTAGAAAYYVGYLQPRTFLLKYNENGTITDAVDCALDPLSETKCTLKSFTVEKGIYQTSNFRVQPTESIVRFPNITNLCPFGEVFNATRFASVYAWNRKRISNCVADYSVLYNSASFSTFKCYGVSPTKLNDLCFTNVYADSFVIRGDEVRQIAPGQTGKIADYNYKLPDDFTGCVIAWNSNNLDSKVGGNYNYLYRLFRKSNLKPFERDISTEIYQAGSTPCNGVEGFNCYFPLQSYGFQPTNGVGYQPYRVVVLSFELLHAPATVCGPKKSTNLVKNKCVNFNFNGLTGTGVLTESNKKFLPFQQFGRDIADTTDAVRDPQTLEILDITPCSFGGVSVITPGTNTSNQVAVLYQDVNCTEVPVAIHADQLTPTWRVYSTGSNVFQTRAGCLIGAEHVNNSYECDIPIGAGICASYQTQTNSPRRARSVASQSIIAYTMSLGAENSVAYSNNSIAIPTNFTISVTTEILPVSMTKTSVDCTMYICGDSTECSNLLLQYGSFCTQLNRALTGIAVEQDKNTQEVFAQVKQIYKTPPIKDFGGFNFSQILPDPSKPSKRSFIEDLLFNKVTLADAGFIKQYGDCLGDIAARDLICAQKFNGLTVLPPLLTDEMIAQYTSALLAGTITSGWTFGAGAALQIPFAMQMAYRFNGIGVTQNVLYENQKLIANQFNSAIGKIQDSLSSTASALGKLQDVVNQNAQALNTLVKQLSSNFGAISSVLNDILSRLDPPEAEVQIDRLITGRLQSLQTYVTQQLIRAAEIRASANLAATKMSECVLGQSKRVDFCGKGYHLMSFPQSAPHGVVFLHVTYVPAQEKNFTTAPAICHDGKAHFPREGVFVSNGTHWFVTQRNFYEPQIITTDNTFVSGNCDVVIGIVNNTVYDPLQPELDSGGGGSDIDPYKEFGSSYQLLNFLPLDFFPDLNALVDTATALYEEELTGREHCSPHHTAIRQALVCWDELTKLIAWMSSNITSEQVRTIIVNHVNDTWGLKVRQSLWFHLSCLTFGQHTVQEFLVSFGVWIRTPAPYRPPNAPILSTLPEHTVIC

SEQ ID NO: 10765 - protein, 1301 aa, Artificial Sequence
  SARS-CoV-2/SARS-CoV-2/Yunnan-01/human/2020/CHN__MT049951.1 spike protein (1-1147)(K986P_V987P) WhcAg construct
MFVFLVLLPLVSSQCVNLTTRTQLPPANTNSFTRGVYYPDKVFRSSVLHSTQDLFLPFFSNVTWFHAIHVSGTNGTKRFDNPVLPFNDGVYFASTEKSNIIRGWIFGTTLDSKTQSLLIVNNATNVVIKVCEFQFCNDPFLGVYYHKNNKSWMESEFRVYSSANNCTFEYVSQPFLMDLEGKQGNFKNLREFVFKNIDGYFKIYSKHTPINLVRDLPQGFSALEPLVDLPIGINITRFQTLLALHRSYLTPGDSSSGWTAGAAAYYVGYLQPRTFLLKYNENGTITDAVDCALDPLSETKCTLKSFTVEKGIYQTSNFRVQPTESIVRFPNITNLCPFGEVFNATRFASVYAWNRKRISNCVADYSVLYNSASFSTFKCYGVSPTKLNDLCFTNVYADSFVIRGDEVRQIAPGQTGKIADYNYKLPDDFTGCVIAWNSNNLDSKVGGNYNYLYRLFRKSNLKPFERDISTEIYQAGSTPCNGVEGFNCYFPLQSYGFQPTNGVGYQPYRVVVLSFELLHAPATVCGPKKSTNLVKNKCVNFNFNGLTGTGVLTESNKKFLPFQQFGRDIADTTDAVRDPQTLEILDITPCSFGGVSVITPGTNTSNQVAVLYQDVNCTEVPVAIHADQLTPTWRVYSTGSNVFQTRAGCLIGAEHVNNSYECDIPIGAGICASYQTQTNSPRRARSVASQSIIAYTMSLGAENSVAYSNNSIAIPTNFTISVTTEILPVSMTKTSVDCTMYICGDSTECSNLLLQYGSFCTQLNRALTGIAVEQDKNTQEVFAQVKQIYKTPPIKDFGGFNFSQILPDPSKPSKRSFIEDLLFNKVTLADAGFIKQYGDCLGDIAARDLICAQKFNGLTVLPPLLTDEMIAQYTSALLAGTITSGWTFGAGAALQIPFAMQMAYRFNGIGVTQNVLYENQKLIANQFNSAIGKIQDSLSSTASALGKLQDVVNQNAQALNTLVKQLSSNFGAISSVLNDILSRLDPPEAEVQIDRLITGRLQSLQTYVTQQLIRAAEIRASANLAATKMSECVLGQSKRVDFCGKGYHLMSFPQSAPHGVVFLHVTYVPAQEKNFTTAPAICHDGKAHFPREGVFVSNGTHWFVTQRNFYEPQIITTDNTFVSGNCDVVIGIVNNTVYDPLQPELDSGGGGSDIDPYKEFGSSYQLLNFLPLDFFPDLNALVDTATALYEEELTGREHCSPHHTAIRQALVCWDELTKLIAWMSSNITSEQVRTIIVNHVNDTWGLKVRQSLWFHLSCLTFGQHTVQEFLVSFGVWIRTPAPYRPPNAPILSTLPEHTVIC

SEQ ID NO: 10766 - protein, 1301 aa, Artificial Sequence
  SARS-CoV-2/USA/WA-UW292/2020__EPI_ISL_418077 spike protein (1-1147)(K986P_V987P) WhcAg construct
MFVFLVLLPLVSSQCVNLTTRTQLPPAYTNSFTRGVYYPDKVFRSSVLHSTQDLFLPFFSNVTWFHAIHVSGTNGTKRFDNPVLPFNDGVYFASTEKSNIIRGWIFGTTLDSKTQSLLIVNNATNVVIKVCEFQFCNDPFLGVYYHKNNKSWMESEFRVYSSANNCTFEYVSQPFLMDLEGKQGNFKNLREFVFKNIDGYFKIYSKHTPINLVRDLPQGFSALEPLVDLPIGINITRFQTLLALHRSYLTPGDSSSGWTAGAAAYYVGYLQPRTFLLKYNENGTITDAVDCALDPLSETKCTLKSFTVEKGIYQTSNFRVQPTESIVRFPNITNLCPFGEVFNATRFASVYAWNRKRISNCVADYSVLYNSASFSTFKCYGVSPTKLNDLCFTNVYADSFVIRGDEVRQIAPGQTGKIADYNYKLPDDFTGCVIAWNSNNLDSKVGGNYNYLYRLFRKSNLKPFERDISTEIYQASSTPCNGVEGFNCYFPLQSYGFQPTNGVGYQPYRVVVLSFELLHAPATVCGPKKSTNLVKNKCVNFNFNGLTGTGVLTESNKKFLPFQQFGRDIADTTDAVRDPQTLEILDITPCSFGGVSVITPGTNTSNQVAVLYQDVNCTEVPVAIHADQLTPTWRVYSTGSNVFQTRAGCLIGAEHVNNSYECDIPIGAGICASYQTQTNSPRRARSVASQSIIAYTMSLGAENSVAYSNNSIAIPTNFTISVTTEILPVSMTKTSVDCTMYICGDSTECSNLLLQYGSFCTQLNRALTGIAVEQDKNTQEVFAQVKQIYKTPPIKDFGGFNFSQILPDPSKPSKRSFIEDLLFNKVTLADAGFIKQYGDCLGDIAARDLICAQKFNGLTVLPPLLTDEMIAQYTSALLAGTITSGWTFGAGAALQIPFAMQMAYRFNGIGVTQNVLYENQKLIANQFNSAIGKIQDSLSSTASALGKLQDVVNQNAQALNTLVKQLSSNFGAISSVLNDILSRLDPPEAEVQIDRLITGRLQSLQTYVTQQLIRAAEIRASANLAATKMSECVLGQSKRVDFCGKGYHLMSFPQSAPHGVVFLHVTYVPAQEKNFTTAPAICHDGKAHFPREGVFVSNGTHWFVTQRNFYEPQIITTDNTFVSGNCDVVIGIVNNTVYDPLQPELDSGGGGSDIDPYKEFGSSYQLLNFLPLDFFPDLNALVDTATALYEEELTGREHCSPHHTAIRQALVCWDELTKLIAWMSSNITSEQVRTIIVNHVNDTWGLKVRQSLWFHLSCLTFGQHTVQEFLVSFGVWIRTPAPYRPPNAPILSTLPEHTVIC

SEQ ID NO: 10767 - protein, 1301 aa, Artificial Sequence
  SARS-CoV-2/Iceland/192/2020__EPI_ISL_417819 spike protein (1-1147)(K986P_V987P) WhcAg construct
MFVFFVLLPLVSSQCVNLTTRTQLPPAYTNSFTRGVYYPDKVFRSSVLHSTQDLFLPFFSNVTWFHAIHVSGTNGTKRFDNPVLPFNDGVYFASTEKSNIIRGWIFGTTLDSKTQSLLIVNNATNVVIKVCEFQFCNDPFLGVYYHKNNKSWMESEFRVYSSANNCTFEYVSQPFLMDLEGKQGNFKNLREFVFKNIDGYFKIYSKHTPINLVRDLPQGFSALEPLVDLPIGINITRFQTLLALHRSYLTPGDSSSGWTAGAAAYYVGYLQPRTFLLKYNENGTITDAVDCALDPLSETKCTLKSFTVEKGIYQTSNFRVQPTESIVRFPNITNLCPFGEVFNATRFASVYAWNRKRISNCVADYSVLYNSASFSTFKCYGVSPTKLNDLCFTNVYADSFVIRGDEVRQIAPGQTGKIADYNYKLPDDFTGCVIAWNSNNLDSKVGGNYNYLYRLFRKSNLKPFERDISTEIYQAGSTPCNGVEGFNCYFPLQSYGFQPTNGVGYQPYRVVVLSFELLHAPATVCGPKKSTNLVKNKCVNFNFNGLTGTGVLTESNKKFLPFQQFGRDIADTTDAVRDPQTLEILDITPCSFGGVSVITPGTNTSNQVAVLYQGVNCTEVPVAIHADQLTPTWRVYSTGSNVFQTRAGCLIGAEHVNNSYECDIPIGAGICASYQTQTNSPRRARSVASQSIIAYTMSLGAENSVAYSNNSIAIPTNFTISVTTEILPVSMTKTSVDCTMYICGDSTECSNLLLQYGSFCTQLNRALTGIAVEQDKNTQEVFAQVKQIYKTPPIKDFGGFNFSQILPDPSKPSKRSFIEDLLFNKVTLADAGFIKQYGDCLGDIAARDLICAQKFNGLTVLPPLLTDEMIAQYTSALLAGTITSGWTFGAGAALQIPFAMQMAYRFNGIGVTQNVLYENQKLIANQFNSAIGKIQDSLSSTASALGKLQDVVNQNAQALNTLVKQLSSNFGAISSVLNDILSRLDPPEAEVQIDRLITGRLQSLQTYVTQQLIRAAEIRASANLAATKMSECVLGQSKRVDFCGKGYHLMSFPQSAPHGVVFLHVTYVPAQEKNFTTAPAICHDGKAHFPREGVFVSNGTHWFVTQRNFYEPQIITTDNTFVSGNCDVVIGIVNNTVYDPLQPELDSGGGGSDIDPYKEFGSSYQLLNFLPLDFFPDLNALVDTATALYEEELTGREHCSPHHTAIRQALVCWDELTKLIAWMSSNITSEQVRTIIVNHVNDTWGLKVRQSLWFHLSCLTFGQHTVQEFLVSFGVWIRTPAPYRPPNAPILSTLPEHTVIC

SEQ ID NO: 10768 - protein, 1301 aa, Artificial Sequence
  SARS-CoV-2/Belgium/ULG-6939/2020__EPI_ISL_417020 spike protein (1-1147)(K986P_V987P) WhcAg construct
MFVFLVLLPLVSSQCVNLTTRTQLPPAYTNSFTRGVYYPDKVFRSSVLHSTQDLFLPFFSNVTWFHAIHVSGTNGTKRFDNPVLPFNDGVYFASTEKSNIIRGWIFGTTLDSKTQSLLIVNNATNVVIKVCEFQFCNDPFLGVYYHKNNKSWMESEFRVYSSANNCTFEYVSQPFLMDLEGKQGNFKNLREFVFKNIDGYFKIYSKHTPINLVRDLPQGFSALEPLVDLPIGINITRFQTLLALHRSYLTPGDSSSGWTAGAAAYYVGYLQPRTFLLKYNENGTITDAVDCALDPLSETKCTLKSFTVEKGIYQTSNFRVQPTESIVRFPNITNLCPFGEVFNATRFASVYAWNRKRISNCVADYSVLYNSASFSTFKCYGVSPTKLNDLCFTNVYADSFVIRGDEVRQIAPGQTGKIADYNYKLPDDFTGCVIAWNSNNLDSKVGGNYNYLYRLFRKSNLKPFERDISTEIYQAGSTPCNGVEGFNCYFPLQSYGFQPTNGVGYQPYRVVVLSFELLHAPATVCGPKKSTNLVKNKCVNFNFNGLTGTGVLTESNKKFLPFQQFGRDIADTTDAVRDPQTLEILDITPCSFGGVSVITPGTNTSNQVAVLYQGVNCTEVPVAIHADQLTPTWRVYSTGSNVFQTRAGCLIGAEHVNNSYECDIPIGAGICASYQTQTNSPRRARSVASQSIIAYTMSLGAENSVVYSNNSIAIPTNFTISVTTEILPVSMTKTSVDCTMYICGDSTECSNLLLQYGSFCTQLNRALTGIAVEQDKNTQEVFAQVKQIYKTPPIKDFGGFNFSQILPDPSKPSKRSFIEDLLFNKVTLADAGFIKQYGDCLGDIAARDLICAQKFNGLTVLPPLLTDEMIAQYTSALLAGTITSGWTFGAGAALQIPFAMQMAYRFNGIGVTQNVLYENQKLIANQFNSAIGKIQDSLSSTASALGKLQDVVNQNAQALNTLVKQLSSNFGAISSVLNDILSRLDPPEAEVQIDRLITGRLQSLQTYVTQQLIRAAEIRASANLAATKMSECVLGQSKRVDFCGKGYHLMSFPQSAPHGVVFLHVTYVPAQEKNFTTAPAICHDGKAHFPREGVFVSNGTHWFVTQRNFYEPQIITTDNTFVSGNCDVVIGIVNNTVYDPLQPELDSGGGGSDIDPYKEFGSSYQLLNFLPLDFFPDLNALVDTATALYEEELTGREHCSPHHTAIRQALVCWDELTKLIAWMSSNITSEQVRTIIVNHVNDTWGLKVRQSLWFHLSCLTFGQHTVQEFLVSFGVWIRTPAPYRPPNAPILSTLPEHTVIC

SEQ ID NO: 10769 - protein, 1301 aa, Artificial Sequence
  SARS-CoV-2/France/HF2496/2020__EPI_ISL_418231 spike protein (1-1147)(K986P_V987P) WhcAg construct
MFVFLVLLPLVSSQCVNLTTRTQLPPAYTNSFTRGVYYPDKVFRSSVLHSTQDLFLPFFSNVTWFHAIHVSGTNGTKRFDNPVLPFNDGVYFASTEKSNIIRGWIFGTTLDSKTQSLLIVNNATNVVIKVCEFQFCNDPFLGVYYHKNNKSWMESEFRVYSSANNCTFEYVSQPFLMDLEGKQGNFKNLREFVFKNIDGYFKIYSKHTPINLVRDLPQGFSALEPLVDLPIGINITRFQTLLALHRSYLTPGDSSSGWTAGAAAYYVGYLQPRTFLLKYNENGTITDAVDCALDPLSETKCTLKSFTVEKGIYQTSNFRVQPTESIVRFPNITNLCPFGEVFNATRFASVYAWNRKRISNCVADYSVLYNSASFSTFKCYGVSPTKLNDLCFTNVYADSFVIRGDEVRQIAPGQTGKIADYNYKLPDDFTGCVIAWNSNNLDSKVGGNYNYLYRLFRKSNLKPFERDISTEIYQAGSTPCNGVEGFNCYFPLQSYGFQPTNGVGYQPYRVVVLSFELLHAPATVCGPKKSTNLVKNKCVNFNFNGLTGTGVLTESNKKFLPFQQFGRDIADTTDAVRDPQTLEILDITPCSFGGVSVITPGTNTSNQVAVLYQGVNCTEVPVAIHADQLTPTWRVYSTGSNVFQTRAGCLIGAEHVNNSYECDIPIGAGICASYQTQTNSPRRARSVASQSIIAYTMSLGAENSVAYSNNSIAIPTNFTISVTTEILPVSMTKTSVDCTMYICGDSTECSNLLLQYGSFCTQLNRALTGIAVEQDKNTQEVFAQVKQIYKTPPIKDFGGFNFSQILPDPSKPSKRSFIEDLLFNKVTLADAGFIKQYGDCLGDIVARDLICAQKFNGLTVLPPLLTDEMIAQYTSALLAGTITSGWTFGAGAALQIPFAMQMAYRFNGIGVTQNVLYENQKLIANQFNSAIGKIQDSLSSTASALGKLQDVVNQNAQALNTLVKQLSSNFGAISSVLNDILSRLDPPEAEVQIDRLITGRLQSLQTYVTQQLIRAAEIRASANLAATKMSECVLGQSKRVDFCGKGYHLMSFPQSAPHGVVFLHVTYVPAQEKNFTTAPAICHDGKAHFPREGVFVSNGTHWFVTQRNFYEPQIITTDNTFVSGNCDVVIGIVNNTVYDPLQPELDSGGGGSDIDPYKEFGSSYQLLNFLPLDFFPDLNALVDTATALYEEELTGREHCSPHHTAIRQALVCWDELTKLIAWMSSNITSEQVRTIIVNHVNDTWGLKVRQSLWFHLSCLTFGQHTVQEFLVSFGVWIRTPAPYRPPNAPILSTLPEHTVIC

SEQ ID NO: 10770 - protein, 1301 aa, Artificial Sequence
  SARS-CoV-2/USA/WA-UW291/2020__EPI_ISL_418076 spike protein (1-1147)(K986P_V987P) WhcAg construct
MFVFLVLLPLVSSQCVNLTTRTQLPPAYTNSFTRGVYYPDKVFRSSVLHSTQDLFLPFFSNVTWFHAIHVSGTNGTKRFDNPVLPFNDGVYFASTEKSNIIRGWIFGTTLDSKTQSLLIVNNATNVVIKVCEFQFCNDPFLGVYYHKNNKSWMESEFRVYSSANNCTFEYVSQPFLMDLEGKQGNFKNLREFVFKNIDGYFKIYSKHTPINLVRDLPQGFSALEPLVDLPIGINITRFQTLLALHRSYLTPGDSSSGWTAGAAAYYVGYLQPRTFLLKYNENGTITDAVDCALDPLSETKCTLKSFTVEKGIYQTSNFRVQPTESIVRFPNITNLCPFGEVFNATRFASVYAWNRKRISNCVADYSVLYNSASFSTFKCYGVSPTKLNDLCFTNVYADSFVIRGDEVRQIAPGQTGKIADYNYKLPDDFTGCVIAWNSNNLDSKVGGNYNYLYRLFRKSNLKPFERDISTEIYQAGSTPCNGVEGFNCYFPLQSYGFQPTNGVGYQPYRVVVLSFELLHAPATVCGPKKSTNLVKNKCVNFNFNGLTGTGVLTESNKKFLPFQQFGRDIADTTDAVRDPQTLEILDITPCSFGGVSVITPGTNTSNQVAVLYQGVNCTEVPVAIHADQLTPTWRVYSTGSNVFQTRAGCLIGAEHVNNSYECDIPIGAGICASYQTQTNSPRRARSVASQSIIAYTMSLGAENSVAYSNNSIAIPTNFTISVTTEILPVSMTKTSVDCTMYICGDSTECSNLLLQYGSFCTQLNRALTGIAVEQDKNTQEVFAQVKQIYKTPPIKDFGGFNFSQILPDPSKPSKRSFIEDLLFNKVTLADAGFIKQYGDCLGDIAARDLICAQKFNGLTVLPPLLTDEMIAQYTSALLAGTITSGWTFGAGAALQIPFAMQMAYRFNGIGVTQNVLYENQKLIANQFNSAIGKIQYSLSSTASALGKLQDVVNQNAQALNTLVKQLSSNFGAISSVLNDILSRLDPPEAEVQIDRLITGRLQSLQTYVTQQLIRAAEIRASANLAATKMSECVLGQSKRVDFCGKGYHLMSFPQSAPHGVVFLHVTYVPAQEKNFTTAPAICHDGKAHFPREGVFVSNGTHWFVTQRNFYEPQIITTDNTFVSGNCDVVIGIVNNTVYDPLQPELDSGGGGSDIDPYKEFGSSYQLLNFLPLDFFPDLNALVDTATALYEEELTGREHCSPHHTAIRQALVCWDELTKLIAWMSSNITSEQVRTIIVNHVNDTWGLKVRQSLWFHLSCLTFGQHTVQEFLVSFGVWIRTPAPYRPPNAPILSTLPEHTVIC

SEQ ID NO: 10771 - protein, 1301 aa, Artificial Sequence; identical to SEQ ID NO: 10734
  SARS-CoV-2/Portugal/PT0034/2020__EPI_ISL_418019 spike protein (1-1147)(K986P_V987P) WhcAg construct

SEQ ID NO: 10772 - protein, 1301 aa, Artificial Sequence; identical to SEQ ID NO: 10726
  SARS-CoV-2/Iceland/202/2020__EPI_ISL_417750 spike protein (1-1147)(K986P_V987P) WhcAg construct

SEQ ID NO: 10773 - protein, 1301 aa, Artificial Sequence
  SARS-CoV-2/USA/WA-UW261/2020__EPI_ISL_418046 spike protein (1-1147)(K986P_V987P) WhcAg construct
MFVFLVLLPLVSSQCVNLTTRTQLPPAYTNSFTRGVYYPDKVFRSSVLHSTQDLFLPFFSNVTWFHAIHVSGTNGTKRFDNPVLPFNDGVYFASTEKSNIIRGWIFGTTLDSKTQSLLIVNNATNVVIKVCEFQFCNDPFLGVYYHKNNKSWMESEFRVYSSANNCTFEYVSQPFLMDLEGKQGNFKNLREFVFKNIDGYFKIYSKHTPINLVRDLPQGFSALEPLVDLPIGINITRFQTLLALHRSYLTPGDSSSGWTAGAAAYYVGYLQPRTFLLKYNENGTITDAVDCALDPLSETKCTLKSFTVEKGIYQTSNFRVQPTESIVRFPNITNLCPFGEVFNATRFTSVYAWNRKRISNCVADYSVLYNSASFSTFKCYGVSPTKLNDLCFTNVYADSFVIRGDEVRQIAPGQTGKIADYNYKLPDDFTGCVIAWNSNNLDSKVGGNYNYLYRLFRKSNLKPFERDISTEIYQAGSTPCNGVEGFNCYFPLQSYGFQPTNGVGYQPYRVVVLSFELLHAPATVCGPKKSTNLVKNKCVNFNFNGLTGTGVLTESNKKFLPFQQFGRDIADTTDAVRDPQTLEILDITPCSFGGVSVITPGTNTSNQVAVLYQDVNCTEVPVAIHADQLTPTWRVYSTGSNVFQTRAGCLIGAEHVNNSYECDIPIGAGICASYQTQTNSPRRARSVASQSIIAYTMSLGAENSVAYSNNSIAIPTNFTISVTTEILPVSMTKTSVDCTMYICGDSTECSNLLLQYGSFCTQLNRALTGIAVEQDKNTQEVFAQVKQIYKTPPIKDFGGFNFSQILPDPSKPSKRSFIEDLLFNKVTLADAGFIKQYGDCLGDIAARDLICAQKFNGLTVLPPLLTDEMIAQYTSALLAGTITSGWTFGAGAALQIPFAMQMAYRFNGIGVTQNVLYENQKLIANQFNSAIGKIQDSLSSTASALGKLQDVVNQNAQALNTLVKQLSSNFGAISSVLNDILSRLDPPEAEVQIDRLITGRLQSLQTYVTQQLIRAAEIRASANLAATKMSECVLGQSKRVDFCGKGYHLMSFPQSAPHGVVFLHVTYVPAQEKNFTTAPAICHDGKAHFPREGVFVSNGTHWFVTQRNFYEPQIITTDNTFVSGNCDVVIGIVNNTVYDPLQPELDSGGGGSDIDPYKEFGSSYQLLNFLPLDFFPDLNALVDTATALYEEELTGREHCSPHHTAIRQALVCWDELTKLIAWMSSNITSEQVRTIIVNHVNDTWGLKVRQSLWFHLSCLTFGQHTVQEFLVSFGVWIRTPAPYRPPNAPILSTLPEHTVIC

SEQ ID NO: 10774 - protein, 1301 aa, Artificial Sequence
  SARS-CoV-2/Portugal/PT0035/2020__EPI_ISL_418020 spike protein (1-1147)(K986P_V987P) WhcAg construct
MFVFLVLLPLVSSQCVNLTTRTQLPPAYTNSFTRGVYYPDKVFRSSVLHSTQDLFLPFFSNVTWFHAIHVSGTNGTKRFDNPVLPFNDGVYFASTEKSNIIRGWIFGTTLDSKTQSLLIVNNATNVVIKVCEFQFCNDPFLGVYYHKNNKSWMESEFRVYSSANNCTFEYVSQPFLMDLEGKQGNFKNLREFVFKNIDGYFKIYSKHTPINLVRDLPQGFSALEPLVDLPIGINITRFQTLLALHRSYLTPGDSSSGWTAGAAAYYVGYLQPRTFLLKYNENGTITDAVDCALDPLSETKCTLKSFTVEKGIYQTSNFRVQPTESIVRFPNITNLCPFGEVFNATRFASVYAWNRKRISNCVADYSVLYNSASFSTFKCYGVSPTKLNDLCFTNVYADSFVIRGDEVRQIAPGQTGKIADYNYKLPDDFTGCVIAWNSNNLDSKVGGNYNYLYRLFRKSNLKPFERDISTEIYQAGSTPCNGVEGFNCYFPLQSYGFQPTNGVGYQPYRVVVLSFELLHAPATVCGPKKSTNLVKNKCVNFNFNGLTGTGVLTESNKKFLPFQQFGRDIADTTDAVRDPQTLEILDITPCSFGGVSVITPGTNTSNQVAVLYQDVNCTEVPVAIHADQLTPTWRVYSTGSNVFQTRAGCLIGAEHVNNSYECDIPIGAGICASYQTQTNSPRRARSVASQSIIAYTMSLGAENSVAYSNNSIAIPTNFTISVTTEILPVSMTKTSVDCTMYICGDSTECSNLLLQYGSFCTQLNRALTGIAVEQDKNTQEVFAQVKQIYKTPPIKDFGGFNFSQILPDPSKPSKRSFIEDLLFNKVTLADAGFIKQYGDCLGDISARDLICAQKFNGLTVLPPLLTDEMIAQYTSALLAGTITSGWTFGAGAALQIPFAMQMAYRFNGIGVTQNVLYENQKLIANQFNSAIGKIQDSLSSTASALGKLQDVVNQNAQALNTLVKQLSSNFGAISSVLNDILSRLDPPEAEVQIDRLITGRLQSLQTYVTQQLIRAAEIRASANLAATKMSECVLGQSKRVDFCGKGYHLMSFPQSAPHGVVFLHVTYVPAQEKNFTTAPAICHDGKAHFPREGVFVSNGTHWFVTQRNFYEPQIITTDNTFVSGNCDVVIGIVNNTVYDPLQPELDSGGGGSDIDPYKEFGSSYQLLNFLPLDFFPDLNALVDTATALYEEELTGREHCSPHHTAIRQALVCWDELTKLIAWMSSNITSEQVRTIIVNHVNDTWGLKVRQSLWFHLSCLTFGQHTVQEFLVSFGVWIRTPAPYRPPNAPILSTLPEHTVIC

SEQ ID NO: 10775 - protein, 1301 aa, Artificial Sequence
  SARS-CoV-2/USA/NY-NYUMC7/2020__EPI_ISL_418192 spike protein (1-1147)(K986P_V987P) WhcAg construct
MFVFLVLLPLVSSQCVNLTTRTQLPPAYTNSFTRGVYYPDKVFRSSVLHSTQDLFLPFFSNVTWFHAIHVSGTNGTKRFDNPVLPFNDGVYFASTEKSNIIRGWIFGTTLDSKTQSLLIVNNATNVVIKVCEFQFCNDPFLGVYHHKNNKSWMESEFRVYSSANNCTFEYVSQPFLMDLEGKQGNFKNLREFVFKNIDGYFKIYSKHTPINLVRDLPQGFSALEPLVDLPIGINITRFQTLLALHRSYLTPGDSSSGWTAGAAAYYVGYLQPRTFLLKYNENGTITDAVDCALDPLSETKCTLKSFTVEKGIYQTSNFRVQPTESIVRFPNITNLCPFGEVFNATRFASVYAWNRKRISNCVADYSVLYNSASFSTFKCYGVSPTKLNDLCFTNVYADSFVIRGDEVRQIAPGQTGKIADYNYKLPDDFTGCVIAWNSNNLDSKVGGNYNYLYRLFRKSNLKPFERDISTEIYQAGSTPCNGVEGFNCYFPLQSYGFQPTNGVGYQPYRVVVLSFELLHAPATVCGPKKSTNLVKNKCVNFNFNGLTGTGVLTESNKKFLPFQQFGRDIADTTDAVRDPQTLEILDITPCSFGGVSVITPGTNTSNQVAVLYQGVNCTEVPVAIHADQLTPTWRVYSTGSNVFQTRAGCLIGAEHVNNSYECDIPIGAGICASYQTQTNSPRRARSVASQSIIAYTMSLGAENSVAYSNNSIAIPTNFTISVTTEILPVSMTKTSVDCTMYICGDSTECSNLLLQYGSFCTQLNRALTGIAVEQDKNTQEVFAQVKQIYKTPPIKDFGGFNFSQILPDPSKPSKRSFIEDLLFNKVTLADAGFIKQYGDCLGDIAARDLICAQKFNGLTVLPPLLTDEMIAQYTSALLAGTITSGWTFGAGAALQIPFAMQMAYRFNGIGVTQNVLYENQKLIANQFNSAIGKIQDSLSSTASALGKLQDVVNQNAQALNTLVKQLSSNFGAISSVLNDILSRLDPPEAEVQIDRLITGRLQSLQTYVTQQLIRAAEIRASANLAATKMSECVLGQSKRVDFCGKGYHLMSFPQSAPHGVVFLHVTYVPAQEKNFTTAPAICHDGKAHFPREGVFVSNGTHWFVTQRNFYEPQIITTDNTFVSGNCDVVIGIVNNTVYDPLQPELDSGGGGSDIDPYKEFGSSYQLLNFLPLDFFPDLNALVDTATALYEEELTGREHCSPHHTAIRQALVCWDELTKLIAWMSSNITSEQVRTIIVNHVNDTWGLKVRQSLWFHLSCLTFGQHTVQEFLVSFGVWIRTPAPYRPPNAPILSTLPEHTVIC

SEQ ID NO: 10776 - protein, 1301 aa, Artificial Sequence
  SARS-CoV-2/Iceland/189/2020__EPI_ISL_417709 spike protein (1-1147)(K986P_V987P) WhcAg construct
MFVFLVLLPLVSSQCVNLTTRTQLPPAYTNSFTRGVYYPDKVFRSSVLHSTQDLFLPFFSNVTWFHAIHVSGTNGTKRFDNPVLPFNDGVYFASTEKSNIIRGWIFGTTLDSKTQSLLIVNNATNVVIKVCEFQFCNDPFLGVYYHKNNKSWMESEFRVYSSANNCTFEYVSQPFLMDLEGKQGNFKNLREFVFKNIDGYFKIYSKHTPINLVRDLPQGFSALEPLVDLPIGINITRFQTLLALHRSYLTPGDSSSGWTAGAAAYYVGYLQPRTFLLKYNENGTITDAVDCALDPLSETKCTLKSFTVEKGIYQTSNFRVQPTESIVRFPNITNLCPFGEVFNATRFASVYAWNRKRISNCVADYSVLYNSASFSTFKCYGVSPTKLNDLCFTNVYADSFVIRGDEVRQIAPGQTGKIADYNYKLPDDFTGCVIAWNSNNLDSKVGGNYNYLYRLFRKSNLKPFERDISTEIYQAGSTPCNGVEGFNCYFPLQSYGFQPTNGVGYQPYRVVVLSFELLHAPATVCGPKKSTNLVKNKCVNFNFNGLTGTGVLTESNKKFLPFQQFGRDIADTTDAVRDPQTLEILDITPCSFGGVSVITPGTNTSNQVAVLYQGVNCTEVPVAIHADQLTPTWRVYSTGSNVFQTRAGCLIGAEHVNNSYECDIPIGAGICASYQTQTNSPRRARSVASQSIIAYTMSLGAENSVAYSNNSIAIPTNFTISVTTEILPVSMTKTSVDCTMYICGDSTECSNLLLQYGSFCTQLNRALTGIAVEQDKNTQEVFAQVKQIYKTPPIKDFGGFNFSQILPDPSKPSKRSFIEDLLFNKVTLADAGFTKQYGDCLGDIAARDLICAQKFNGLTVLPPLLTDEMIAQYTSALLAGTITSGWTFGAGAALQIPFAMQMAYRFNGIGVTQNVLYENQKLIANQFNSAIGKIQDSLSSTASALGKLQDVVNQNAQALNTLVKQLSSNFGAISSVLNDILSRLDPPEAEVQIDRLITGRLQSLQTYVTQQLIRAAEIRASANLAATKMSECVLGQSKRVDFCGKGYHLMSFPQSAPHGVVFLHVTYVPAQEKNFTTAPAICHDGKAHFPREGVFVSNGTHWFVTQRNFYEPQIITTDNTFVSGNCDVVIGIVNNTVYDPLQPELDSGGGGSDIDPYKEFGSSYQLLNFLPLDFFPDLNALVDTATALYEEELTGREHCSPHHTAIRQALVCWDELTKLIAWMSSNITSEQVRTIIVNHVNDTWGLKVRQSLWFHLSCLTFGQHTVQEFLVSFGVWIRTPAPYRPPNAPILSTLPEHTVIC

SEQ ID NO: 10777 - protein, 1301 aa, Artificial Sequence
  SARS-CoV-2/Australia/NSW56/2020__EPI_ISL_417408 spike protein (1-1147)(K986P_V987P) WhcAg construct
MFVFLVLLPLVSSQCVNLTTRTQLPPAYTNSFTRGVYYPDKVFRSSVLHSTQDLFLPFFSNVTWFHAIHVSGTNGTKRFDNPVLPFNDGVYFASTEKSNIIRGWIFGTTLDSKTQSLLIVNNATNVVIKVCEFQFCNDPFLGVYYHKNNKSWMESEFRVYSSANNCTFEYVSQPFLMDLEGKQGNFKNLREFVFKNIDGYFKIYSKHTPINLVRDLPQGFSALEPLVDLPIGINITRFQTLLALHRSYLTPGDSSSGWTAGAAAYYVGYLQPRTFLLKYNENGTITDAVDCALDPLSETKCTLKSFTVEKGIYQTSNFRVQPTESIVRFPNITNLCPFGEVFNATRFASVYAWNRKRISNCVADYSVLYNSASFSTFKCYGVSPTKLNDLCFTNVYADSFVIRGDEVRQIAPGQTGKIADYNYKLPDDFTGCVIAWNSNNLDSKVGGNYNYLYRLFRKSNLKPFERDISTEIYQAGSTPCNGVEGFNCYFPLQSYGFQPTNGVGYQPYRVVVLSFELLHAPATVCGPKKSTNLVKNKCVNFNFNGLTGTGVLTESNKKFLPFQQFGRDIADTTDAVRDPQTLEILDITPCSFGGVSVITPGTNTSNQVAVLYQDVNCTEVPVAIHADQLTPTWRVYSTGSNVFQTRAGCLIGAEHVNNSYECDIPIGAGICASYQTQTNSPRRARSVASQSIIAYTMSLGAENSVAYSNNSIAIPTNFTISVTTEILPVSMTKTSVDCTMYICGDSTECSNLLLQYGSFCTQLNRALTGIAVEQDKNTQEVFAQVKQIYKTPPIKDFGGFNFSQILPDSSKPSKRSFIEDLLFNKVTLADAGFIKQYGDCLGDIAARDLICAQKFNGLTVLPPLLTDEMIAQYTSALLAGTITSGWTFGAGAALQIPFAMQMAYRFNGIGVTQNVLYENQKLIANQFNSAIGKIQDSLSSTASALGKLQDVVNQNAQALNTLVKQLSSNFGAISSVLNDILSRLDPPEAEVQIDRLITGRLQSLQTYVTQQLIRAAEIRASANLAATKMSECVLGQSKRVDFCGKGYHLMSFPQSAPHGVVFLHVTYVPAQEKNFTTAPAICHDGKAHFPREGVFVSNGTHWFVTQRNFYEPQIITTDNTFVSGNCDVVIGIVNNTVYDPLQPELDSGGGGSDIDPYKEFGSSYQLLNFLPLDFFPDLNALVDTATALYEEELTGREHCSPHHTAIRQALVCWDELTKLIAWMSSNITSEQVRTIIVNHVNDTWGLKVRQSLWFHLSCLTFGQHTVQEFLVSFGVWIRTPAPYRPPNAPILSTLPEHTVIC

SEQ ID NO: 10778 - protein, 1301 aa, Artificial Sequence
  SARS-CoV-2/Iceland/280/2020__EPI_ISL_417608 spike protein (1-1147)(K986P_V987P) WhcAg construct
MFVFLVLLPLVSSQCVNLTTRTQLPPAYTNSFTRGVYYPDKVFRSSVLHSTQDLFLPFFSNVTWFHAIHVSGTNGTKRFDNPVLPFNDGVYFASTEKSNIIRGWIFGTTLDSKTQSLLIVNNATNVVIKVCEFQFCNDPFLGVYYHKNNKSWMESEFRVYSSANNCTFEYVSQPFLMDLEGKQGNFKNLREFVFKNIDGYFKIYSKHTPINLVRDLPQGFSALEPLVDLPIGINITRFQTLLALHRSYLTPGDSSSGWTAGAAAYYVGYLQPRTFLLKYNENGTITDAVDCALDPLSETKCTLKSFTVEKGIYQTSNFRVQPTESIVRFPNITNLCPFGEVFNATRFASVYAWNRKRISNCVADYSVLYNSASFSTFKCYGVSPTKLNDLCFTNVYADSFVIRGDEVRQIAPGQTGKIADYNYKLPDDFTGCVIAWNSNNLDSKVGGNYNYLYRLFRKSNLKPFERDISTEIYQAGSTPCNGVEGFNCYFPLQSYGFQPTNGVGYQPYRVVVLSFELLHAPATVCGPKKSTNLVKNKCVNFNFNGLTGTGVLTESNKKFLPFQQFGRDIADTTDAVRDPQTLEILDITPCSFGGVSVITPGTNTSNQVAVLYQGVNCTEVPVAIHADQLTPTWRVYSTGSNVFQTRAGCLIGAEHVNNSYECDIPIGAGICASYHTQTNSPRRARSVASQSIIAYTMSLGAENSVAYSNNSIAIPTNFTISVTTEILPVSMTKTSVDCTMYICGDSTECSNLLLQYGSFCTQLNRALTGIAVEQDKNTQEVFAQVKQIYKTPPIKDFGGFNFSQILPDPSKPSKRSFIEDLLFNKVTLADAGFIKQYGDCLGDIAARDLICAQKFNGLTVLPPLLTDEMIAQYTSALLAGTITSGWTFGAGAALQIPFAMQMAYRFNGIGVTQNVLYENQKLIANQFNSAIGKIQDSLSSTASALGKLQDVVNQNAQALNTLVKQLSSNFGAISSVLNDILSRLDPPEAEVQIDRLITGRLQSLQTYVTQQLIRAAEIRASANLAATKMSECVLGQSKRVDFCGKGYHLMSFPQSAPHGVVFLHVTYVPAQEKNFTTAPAICHDGKAHFPREGVFVSNGTHWFVTQRNFYEPQIITTDNTFVSGNCDVVIGIVNNTVYDPLQPELDSGGGGSDIDPYKEFGSSYQLLNFLPLDFFPDLNALVDTATALYEEELTGREHCSPHHTAIRQALVCWDELTKLIAWMSSNITSEQVRTIIVNHVNDTWGLKVRQSLWFHLSCLTFGQHTVQEFLVSFGVWIRTPAPYRPPNAPILSTLPEHTVIC

SEQ ID NO: 10779 - protein, 1301 aa, Artificial Sequence; identical to SEQ ID NO: 10734
  SARS-CoV-2/Iceland/247/2020__EPI_ISL_417575 spike protein (1-1147)(K986P_V987P) WhcAg construct

SEQ ID NO: 10780 - protein, 1301 aa, Artificial Sequence
  SARS-CoV-2/Iceland/238/2020__EPI_ISL_417566 spike protein (1-1147)(K986P_V987P) WhcAg construct
MFVFLVLLPLVSSQCVNLTTRTQLPPAYTNSFTRGVYYPDKVFRSSVLHSTQDLFLPFFSNVTWFHAIHVSGTNGTKRFDNPVLPFNDGVYFASTEKSNIIRGWIFGTTLDSKTQSLLIVNNATNVVIKVCEFQFCNDPFLGVYYHKNNKSWMESEFRVYSSANNCTFEYVSQPFLMDLEGKQGNFKNLREFVFKNIDGYFKIYSKHTPINLVRDLPQGFSALEPLVDLPIGINITRFQTLLALHRSYLTPGDSSSGWTAGAAAYYVGYLQPRTFLLKYNENGTITDAVDCALDPLSETKCTLKSFTVEKGIYQTSNFRVQPTESIVRFPNITNLCPFGEVFNATRFASVYAWNRKRISNCVADYSVLYNSASFSTFKCYGVSPTKLNDLCFTNVYADSFVIRGDEVRQIAPGQTGKIADYNYKLPDDFTGCVIAWNSNNLDSKVGGNYNYLYRLFRKSNLKPFERDISTEIYQAGSTPCNGVEGFNCYFPLQSYGFQPTNGVGYQPYRVVVLSFELLHAPATVCGPKKSTNLVKNKCVNFNFNGLTGTGVLTESNKKFLPFQQFGRDIADTTDAVRDPQTLEILDITPCSFGGVSVITPGTNTSNQVAVLYQGVNCTEVPVAIHADQLTPTWRVYSTGSNVFQTRAGCLIGAEHVNNSYECDIPIGAGICASYQTQTNSPRRARSVASQSIIAYTMSLGAENSVAYSNNSIAIPTNFTISVTTEILPVSMTKTSVDCTMYICGDSTECSNLLLQYGSFCTQLNRALTGIAVEQDKNTQEVFAQVKQIYKTPPIKDFGGFNFSQILPDPSKPSKRSFIEDLLFNKVTLADVGFIKQYGDCLGDIAARDLICAQKFNGLTVLPPLLTDEMIAQYTSALLAGTITSGWTFGAGAALQIPFAMQMAYRFNGIGVTQNVLYENQKLIANQFNSAIGKIQDSLSSTASALGKLQDVVNQNAQALNTLVKQLSSNFGAISSVLNDILSRLDPPEAEVQIDRLITGRLQSLQTYVTQQLIRAAEIRASANLAATKMSECVLGQSKRVDFCGKGYHLMSFPQSAPHGVVFLHVTYVPAQEKNFTTAPAICHDGKAHFPREGVFVSNGTHWFVTQRNFYEPQIITTDNTFVSGNCDVVIGIVNNTVYDPLQPELDSGGGGSDIDPYKEFGSSYQLLNFLPLDFFPDLNALVDTATALYEEELTGREHCSPHHTAIRQALVCWDELTKLIAWMSSNITSEQVRTIIVNHVNDTWGLKVRQSLWFHLSCLTFGQHTVQEFLVSFGVWIRTPAPYRPPNAPILSTLPEHTVIC

SEQ ID NO: 10781 - protein, 1301 aa, Artificial Sequence
  SARS-CoV-2/Greece/16/2020__EPI_ISL_418265 spike protein (1-1147)(K986P_V987P) WhcAg construct
MFVFLVLLPLVSSQCVNLTTRTQLPPAYTNSFTRGVYYPDKVFRSSVLHSTQDLFLPFFSNVTWFHAIHVSGTNGTKRFDNPVLPFNDGVYFASTEKSNIIRGWIFGTTLDSKTQSLLIVNNATNVVIKVCEFQFCNDPFLGVYYHKNNKSWMESEFRVYSSANNCTFEYVSQPFLMDLEGKQGNFKNLREFVFKNVDGYFKIYSKHTPINLVRDLPQGFSALEPLVDLPIGINITRFQTLLALHRSYLTPGDSSSGWTAGAAAYYVGYLQPRTFLLKYNENGTITDAVDCALDPLSETKCTLKSFTVEKGIYQTSNFRVQPTESIVRFPNITNLCPFGEVFNATRFASVYAWNRKRISNCVADYSVLYNSASFSTFKCYGVSPTKLNDLCFTNVYADSFVIRGDEVRQIAPGQTGKIADYNYKLPDDFTGCVIAWNSNNLDSKVGGNYNYLYRLFRKSNLKPFERDISTEIYQAGSTPCNGVEGFNCYFPLQSYGFQPTNGVGYQPYRVVVLSFELLHAPATVCGPKKSTNLVKNKCVNFNFNGLTGTGVLTESNKKFLPFQQFGRDIADTTDAVRDPQTLEILDITPCSFGGVSVITPGTNTSNQVAVLYQDVNCTEVPVAIHADQLTPTWRVYSTGSNVFQTRAGCLIGAEHVNNSYECDIPIGAGICASYQTQTNSPRRARSVASQSIIAYTMSLGAENSVAYSNNSIAIPTNFTISVTTEILPVSMTKTSVDCTMYICGDSTECSNLLLQYGSFCTQLNRALTGIAVEQDKNTQEVFAQVKQIYKTPPIKDFGGFNFSQILPDPSKPSKRSFIEDLLFNKVTLADAGFIKQYGDCLGDIAARDLICAQKFNGLTVLPPLLTDEMIAQYTSALLAGTITSGWTFGAGAALQIPFAMQMAYRFNGIGVTQNVLYENQKLIANQFNSAIGKIQDSLSSTASALGKLQDVVNQNAQALNTLVKQLSSNFGAISSVLNDILSRLDPPEAEVQIDRLITGRLQSLQTYVTQQLIRAAEIRASANLAATKMSECVLGQSKRVDFCGKGYHLMSFPQSAPHGVVFLHVTYVPAQEKNFTTAPAICHDGKAHFPREGVFVSNGTHWFVTQRNFYEPQIITTDNTFVSGNCDVVIGIVNNTVYDPLQPELDSGGGGSDIDPYKEFGSSYQLLNFLPLDFFPDLNALVDTATALYEEELTGREHCSPHHTAIRQALVCWDELTKLIAWMSSNITSEQVRTIIVNHVNDTWGLKVRQSLWFHLSCLTFGQHTVQEFLVSFGVWIRTPAPYRPPNAPILSTLPEHTVIC

SEQ ID NO: 10782 - protein, 1301 aa, Artificial Sequence
  SARS-CoV-2/Iceland/319/2020__EPI_ISL_417648 spike protein (1-1147)(K986P_V987P) WhcAg construct
MFVFLVLLPLVSSQCVNLTTRTQLPPAYTNSFTRGVYYPDKVFRSSVLHSTQDLFLPFFSNVTWFHAIHVSGTNGTKRFDNPVLPFNDGVYFASTEKSNIIRGWIFGTTLDSKTQSLLIVNNATNVVIKVCEFQFCNDPFLGVYYHKNNKSWMESEFRVYSSANNCTFEYVSQPFLIDLEGKQGNFKNLREFVFKNIDGYFKIYSKHTPINLVRDLPQGFSALEPLVDLPIGINITRFQTLLALHRSYLTPGDSSSGWTAGAAAYYVGYLQPRTFLLKYNENGTITDAVDCALDPLSETKCTLKSFTVEKGIYQTSNFRVQPTESIVRFPNITNLCPFGEVFNATRFASVYAWNRKRISNCVADYSVLYNSASFSTFKCYGVSPTKLNDLCFTNVYADSFVIRGDEVRQIAPGQTGKIADYNYKLPDDFTGCVIAWNSNNLDSKVGGNYNYLYRLFRKSNLKPFERDISTEIYQAGSTPCNGVEGFNCYFPLQSYGFQPTNGVGYQPYRVVVLSFELLHAPATVCGPKKSTNLVKNKCVNFNFNGLTGTGVLTESNKKFLPFQQFGRDIADTTDAVRDPQTLEILDITPCSFGGVSVITPGTNTSNQVAVLYQGVNCTEVPVAIHADQLTPTWRVYSTGSNVFQTRAGCLIGAEHVNNSYECDIPIGAGICASYQTQTNSPRRARSVASQSIIAYTMSLGAENSVAYSNNSIAIPTNFTISVTTEILPVSMTKTSVDCTMYICGDSTECSNLLLQYGSFCTQLNRALTGIAVEQDKNTQEVFAQVKQIYKTPPIKDFGGFNFSQILPDPSKPSKRSFIEDLLFNKVTLADAGFIKQYGDCLGDIAARDLICAQKFNGLTVLPPLLTDEMIAQYTSALLAGTITSGWTFGAGAALQIPFAMQMAYRFNGIGVTQNVLYENQKLIANQFNSAIGKIQDSLSSTASALGKLQDVVNQNAQALNTLVKQLSSNFGAISSVLNDILSRLDPPEAEVQIDRLITGRLQSLQTYVTQQLIRAAEIRASANLAATKMSECVLGQSKRVDFCGKGYHLMSFPQSAPHGVVFLHVTYVPAQEKNFTTAPAICHDGKAHFPREGVFVSNGTHWFVTQRNFYEPQIITTDNTFVSGNCDVVIGIVNNTVYDPLQPELDSGGGGSDIDPYKEFGSSYQLLNFLPLDFFPDLNALVDTATALYEEELTGREHCSPHHTAIRQALVCWDELTKLIAWMSSNITSEQVRTIIVNHVNDTWGLKVRQSLWFHLSCLTFGQHTVQEFLVSFGVWIRTPAPYRPPNAPILSTLPEHTVIC

SEQ ID NO: 10783 - protein, 1301 aa, Artificial Sequence
  SARS-CoV-2/Congo/94/2020__EPI_ISL_417947 spike protein (1-1147)(K986P_V987P) WhcAg construct
MFVFLVLLPLVSSQCVNLTTRTQLPPAYTNSFTRGVYYPDKVFRSSVLHSTQDLFLPFFSNVTWFHAIHVSGTNGTKRFDNPVLPFNDGVYFASTEKSNIIRGWIFGTTLDSKTQSLLIVNNATNVVIKVCEFQFCNDPFLGVYYHKNNKSWMESEFRVYSSANNCTFEYVSQPFLMDLEGKQGNFKNLREFVFKNIDGYFKIYSKHTPINLVRDLPQGFSALEPLVDLPIGINITRFQTLLALHRSYLTPGDSSSGWTAGAAAYYVGYLQPRTFLLKYNENGTITDAVDCALDPLSETKCTLKSFTVEKGIYQTSNFRVQPTESIVRFPNITNLCPFGEVFNATRFASVYAWNRKRISNCVADYSVLYNSASFSTFKCYGVSPTKLNDLCFTNVYADSFVIRGDEVRQIAPGQTGKIADYNYKLPDDFTGCVIAWNSNNLDSKVGGNYNYLYRLFRKSNLKPFERDISTEIYQAGSTPCNGVEGFNCYFPLQSYGFQPTNGVGYQPYRVVVLSFELLHAPATVCGPKKSTNLVKNKCVNFNFNGLTGTGVLTESNKKFLPFQQFGRDIADTTDAVRDPQTLEILDITPCSFGGVSVITPGTNTSNQVAVLYQGVNCTEVPVAIHADQLTPTWRVYSTGSNVFQTRAGCLIGAEHVNNSYECDIPIGAGICASYQTQTNSPRRARSVASQSIIAYTMSLGAENSVAYSNNSIAIPTNFTISVTTEILPVSMTKTSVDCTMYICGDSTECSNLLLQYGSFCTQLNRALTGIAVEQDKNTQEVFAQVKQIYKTPPIKDFGGFNFSQILPDPSKPSKRSFIEDILFNKVTLADAGFIKQYGDCLGDIAARDLICAQKFNGLTVLPPLLTDEMIAQYTSALLAGTITSGWTFGAGAALQIPFAMQMAYRFNGIGVTQNVLYENQKLIANQFNSAIGKIQDSLSSTASALGKLQDVVNQNAQALNTLVKQLSSNFGAISSVLNDILSRLDPPEAEVQIDRLITGRLQSLQTYVTQQLIRAAEIRASANLAATKMSECVLGQSKRVDFCGKGYHLMSFPQSAPHGVVFLHVTYVPAQEKNFTTAPAICHDGKAHFPREGVFVSNGTHWFVTQRNFYEPQIITTDNTFVSGNCDVVIGIVNNTVYDPLQPELDSGGGGSDIDPYKEFGSSYQLLNFLPLDFFPDLNALVDTATALYEEELTGREHCSPHHTAIRQALVCWDELTKLIAWMSSNITSEQVRTIIVNHVNDTWGLKVRQSLWFHLSCLTFGQHTVQEFLVSFGVWIRTPAPYRPPNAPILSTLPEHTVIC

SEQ ID NO: 10784 - protein, 1301 aa, Artificial Sequence
  SARS-CoV-2/Congo/158/2020__EPI_ISL_417950 spike protein (1-1147)(K986P_V987P) WhcAg construct
MFVFLVLLPLVSSQCVNLTTRTQLPPAYTNSFTRGVYYPDKVFRSSVLHSTQDLFLPFFSNVTWFHAIHVSGTNGTKRFDNPVLPFNDGVYFASTEKSNIIRGWIFGTTLDSKTQSLLIVNNATNVVIKVCEFQFCNDPFLGVYYHKNNKSWMESEFRVYSSANNCTFEYVSQPFLMDLEGKQGNFKNLREFVFKNIDGYFKIYSKHTPINLVRDLPQGFSALEPLVDLPIGINITRFQTLLALHRSYLTPGDSSSGWTAGAAAYYVGYLQPRTFLLKYNENGTITDAVDCALDPLSETKCTLKSFTVEKGIYQTSNFRVQPTESIVRFPNITNLCPFGEVFNATRFASVYAWNRKRISNCVADYSVLYNSASFSTFKCYGVSPTKLNDLCFTNVYADSFVIRGDEVRQIAPGQTGKIADYNYKLPDDFTGCVIAWNSNNLDSKVGGNYNYLYRLFRKSNLKPFERDISTEIYQAGSTPCNGVEGFNCYFPLQSYGFQPTNGVGYQPYRVVVLSFELLHAPATVCGPKKSTNLVKNKCVNFNFNGLTGTGVLTESNKKFLPFQQFGRDIADTTDAVRDPQTLEILDITPCSFGGVSVITPGTNTSNQVAVLYQDVNCTEVPVAIHADQLTPTWRVYSTGSNVFQTRAGCLIGAEHVNNSYECDIPIGAGICASYQTQTNSPRRARSVASQSIIAYTMSLGAENSVAYSNNSIAIPTNFTISVTTEILPVSMTKTSVDCTMYICGDSTECSNLLLQYGSFCTQLNRALTGIAVEQDKNTQEVFAQVKQIYKTPPIKDFGGFNFSQILPDPSKPSKRSFIEDLLFNKVTLADAGFIKQYGDCLGDIAARDLICAQKFNGLTVLPPLLTDEMIAQYTSALLAGTITSGWTFGAGAALQIPFAMQMAYRFNGIGVTQNVLYENQKLIANQFNSAIGKIQDSLSSTASALGKLQDVVNQNAQALNTLVKQLSSNFGAISSVLNDILSRLDPPEAEVQIDRLITGRLQSLQTYVTQQLIRAAEIRASANLAATKMSECVLGQSKRVDFCGKGYHLMSFPQSAPHGVVFLHVTYVPAQEKNFTTAPAICHDGKAHFPREGVFVSNGTHWFVTQRNFYEPQIITTDNTFLSGNCDVVIGIVNNTVYDPLQPELDSGGGGSDIDPYKEFGSSYQLLNFLPLDFFPDLNALVDTATALYEEELTGREHCSPHHTAIRQALVCWDELTKLIAWMSSNITSEQVRTIIVNHVNDTWGLKVRQSLWFHLSCLTFGQHTVQEFLVSFGVWIRTPAPYRPPNAPILSTLPEHTVIC

SEQ ID NO: 10785 - protein, 1301 aa, Artificial Sequence
  SARS-CoV-2/USA/UT-00034/2020__EPI_ISL_417977 spike protein (1-1147)(K986P_V987P) WhcAg construct
MFVFLVLLPLVSSQCVNLTTRTQLPPAYTNSFTRGVYYPDKVFRSSVLHSTQDLFLPFFSNVTWFHAIHVSGTNGTKRFDNPVLPFNDGVYFASTEKSNIIRGWIFGTTLDSKTQSLLIVNNATNVVIKVCEFQFCNDPFLGVYYYKNNKSWMESEFRVYSSANNCTFEYVSQPFLMDLEGKQGNFKNLREFVFKNIDGYFKIYSKHTPINLVRDLPQGFSALEPLVDLPIGINITRFQTLLALHRSYLTPGDSSSGWTAGAAAYYVGYLQPRTFLLKYNENGTITDAVDCALDPLSETKCTLKSFTVEKGIYQTSNFRVQPTESIVRFPNITNLCPFGEVFNATRFASVYAWNRKRISNCVADYSVLYNSASFSTFKCYGVSPTKLNDLCFTNVYADSFVIRGDEVRQIAPGQTGKIADYNYKLPDDFTGCVIAWNSNNLDSKVGGNYNYLYRLFRKSNLKPFERDISTEIYQAGSTPCNGVEGFNCYFPLQSYGFQPTNGVGYQPYRVVVLSFELLHAPATVCGPKKSTNLVKNKCVNFNFNGLTGTGVLTESNKKFLPFQQFGRDIADTTDAVRDPQTLEILDITPCSFGGVSVITPGTNTSNQVAVLYQGVNCTEVPVAIHADQLTPTWRVYSTGSNVFQTRAGCLIGAEHVNNSYECDIPIGAGICASYQTQTNSPRRARSVASQSIIAYTMSLGAENSVAYSNNSIAIPTNFTISVTTEILPVSMTKTSVDCTMYICGDSTECSNLLLQYGSFCTQLNRALTGIAVEQDKNTQEVFAQVKQIYKTPPIKDFGGFNFSQILPDPSKPSKRSFIEDLLFNKVTLADAGFIKQYGDCLGDIAARDLICAQKFNGLTVLPPLLTDEMIAQYTSALLAGTITSGWTFGAGAALQIPFAMQMAYRFNGIGVTQNVLYENQKLIANQFNSAIGKIQDSLSSTASALGKLQDVVNQNAQALNTLVKQLSSNFGAISSVLNDILSRLDPPEAEVQIDRLITGRLQSLQTYVTQQLIRAAEIRASANLAATKMSECVLGQSKRVDFCGKGYHLMSFPQSAPHGVVFLHVTYVPAQEKNFTTAPAICHDGKAHFPREGVFVSNGTHWFVTQRNFYEPQIITTDNTFVSGNCDVVIGIVNNTVYDPLQPELDSGGGGSDIDPYKEFGSSYQLLNFLPLDFFPDLNALVDTATALYEEELTGREHCSPHHTAIRQALVCWDELTKLIAWMSSNITSEQVRTIIVNHVNDTWGLKVRQSLWFHLSCLTFGQHTVQEFLVSFGVWIRTPAPYRPPNAPILSTLPEHTVIC

SEQ ID NO: 10786 - protein, 1301 aa, Artificial Sequence
  SARS-CoV-2/USA/UT-00033/2020__EPI_ISL_417976 spike protein (1-1147)(K986P_V987P) WhcAg construct
MFVFLVLLPLVSSQCVNLTTRTQLPPAYTNSFTRGVYYPDKVFRSSVLHSTQDLFLPFFSNVTWFHAIHVSGTNGTKRFDNPVLPFNDGVYFASTEKSNIIRGWIFGTTLDSKTQSLLIVNNATNVVIKVCEFQFCNDPFLGVYYHKNNKSWMESEFRVYSSANNCTFEYVSQPFLMDLEGKQGNFKNLREFVFKNIDGYFKIYSKHTPINLVRDLPQGFSALEPLVDLPIGINITRFQTLLALHRSYLTPGDSSSGLTAGAAAYYVGYLQPRTFLLKYNENGTITDAVDCALDPLSETKCTLKSFTVEKGIYQTSNFRVQPTESIVRFPNITNLCPFGEVFNATRFASVYAWNRKRISNCVADYSVLYNSASFSTFKCYGVSPTKLNDLCFTNVYADSFVIRGDEVRQIAPGQTGKIADYNYKLPDDFTGCVIAWNSNNLDSKVGGNYNYLYRLFRKSNLKPFERDISTEIYQAGSTPCNGVEGFNCYFPLQSYGFQPTNGVGYQPYRVVVLSFELLHAPATVCGPKKSTNLVKNKCVNFNFNGLTGTGVLTESNKKFLPFQQFGRDIADTTDAVRDPQTLEILDITPCSFGGVSVITPGTNTSNQVAVLYQGVNCTEVPVAIHADQLTPTWRVYSTGSNVFQTRAGCLIGAEHVNNSYECDIPIGAGICASYQTQTNSPRRARSVASQSIIAYTMSLGAENSVAYSNNSIAIPTNFTISVTTEILPVSMTKTSVDCTMYICGDSTECSNLLLQYGSFCTQLNRALTGIAVEQDKNTQEVFAQVKQIYKTPPIKDFGGFNFSQILPDPSKPSKRSFIEDLLFNKVTLADAGFIKQYGDCLGDIAARDLICAQKFNGLTVLPPLLTDEMIAQYTSALLAGTITSGWTFGAGAALQIPFAMQMAYRFNGIGVTQNVLYENQKLIANQFNSAIGKIQDSLSSTASALGKLQDVVNQNAQALNTLVKQLSSNFGAISSVLNDILSRLDPPEAEVQIDRLITGRLQSLQTYVTQQLIRAAEIRASANLAATKMSECVLGQSKRVDFCGKGYHLMSFPQSAPHGVVFLHVTYVPAQEKNFTTAPAICHDGKAHFPREGVFVSNGTHWFVTQRNFYEPQIITTDNTFVSGNCDVVIGIVNNTVYDPLQPELDSGGGGSDIDPYKEFGSSYQLLNFLPLDFFPDLNALVDTATALYEEELTGREHCSPHHTAIRQALVCWDELTKLIAWMSSNITSEQVRTIIVNHVNDTWGLKVRQSLWFHLSCLTFGQHTVQEFLVSFGVWIRTPAPYRPPNAPILSTLPEHTVIC

SEQ ID NO: 10787 - protein, 1301 aa, Artificial Sequence
  SARS-CoV-2/USA/WI-13/2020__EPI_ISL_417516 spike protein (1-1147)(K986P_V987P) WhcAg construct
MFVFLVLLPLVSSQCVNLTTRTQLPPAYTNSFTRGVYYPDKVFRSSVLHSTQDLFLPFFSNVTWFHAIHVSGTNGTKRFDNPVLPFNDGVYFASTEKSNIIRGWIFGTTLDSKTQSLLIVNNATNVVIKVCEFQFCNDPFLGVYYHKNNKSWMESEFRVYSSANNCTFEYVSQPFLMDLEGKQGNFKNLREFVFKNIDGYFKIYSKHTPINLVRDLPQGFSALEPLVDLPIGINITRFQTLLALHRSYLTPGDSSSGWTAGAAAYYVGYLQPRTFLLKYNENGTITDAVDCALDPLSETKCTLKSFTVEKGIYQTSNFRVLPTESIVRFPNITNLCPFGEVFNATRFASVYAWNRKRISNCVADYSVLYNSASFSTFKCYGVSPTKLNDLCFTNVYADSFVIRGDEVRQIAPGQTGKIADYNYKLPDDFTGCVIAWNSNNLDSKVGGNYNYLYRLFRKSNLKPFERDISTEIYQAGSTPCNGVEGFNCYFPLQSYGFQPTNGVGYQPYRVVVLSFELLHAPATVCGPKKSTNLVKNKCVNFNFNGLTGTGVLTESNKKFLPFQQFGRDIADTTDAVRDPQTLEILDITPCSFGGVSVITPGTNTSNQVAVLYQGVNCTEVPVAIHADQLTPTWRVYSTGSNVFQTRAGCLIGAEHVNNSYECDIPIGAGICASYQTQTNSPRRARSVASQSIIAYTMSLGAENSVAYSNNSIAIPTNFTISVTTEILPVSMTKTSVDCTMYICGDSTECSNLLLQYGSFCTQLNRALTGIAVEQDKNTQEVFAQVKQIYKTPPIKDFGGFNFSQILPDPSKPSKRSFIEDLLFNKVTLADAGFIKQYGDCLGDIAARDLICAQKFNGLTVLPPLLTDEMIAQYTSALLAGTITSGWTFGAGAALQIPFAMQMAYRFNGIGVTQNVLYENQKLIANQFNSAIGKIQDSLSSTASALGKLQDVVNQNAQALNTLVKQLSSNFGAISSVLNDILSRLDPPEAEVQIDRLITGRLQSLQTYVTQQLIRAAEIRASANLAATKMSECVLGQSKRVDFCGKGYHLMSFPQSAPHGVVFLHVTYVPAQEKNFTTAPAICHDGKAHFPREGVFVSNGTHWFVTQRNFYEPQIITTDNTFVSGNCDVVIGIVNNTVYDPLQPELDSGGGGSDIDPYKEFGSSYQLLNFLPLDFFPDLNALVDTATALYEEELTGREHCSPHHTAIRQALVCWDELTKLIAWMSSNITSEQVRTIIVNHVNDTWGLKVRQSLWFHLSCLTFGQHTVQEFLVSFGVWIRTPAPYRPPNAPILSTLPEHTVIC

SEQ ID NO: 10788 - protein, 1300 aa, Artificial Sequence
  SARS-CoV-2/India/1-27/2020__EPI_ISL_413522 spike protein (1-1146)(K985P_V986P) WhcAg construct
MFVFLVLLPLVSSQCVNLTTRTQLPPAYTNSFTRGVYYPDKVFRSSVLHSTQDLFLPFFSNVTWFHAIHVSGTNGTKRFDNPVLPFNDGVYFASTEKSNIIRGWIFGTTLDSKTQSLLIVNNATNVVIKVCEFQFCNDPFLGVYHKNNKSWMESEFRVYSSANNCTFEYVSQPFLMDLEGKQGNFKNLREFVFKNIDGYFKIYSKHTPINLVRDLPQGFSALEPLVDLPIGINITRFQTLLALHRSYLTPGDSSSGWTAGAAAYYVGYLQPRTFLLKYNENGTITDAVDCALDPLSETKCTLKSFTVEKGIYQTSNFRVQPTESIVRFPNITNLCPFGEVFNATRFASVYAWNRKRISNCVADYSVLYNSASFSTFKCYGVSPTKLNDLCFTNVYADSFVIRGDEVIQIAPGQTGKIADYNYKLPDDFTGCVIAWNSNNLDSKVGGNYNYLYRLFRKSNLKPFERDISTEIYQAGSTPCNGVEGFNCYFPLQSYGFQPTNGVGYQPYRVVVLSFELLHAPATVCGPKKSTNLVKNKCVNFNFNGLTGTGVLTESNKKFLPFQQFGRDIADTTDAVRDPQTLEILDITPCSFGGVSVITPGTNTSNQVAVLYQDVNCTEVPVAIHADQLTPTWRVYSTGSNVFQTRAGCLIGAEHVNNSYECDIPIGAGICASYQTQTNSPRRARSVASQSIIAYTMSLGAENSVAYSNNSIAIPTNFTISVTTEILPVSMTKTSVDCTMYICGDSTECSNLLLQYGSFCTQLNRALTGIAVEQDKNTQEVFAQVKQIYKTPPIKDFGGFNFSQILPDPSKPSKRSFIEDLLFNKVTLADAGFIKQYGDCLGDIAARDLICAQKFNGLTVLPPLLTDEMIAQYTSALLAGTITSGWTFGAGAALQIPFAMQMAYRFNGIGVTQNVLYENQKLIANQFNSAIGKIQDSLSSTASALGKLQDVVNQNAQALNTLVKQLSSNFGAISSVLNDILSRLDPPEAEVQIDRLITGRLQSLQTYVTQQLIRAAEIRASANLAATKMSECVLGQSKRVDFCGKGYHLMSFPQSAPHGVVFLHVTYVPAQEKNFTTAPAICHDGKAHFPREGVFVSNGTHWFVTQRNFYEPQIITTDNTFVSGNCDVVIGIVNNTVYDPLQPELDSGGGGSDIDPYKEFGSSYQLLNFLPLDFFPDLNALVDTATALYEEELTGREHCSPHHTAIRQALVCWDELTKLIAWMSSNITSEQVRTIIVNHVNDTWGLKVRQSLWFHLSCLTFGQHTVQEFLVSFGVWIRTPAPYRPPNAPILSTLPEHTVIC

SEQ ID NO: 10789 - protein, 1295 aa, Artificial Sequence
  SARS-CoV-2/pangolin/Guangxi/P4L/2017__EPI_ISL_410538 spike protein (1-1141)(K980P_V981P) WhcAg construct
MFVFLFVLPLVSSQCVNLTTRTGIPPGYTNSSTRGVYYPDKVFRSSILHLTQDLFLPFFSNVTWFNTINYQGGFKKFDNPVLPFNDGVYFASTEKSNIIRGWIFGTTLDARTQSLLIVNNATNVVIKVCEFQFCTDPFLGVYYHNNNKTWVENEFRVYSSANNCTFEYISQPFLMDLEGKQGNFKNLREFVFKNVDGYFKIYSKHTPIDLVRDLPRGFAALEPLVDLPIGINITRFQTLLALHRSYLTPGNLESGWTTGAAAYYVGYLQQRTFLLSYNQNGTITDAVDCSLDPLSETKCTLKSLTVEKGIYQTSNFRVQPTISIVRFPNITNLCPFGEVFNASKFASVYAWNRKRISNCVADYSVLYNSTSFSTFKCYGVSPTKLNDLCFTNVYADSFVVKGDEVRQIAPGQTGVIADYNYKLPDDFTGCVIAWNSVKQDALTGGNYGYLYRLFRKSKLKPFERDISTEIYQAGSTPCNGQVGLNCYYPLERYGFHPTTGVNYQPFRVVVLSFELLNGPATVCGPKLSTTLVKDKCVNFNFNGLTGTGVLTTSKKQFLPFQQFGRDISDTTDAVRDPQTLEILDITPCSFGGVSVITPGTNTSNQVAVLYQDVNCTEVPMAIHAEQLTPAWRVYSAGANVFQTRAGCLVGAEHVNNSYECDIPVGAGICASYHSMSSLRSVNQRSIIAYTMSLGAENSVAYSNNSIAIPTNFTISVTTEILPVSMTKTSVDCTMYICGDSIECSNLLLQYGSFCTQLNRALTGIAVEQDKNTQEVFAQVKQIYKTPPIKDFGGFNFSQILPDPSKPSKRSFIEDLLFNKVTLADAGFIKQYGDCLGDIAARDLICAQKFNGLTVLPPLLTDEMIAQYTSALLAGTITSGWTFGAGAALQIPFAMQMAYRFNGIGVTQNVLYENQKLIANQFNSAIGKIQDSLSSTASALGKLQDVVNQNAQALNTLVKQLSSNFGAISSVLNDILSRLDPPEAEVQIDRLITGRLQSLQTYVTQQLIRAAEIRASANLAATKMSECVLGQSKRVDFCGKGYHLMSFPQSAPHGVVFLHVTYVPAQEKNFTTAPAICHEGKAHFPREGVFVSNGTHWFITQRNFYEPQIITTDNTFVSGSCDVVIGIVNNTVYDPLQPELDSGGGGSDIDPYKEFGSSYQLLNFLPLDFFPDLNALVDTATALYEEELTGREHCSPHHTAIRQALVCWDELTKLIAWMSSNITSEQVRTIIVNHVNDTWGLKVRQSLWFHLSCLTFGQHTVQEFLVSFGVWIRTPAPYRPPNAPILSTLPEHTVIC

SEQ ID NO: 10790 - protein, 1295 aa, Artificial Sequence
  SARS-CoV-2/pangolin/Guangxi/P5L/2017__EPI_ISL_410540 spike protein (1-1141)(K980P_V981P) WhcAg construct
MFVFLFVLPLVSSQCVNLTTRTGIPPGYTNSSTRGVYYPDKVFRSSILHLTQDLFLPFFSNVTWFNTINYQGGFKKFDNPVLPFNDGVYFASTEKSNIIRGWIFGTTLDARTQSLLIVNNATNVVIKVCEFQFCTDPFLGVYYHNNNKTWVENEFRVYSSANNCTFEYISQPFLMDLEGKQGNFKNLREFVFKNVDGYFKIYSKHTPIDLVRDLPRGFAALEPLVDLPIGINITRFQTLLALHRSYLTPGKLESGWTTGAAAYYVGYLQQRTFLLSYNQNGTITDAVDCSLDPLSETKCTLKSLTVEKGIYQTSNFRVQPTISIVRFPNITNLCPFGEVFNASKFASVYAWNRKRISNCVADYSVLYNSTSFSTFKCYGVSPTKLNDLCFTNVYADSFVVKGDEVRQIAPGQTGVIADYNYKLPDDFTGCVIAWNSVKQDALTGGNYGYLYRLFRKSKLKPFERDISTEIYQAGSTPCNGQVGLNCYYPLERYGFHPTTGVNYQPFRVVVLSFELLNGPATVCGPKLSTTLVKDKCVNFNFNGLTGTGVLTTSKKQFLPFQQFGRDISDTTDAVRDPQTLEILDITPCSFGGVSVITPGTNTSNQVAVLYQDVNCTEVPMAIHAEQLTPAWRVYSAGANVFQTRAGCLVGAEHVNNSYECDIPVGAGICASYHSMSSFRSVNQRSIIAYTMSLGAENSVAYSNNSIAIPTNFTISVTTEILPVSMTKTSVDCTMYICGDSIECSNLLLQYGSFCTQLNRALTGIAVEQDKNTQEVFAQVKQIYKTPPIKDFGGFNFSQILPDPSKPSKRSFIEDLLFNKVTLADAGFIKQYGDCLGDIAARDLICAQKFNGLTVLPPLLTDEMIAQYTSALLAGTITSGWTFGAGAALQIPFAMQMAYRFNGIGVTQNVLYENQKLIANQFNSAIGKIQDSLSSTASALGKLQDVVNQNAQALNTLVKQLSSNFGAISSVLNDILSRLDPPEAEVQIDRLITGRLQSLQTYVTQQLIRAAEIRASANLAATKMSECVLGQSKRVDFCGKGYHLMSFPQSAPHGVVFLHVTYVPAQEKNFTTAPAICHEGKAHFPREGVFVSNGTHWFITQRNFYEPQIITTDNTFVSGSCDVVIGIVNNTVYDPLQPELDSGGGGSDIDPYKEFGSSYQLLNFLPLDFFPDLNALVDTATALYEEELTGREHCSPHHTAIRQALVCWDELTKLIAWMSSNITSEQVRTIIVNHVNDTWGLKVRQSLWFHLSCLTFGQHTVQEFLVSFGVWIRTPAPYRPPNAPILSTLPEHTVIC

SEQ ID NO: 10791 - protein, 1295 aa, Artificial Sequence
  SARS-CoV-2/pangolin/Guangxi/P5E/2017__EPI_ISL_410541 spike protein (1-1141)(K980P_V981P) WhcAg construct
MFVFLFVLPLVSSQCVNLTTRTGIPPGYTNSSTRGVYYPDKVFRSSILHLTQDLFLPFFSNVTWFNTITYQGGSKKFDNPVLPFNDGVYFASTEKSNIIRGWIFGTTLDARTQSLLIVNNATNVVIKVCEFQFCTDPFLGVYYHNNNKTWVENEFRVYSSANNCTFEYISQPFLMDLEGKQGNFKNLREFVFKNVDGYFKIYSKHTPIDLVRDLPRGFAALEPLVDLPIGINITRFQTLLALHRSYLTPGKLESGWTTGAAAYYVGYLQQRTFLLSYNQNGTITDAVDCSLDPLSETKCTLKSLTVEKGIYQTSNFRVQPTISIVRFPNITNLCPFGEVFNASKFASVYAWNRKRISNCVADYSVLYNSTSFSTFKCYGVSPTKLNDLCFTNVYADSFVVKGDEVRQIAPGQTGVIADYNYKLPDDFTGCVIAWNSVKQDALTGDNYGYLYRLFRKSKLKPFERDISTEIYQAGSTPCNGQVGLNCYYPLERYGFHPTTGVNYQPFRVVVLSFELLNGPATVCGPKLSTTLVKDKCVNFNFNGLTGTGVLTTSKKQFLPFQQFGRDISDTTDAVRDPQTLEILDITPCSFGGVSVITPGTNTSNQVAVLYQDVNCTEVPMAIHAEQLTPAWRVYSAGANVFQTRAGCLVGAEHVNNSYECDIPVGAGICASYHSMSSFRSVNQRSIIAYTMSLGAENSVAYSNNSIAIPTNFTISVTTEILPVSMTKTSVDCTMYICGDSIECSNLLLQYGSFCTQLNRALTGIAVEQDKNTQEVFAQVKQIYKTPPIKDFGGFNFSQILPDPSKPSKRSFIEDLLFNKVTLADAGFIKQYGDCLGDIAARDLICAQKFNGLTVLPPLLTDEMIAQYTSALLAGTITSGWTFGAGAALQIPFAMQMAYRFNGIGVTQNVLYENQKLIANQFNSAIGKIQDSLSSTASALGKLQDVVNQNAQALNTLVKQLSSNFGAISSVLNDILSRLDPPEAEVQIDRLITGRLQSLQTYVTQQLIRAAEIRASANLAATKMSECVLGQSKRVDFCGKGYHLMSFPQSAPHGVVFLHVTYVPAQEKNFTTAPAICHEGKAHFPREGVFVSNGTHWFITQRNFYEPQIITTDNTFVSGSCDVVIGIVNNTVYDPLQPELDSGGGGSDIDPYKEFGSSYQLLNFLPLDFFPDLNALVDTATALYEEELTGREHCSPHHTAIRQALVCWDELTKLIAWMSSNITSEQVRTIIVNHVNDTWGLKVRQSLWFHLSCLTFGQHTVQEFLVSFGVWIRTPAPYRPPNAPILSTLPEHTVIC

SEQ ID NO: 10792 - protein, 1293 aa, Artificial Sequence
  SARS-CoV-2/pangolin/Guangxi/P1E/2017__EPI_ISL_410539 spike protein (1-1139)(K978P_V979P) WhcAg construct
MFVFLFVLPLVSSQCVNLTTRTGIQPGYTNSSTRGVYYPDKVFRSSILHLTQDLFLPFFSNVTWFNTINYQGGFKKFDNPVLPFNDGVYFASTEKSNIIRGWIFGTTLDARTQSLLIVNNATNVVIKVCEFQFCTDPFLGVYYHNNNKTWVENEFRVYSSANNCTFEYISQPFLMDLEGKQGNFKNLREFVFKNVDGYFKIYSKHTPIDLVRDLPRGFAALEPLVDLPIGINITRFQTLLALHRSYLTPGKLESGWTTGAAAYYVGYLQQRTFLLSYNQNGTITDAVDCSLDPLSETKCTLKSLTVEKGIYQTSNFRVQPTISIVRFPNITNLCPFGEVFNASKFASVYAWNRKRISNCVADYSVLYNSTSFSTFKCYGVSPTKLNDLCFTNVYADSFVVKGDEVRQIAPGQTGVIADYNYKLPDDFTGCVIAWNSVKQDALTGGNYLYRLFRKSKLKPFERDISTEIYQAGSTPCNGQVGLNCYYPLERYGFHPTTGVNYQPFRVVVLSFELLNGPATVCGPKLSTTLVKDKCVNFNFNGLTGTGVLTTSKKQFLPFQQFGRDISDTTDAVRDPQTLEILDITPCSFGGVSVITPGTNTSNQVAVLYQDVNCTEVPMAIHAEQLTPAWRVYSAGANVFQTRAGCLVGAEHVNNSYECDIPVGAGICASYHSMSSLRSVNQRSIIAYTMSLGAENSVAYSNNSIAIPTNFTISVTTEILPVSMTKTSVDCTMYICGDSIECSNLLLQYGSFCTQLNRALTGIAVEQDKNTQEVFAQVKQIYKTPPIKDFGGFNFSQILPDPSKPSKRSFIEDLLFNKVTLADAGFIKQYGDCLGDIAARDLICAQKFNGLTVLPPLLTDEMIAQYTSALLAGTITSGWTFGAGAALQIPFAMQMAYRFNGIGVTQNVLYENQKLIANQFNSAIGKIQDSLSSTASALGKLQDVVNQNAQALNTLVKQLSSNFGAISSVLNDILSRLDPPEAEVQIDRLITGRLQSLQTYVTQQLIRAAEIRASANLAATKMSECVLGQSKRVDFCGKGYHLMSFPQSAPHGVVFLHVTYVPAQEKNFTTAPAICHEGKAHFPREGVFVSNGTHWFITQRNFYEPQIITTDNTFVSGSCDVVIGIVNNTVYDPLQPELDSGGGGSDIDPYKEFGSSYQLLNFLPLDFFPDLNALVDTATALYEEELTGREHCSPHHTAIRQALVCWDELTKLIAWMSSNITSEQVRTIIVNHVNDTWGLKVRQSLWFHLSCLTFGQHTVQEFLVSFGVWIRTPAPYRPPNAPILSTLPEHTVIC

SEQ ID NO: 10793 - protein, 1301 aa, Artificial Sequence
  SARS-CoV-2/Wuhan/WIV05/2019__EPI_ISL_402128 spike protein (1-1147)(K986P_V987P_T887W_A1020W) WhcAg construct
MFVFLVLLPLVSSQCVNLTTRTQLPPAYTNSFTRGVYYPDKVFRSSVLHSTQDLFLPFFSNVTWFHAIHVSGTNGTKRFDNPVLPFNDGVYFASTEKSNIIRGWIFGTTLDSKTQSLLIVNNATNVVIKVCEFQFCNDPFLGVYYHKNNKSWMESEFRVYSSANNCTFEYVSQPFLMDLEGKQGNFKNLREFVFKNIDGYFKIYSKHTPINLVRDLPQGFSALEPLVDLPIGINITRFQTLLALHRSYLTPGDSSSGWTAGAAAYYVGYLQPRTFLLKYNENGTITDAVDCALDPLSETKCTLKSFTVEKGIYQTSNFRVQPTESIVRFPNITNLCPFGEVFNATRFASVYAWNRKRISNCVADYSVLYNSASFSTFKCYGVSPTKLNDLCFTNVYADSFVIRGDEVRQIAPGQTGKIADYNYKLPDDFTGCVIAWNSNNLDSKVGGNYNYLYRLFRKSNLKPFERDISTEIYQAGSTPCNGVEGFNCYFPLQSYGFQPTNGVGYQPYRVVVLSFELLHAPATVCGPKKSTNLVKNKCVNFNFNGLTGTGVLTESNKKFLPFQQFGRDIADTTDAVRDPQTLEILDITPCSFGGVSVITPGTNTSNQVAVLYQDVNCTEVPVAIHADQLTPTWRVYSTGSNVFQTRAGCLIGAEHVNNSYECDIPIGAGICASYQTQTNSPRRARSVASQSIIAYTMSLGAENSVAYSNNSIAIPTNFTISVTTEILPVSMTKTSVDCTMYICGDSTECSNLLLQYGSFCTQLNRALTGIAVEQDKNTQEVFAQVKQIYKTPPIKDFGGFNFSQILPDPSKPSKRSFIEDLLFNKVTLADAGFIKQYGDCLGDIAARDLICAQKFNGLTVLPPLLTDEMIAQYTSALLAGTITSGWWFGAGAALQIPFAMQMAYRFNGIGVTQNVLYENQKLIANQFNSAIGKIQDSLSSTASALGKLQDVVNQNAQALNTLVKQLSSNFGAISSVLNDILSRLDPPEAEVQIDRLITGRLQSLQTYVTQQLIRAAEIRWSANLAATKMSECVLGQSKRVDFCGKGYHLMSFPQSAPHGVVFLHVTYVPAQEKNFTTAPAICHDGKAHFPREGVFVSNGTHWFVTQRNFYEPQIITTDNTFVSGNCDVVIGIVNNTVYDPLQPELDSGGGGSDIDPYKEFGSSYQLLNFLPLDFFPDLNALVDTATALYEEELTGREHCSPHHTAIRQALVCWDELTKLIAWMSSNITSEQVRTIIVNHVNDTWGLKVRQSLWFHLSCLTFGQHTVQEFLVSFGVWIRTPAPYRPPNAPILSTLPEHTVIC

SEQ ID NO: 10794 - protein, 1297 aa, Artificial Sequence
  SARS-CoV-2/bat/Yunnan/RaTG13/2013__EPI_ISL_402131 spike protein (1-1143)(K982P_V983P_T883W_A1016W) WhcAg construct
MFVFLVLLPLVSSQCVNLTTRTQLPPAYTNSSTRGVYYPDKVFRSSVLHLTQDLFLPFFSNVTWFHAIHVSGTNGIKRFDNPVLPFNDGVYFASTEKSNIIRGWIFGTTLDSKTQSLLIVNNATNVVIKVCEFQFCNDPFLGVYYHKNNKSWMESEFRVYSSANNCTFEYVSQPFLMDLEGKQGNFKNLREFVFKNIDGYFKIYSKHTPINLVRDLPPGFSALEPLVDLPIGINITRFQTLLALHRSYLTPGDSSSGWTAGAAAYYVGYLQPRTFLLKYNENGTITDAVDCALDPLSETKCTLKSFTVEKGIYQTSNFRVQPTDSIVRFPNITNLCPFGEVFNATTFASVYAWNRKRISNCVADYSVLYNSTSFSTFKCYGVSPTKLNDLCFTNVYADSFVITGDEVRQIAPGQTGKIADYNYKLPDDFTGCVIAWNSKHIDAKEGGNFNYLYRLFRKANLKPFERDISTEIYQAGSKPCNGQTGLNCYYPLYRYGFYPTDGVGHQPYRVVVLSFELLNAPATVCGPKKSTNLVKNKCVNFNFNGLTGTGVLTESNKKFLPFQQFGRDIADTTDAVRDPQTLEILDITPCSFGGVSVITPGTNASNQVAVLYQDVNCTEVPVAIHADQLTPTWRVYSTGSNVFQTRAGCLIGAEHVNNSYECDIPIGAGICASYQTQTNSRSVASQSIIAYTMSLGAENSVAYSNNSIAIPTNFTISVTTEILPVSMTKTSVDCTMYICGDSTECSNLLLQYGSFCTQLNRALTGIAVEQDKNTQEVFAQVKQIYKTPPIKDFGGFNFSQILPDPSKPSKRSFIEDLLFNKVTLADAGFIKQYGDCLGDIAARDLICAQKFNGLTVLPPLLTDEMIAQYTSALLAGTITSGWWFGAGAALQIPFAMQMAYRFNGIGVTQNVLYENQKLIANQFNSAIGKIQDSLSSTASALGKLQDVVNQNAQALNTLVKQLSSNFGAISSVLNDILSRLDPPEAEVQIDRLITGRLQSLQTYVTQQLIRAAEIRWSANLAATKMSECVLGQSKRVDFCGKGYHLMSFPQSAPHGVVFLHVTYVPAQEKNFTTAPAICHDGKAHFPREGVFVSNGTHWFVTQRNFYEPQIITTDNTFVSGSCDVVIGIVNNTVYDPLQPELDSGGGGSDIDPYKEFGSSYQLLNFLPLDFFPDLNALVDTATALYEEELTGREHCSPHHTAIRQALVCWDELTKLIAWMSSNITSEQVRTIIVNHVNDTWGLKVRQSLWFHLSCLTFGQHTVQEFLVSFGVWIRTPAPYRPPNAPILSTLPEHTVIC

SEQ ID NO: 10795 - protein, 1301 aa, Artificial Sequence
  SARS-CoV-2/Wuhan/HBCDC-HB-01/2019__EPI_ISL_402132 spike protein (1-1147)(K986P_V987P_T887W_A1020W) WhcAg construct
MFVFLVLLPLVSSQCVNLTTRTQLPPAYTNSITRGVYYPDKVFRSSVLHSTQDLFLPFFSNVTWFHAIHVSGTNGTKRFDNPVLPFNDGVYFASTEKSNIIRGWIFGTTLDSKTQSLLIVNNATNVVIKVCEFQFCNDPFLGVYYHKNNKSWMESEFRVYSSANNCTFEYVSQPFLMDLEGKQGNFKNLREFVFKNIDGYFKIYSKHTPINLVRDLPQGFSALEPLVDLPIGINITRFQTLLALHRSYLTPGDSSSGWTAGAAAYYVGYLQPRTFLLKYNENGTITDAVDCALDPLSETKCTLKSFTVEKGIYQTSNFRVQPTESIVRFPNITNLCPFGEVFNATRFASVYAWNRKRISNCVADYSVLYNSASFSTFKCYGVSPTKLNDLCFTNVYADSFVIRGDEVRQIAPGQTGKIADYNYKLPDDFTGCVIAWNSNNLDSKVGGNYNYLYRLFRKSNLKPFERDISTEIYQAGSTPCNGVEGFNCYFPLQSYGFQPTNGVGYQPYRVVVLSFELLHAPATVCGPKKSTNLVKNKCVNFNFNGLTGTGVLTESNKKFLPFQQFGRDIADTTDAVRDPQTLEILDITPCSFGGVSVITPGTNTSNQVAVLYQDVNCTEVPVAIHADQLTPTWRVYSTGSNVFQTRAGCLIGAEHVNNSYECDIPIGAGICASYQTQTNSPRRARSVASQSIIAYTMSLGAENSVAYSNNSIAIPTNFTISVTTEILPVSMTKTSVDCTMYICGDSTECSNLLLQYGSFCTQLNRALTGIAVEQDKNTQEVFAQVKQIYKTPPIKDFGGFNFSQILPDPSKPSKRSFIEDLLFNKVTLADAGFIKQYGDCLGDIAARDLICAQKFNGLTVLPPLLTDEMIAQYTSALLAGTITSGWWFGAGAALQIPFAMQMAYRFNGIGVTQNVLYENQKLIANQFNSAIGKIQDSLSSTASALGKLQDVVNQNAQALNTLVKQLSSNFGAISSVLNDILSRLDPPEAEVQIDRLITGRLQSLQTYVTQQLIRAAEIRWSANLAATKMSECVLGQSKRVDFCGKGYHLMSFPQSAPHGVVFLHVTYVPAQEKNFTTAPAICHDGKAHFPREGVFVSNGTHWFVTQRNFYEPQIITTDNTFVSGNCDVVIGIVNNTVYDPLQPELDSGGGGSDIDPYKEFGSSYQLLNFLPLDFFPDLNALVDTATALYEEELTGREHCSPHHTAIRQALVCWDELTKLIAWMSSNITSEQVRTIIVNHVNDTWGLKVRQSLWFHLSCLTFGQHTVQEFLVSFGVWIRTPAPYRPPNAPILSTLPEHTVIC

SEQ ID NO: 10796 - protein, 1301 aa, Artificial Sequence
  SARS-CoV-2/Guangdong/20SF028/2020__EPI_ISL_403936 spike protein (1-1147)(K986P_V987P_T887W_A1020W) WhcAg construct
MFVFLVLLPLVSSQCVNLTTRTQLPPAYTNSFTRGVYYPDKVFRSSVLYSTQDLFLPFFSNVTWFHAIHVSGTNGTKRFDNPVLPFNDGVYFASTEKSNIIRGWIFGTTLDSKTQSLLIVNNATNVVIKVCEFQFCNDPFLGVYYHKNNKSWMESEFRVYSSANNCTFEYVSQPFLMDLEGKQGNFKNLREFVFKNIDGYFKIYSKHTPINLVRDLPQGFSALEPLVDLPIGINITRFQTLLALHRSYLTPGDSSSGWTAGAAAYYVGYLQPRTFLLKYNENGTITDAVDCALDPLSETKCTLKSFTVEKGIYQTSNFRVQPTESIVRFPNITNLCPFGEVFNATRFASVYAWNRKRISNCVADYSVLYNSASFSTFKCYGVSPTKLNDLCFTNVYADSFVIRGDEVRQIAPGQTGKIADYNYKLPDDFTGCVIAWNSNNLDSKVGGNYNYLYRLFRKSNLKPFERDISTEIYQAGSTPCNGVEGFNCYFPLQSYGFQPTNGVGYQPYRVVVLSFELLHAPATVCGPKKSTNLVKNKCVNFNFNGLTGTGVLTESNKKFLPFQQFGRDIADTTDAVRDPQTLEILDITPCSFGGVSVITPGTNTSNQVAVLYQDVNCTEVPVAIHADQLTPTWRVYSTGSNVFQTRAGCLIGAEHVNNSYECDIPIGAGICASYQTQTNSPRRARSVASQSIIAYTMSLGAENSVAYSNNSIAIPTNFTISVTTEILPVSMTKTSVDCTMYICGDSTECSNLLLQYGSFCTQLNRALTGIAVEQDKNTQEVFAQVKQIYKTPPIKDFGGFNFSQILPDPSKPSKRSFIEDLLFNKVTLADAGFIKQYGDCLGDIAARDLICAQKFNGLTVLPPLLTDEMIAQYTSALLAGTITSGWWFGAGAALQIPFAMQMAYRFNGIGVTQNVLYENQKLIANQFNSAIGKIQDSLSSTASALGKLQDVVNQNAQALNTLVKQLSSNFGAISSVLNDILSRLDPPEAEVQIDRLITGRLQSLQTYVTQQLIRAAEIRWSANLAATKMSECVLGQSKRVDFCGKGYHLMSFPQSAPHGVVFLHVTYVPAQEKNFTTAPAICHDGKAHFPREGVFVSNGTHWFVTQRNFYEPQIITTDNTFVSGNCDVVIGIVNNTVYDPLQPELDSGGGGSDIDPYKEFGSSYQLLNFLPLDFFPDLNALVDTATALYEEELTGREHCSPHHTAIRQALVCWDELTKLIAWMSSNITSEQVRTIIVNHVNDTWGLKVRQSLWFHLSCLTFGQHTVQEFLVSFGVWIRTPAPYRPPNAPILSTLPEHTVIC

SEQ ID NO: 10797 - protein, 1301 aa, Artificial Sequence
  SARS-CoV-2/Shenzhen/SZTH-001/2020__EPI_ISL_406592 spike protein (1-1147)(K986P_V987P_T887W_A1020W) WhcAg construct
MFVFLVLLPLVSSQCVNLTTRTQLPPAYTNSFTRGVYYPDKVFRSSVLHSTQDLFLPFFSNVTWFHAIHVSGTNGTKRFDNPVLPFNDGVYFASTEKSNIIRGWIFGTTLDSKTQSLLIVNNATNVVIKVCEFQFCNDPFLGVYYHKNNKSWMESEFRVYSSANNCTFEYVSQPFLMDLEGKQGNFKNLREFVFKNIDGYFKIYSKHTPINLVRDLPQGFSALEPLVDLPIGINITRFQTLLALHRSYLTPGDSSSGWTAGAAAYYVGYLQPRTFLLKYNENGTITDAVDCALDPLSETKCTLKSFTVEKGIYQTSNFRVQPTESIVRFPNITNLCPFGEVFNATRFASVYAWNRKRISNCVADYSVLYNSASFSTFKCYGVSPTKLNDLCFTNVYADSFVIRGDEVRQIAPGQTGKIADYNYKLPDDFTGCVIAWNSNNLDSKVGGNYNYLYRLFRKSNLKPFERDISTEIYQAGSTPCNGVEGFNCYFPLQSYGFQPTNGVGYQPYRVVVLSFELLHAPATVCGPKKSTNLVKNKCVNFNFNGLTGTGVLTESNKKFLPFQQFGRDIADTTDAVRDPQTLEILDITPCSFGGVSVITPGTNTSNQVAVLYQDVNCTEVPVAIHADQLTPTWRVYSTGSNVFQTRAGCLIGAEHVNNSYECDIPIGAGICASYQTQTNSPRRARSVASQSIIAYTMSLGAENSVAYSNNSIAIPTNFTISVTTEILPVSMTKTSVDCTMYICGDSTECSNLLLQYGSFCTQLNRALTGIAVEQDKNTQEVFAQVKQIYKTPPIKDFGGFNFSQILPDPSKPSKRSFIEDLLFNKVTLADAGFIKQYGDCLGDIAARDLICAQKFNGLTVLPPLLTDEMIAQYTSALLAGTITSGWWFGAGAALQIPFAMQMAYRFNGIGVTQNVLYENQKLIANQFNSAIGKIQDSLSSTASALGKLQDVVNQNAQALNTLVKQLSSNFGAISSVLNDILSRLDPPEAEVQIDRLITGRLQSLQTYVTQQLIRAAEIRWSANLAATKMSECVLGQSKRVDFCGKGYHLMSFPQSAPHGVVFLHVTYVPAQEKNFTTAPAICHDGKAHFPREGVFVSNGTHWFVTQRNFYEPQIITTDNTFVSGNCDVLIGIVNNTVYDPLQPELDSGGGGSDIDPYKEFGSSYQLLNFLPLDFFPDLNALVDTATALYEEELTGREHCSPHHTAIRQALVCWDELTKLIAWMSSNITSEQVRTIIVNHVNDTWGLKVRQSLWFHLSCLTFGQHTVQEFLVSFGVWIRTPAPYRPPNAPILSTLPEHTVIC

SEQ ID NO: 10798 - protein, 1301 aa, Artificial Sequence
  SARS-CoV-2/Shenzhen/SZTH-004/2020__EPI_ISL_406595 spike protein (1-1147)(K986P_V987P_T887W_A1020W) WhcAg construct
MFVFLVLLPLVSSQCVNLTTRTQLPPAYTNSFTRGVYYPDKVFRSSVLHSTQDLFLPFFSNVTWFHAIHVSGTNGTKRFDNPVLPFNDGVYFASTEKSNIIRGWIFGTTLDSKTQSLLIVNNATNVVIKVCEFQFCNDPFLGVYYHKNNKSWMESEFRVYSSANNCTFEYVSQPFLMDLEGKQGNFKNLREFVFKNIDGYFKIYSKHTPINLVRDLPQGFSALEPLVDLPIGINITRFQTLLALHRSYLTPGDSSSGWTAGAAAYYVGYLQPRTFLLKYNENGTITDAVDCALDPLSETKCTLKSFTVEKGIYQTSNFRVQPTESIVRFPNITNLCPFGEVFNATRFASVYAWDRKRISNCVAYYSVLYNSASFSTFKCYGVSPTKLNDLCFTNVYADSFVIRGDEVRQIAPGQTGKIADYNYKLPDDFTGCVIAWNSNNLDSKVGGNYNYLYRLFRKSNLKPFERDISTEIYQAGSTPCNGVEGFNCYFPLQSYGFQPTNGVGYQPYRVVVLSFELLHAPATVCGPKKSTNLVKNKCVNFNFNGLTGTGVLTESNKKFLPFQQFGRDIADTTDAVRDPQTLEILDITPCSFGGVSVITPGTNTSNQVAVLYQDVNCTEVPVAIHADQLTPTWRVYSTGSNVFQTRAGCLIGAEHVNNSYECDIPIGAGICASYQTQTNSPRRARSVASQSIIAYTMSLGAENSVAYSNNSIAIPTNFTISVTTEILPVSMTKTSVDCTMYICGDSTECSNLLLQYGSFCTQLNRALTGIAVEQDKNTQEVFAQVKQIYKTPPIKDFGGFNFSQILPDPSKPSKRSFIEDLLFNKVTLADAGFIKQYGDCLGDIAARDLICAQKFNGLTVLPPLLTDEMIAQYTSALLAGTITSGWWFGAGAALQIPFAMQMAYRFNGIGVTQNVLYENQKLIANQFNSAIGKIQDSLSSTASALGKLQDVVNQNAQALNTLVKQLSSNFGAISSVLNDILSRLDPPEAEVQIDRLITGRLQSLQTYVTQQLIRAAEIRWSANLAATKMSECVLGQSKRVDFCGKGYHLMSFPQSAPHGVVFLHVTYVPAQEKNFTTAPAICHDGKAHFPREGVFVSNGTHWFVTQRNFYEPQIITTDNTFVSGNCDVVIGIVNNTVYDPLQPELDSGGGGSDIDPYKEFGSSYQLLNFLPLDFFPDLNALVDTATALYEEELTGREHCSPHHTAIRQALVCWDELTKLIAWMSSNITSEQVRTIIVNHVNDTWGLKVRQSLWFHLSCLTFGQHTVQEFLVSFGVWIRTPAPYRPPNAPILSTLPEHTVIC

SEQ ID NO: 10799 - protein, 1301 aa, Artificial Sequence
  SARS-CoV-2/France/IDF0372/2020__EPI_ISL_406596 spike protein (1-1147)(K986P_V987P_T887W_A1020W) WhcAg construct
MFVFLVLLPLVSSQCVNLTTRTQLPPAYTNSFTRGVYYPDKVFRSSVLHSTQDLFLPFFSNVTWFHAIHVSGTNGTKRFDNPVLPFNDGVYFASTEKSNIIRGWIFGTTLDSKTQSLLIVNNATNVVIKVCEFQFCNDPFLGVYYHKNNKSWMESEFRVYSSANNCTFEYVSQPFLMDLEGKQGNFKNLREFVFKNIDGYFKIYSKHTPINLVRDLPQGFSALEPLVDLPIGINITRFQTLLALHRSYLTPGDSSSGWTAGAAAYYVGYLQPRTFLLKYNENGTITDAVDCALDPLSETKCTLKSFTVEKGIYQTSNFRVQPTESIVRFPNITNLCPFGEVFNATRFASVYAWNRKRISNCVADYSFLYNSASFSTFKCYGVSPTKLNDLCFTNVYADSFVIRGDEVRQIAPGQTGKIADYNYKLPDDFTGCVIAWNSNNLDSKVGGNYNYLYRLFRKSNLKPFERDISTEIYQAGSTPCNGVEGFNCYFPLQSYGFQPTNGVGYQPYRVVVLSFELLHAPATVCGPKKSTNLVKNKCVNFNFNGLTGTGVLTESNKKFLPFQQFGRDIADTTDAVRDPQTLEILDITPCSFGGVSVITPGTNTSNQVAVLYQDVNCTEVPVAIHADQLTPTWRVYSTGSNVFQTRAGCLIGAEHVNNSYECDIPIGAGICASYQTQTNSPRRARSVASQSIIAYTMSLGAENSVAYSNNSIAIPTNFTISVTTEILPVSMTKTSVDCTMYICGDSTECSNLLLQYGSFCTQLNRALTGIAVEQDKNTQEVFAQVKQIYKTPPIKDFGGFNFSQILPDPSKPSKRSFIEDLLFNKVTLADAGFIKQYGDCLGDIAARDLICAQKFNGLTVLPPLLTDEMIAQYTSALLAGTITSGWWFGAGAALQIPFAMQMAYRFNGIGVTQNVLYENQKLIANQFNSAIGKIQDSLSSTASALGKLQDVVNQNAQALNTLVKQLSSNFGAISSVLNDILSRLDPPEAEVQIDRLITGRLQSLQTYVTQQLIRAAEIRWSANLAATKMSECVLGQSKRVDFCGKGYHLMSFPQSAPHGVVFLHVTYVPAQEKNFTTAPAICHDGKAHFPREGVFVSNGTHWFVTQRNFYEPQIITTDNTFVSGNCDVVIGIVNNTVYDPLQPELDSGGGGSDIDPYKEFGSSYQLLNFLPLDFFPDLNALVDTATALYEEELTGREHCSPHHTAIRQALVCWDELTKLIAWMSSNITSEQVRTIIVNHVNDTWGLKVRQSLWFHLSCLTFGQHTVQEFLVSFGVWIRTPAPYRPPNAPILSTLPEHTVIC

SEQ ID NO: 10800 - protein, 1301 aa, Artificial Sequence
  SARS-CoV-2/Australia/VIC01/2020__EPI_ISL_406844 spike protein (1-1147)(K986P_V987P_T887W_A1020W) WhcAg construct
MFVFLVLLPLVSSQCVNLTTRTQLPPAYTNSFTRGVYYPDKVFRSSVLHSTQDLFLPFFSNVTWFHAIHVSGTNGTKRFDNPVLPFNDGVYFASTEKSNIIRGWIFGTTLDSKTQSLLIVNNATNVVIKVCEFQFCNDPFLGVYYHKNNKSWMESEFRVYSSANNCTFEYVSQPFLMDLEGKQGNFKNLREFVFKNIDGYFKIYSKHTPINLVRDLPQGFSALEPLVDLPIGINITRFQTLLALHRRYLTPGDSSSGWTAGAAAYYVGYLQPRTFLLKYNENGTITDAVDCALDPLSETKCTLKSFTVEKGIYQTSNFRVQPTESIVRFPNITNLCPFGEVFNATRFASVYAWNRKRISNCVADYSVLYNSASFSTFKCYGVSPTKLNDLCFTNVYADSFVIRGDEVRQIAPGQTGKIADYNYKLPDDFTGCVIAWNSNNLDSKVGGNYNYLYRLFRKSNLKPFERDISTEIYQAGSTPCNGVEGFNCYFPLQSYGFQPTNGVGYQPYRVVVLSFELLHAPATVCGPKKSTNLVKNKCVNFNFNGLTGTGVLTESNKKFLPFQQFGRDIADTTDAVRDPQTLEILDITPCSFGGVSVITPGTNTSNQVAVLYQDVNCTEVPVAIHADQLTPTWRVYSTGSNVFQTRAGCLIGAEHVNNSYECDIPIGAGICASYQTQTNSPRRARSVASQSIIAYTMSLGAENSVAYSNNSIAIPTNFTISVTTEILPVSMTKTSVDCTMYICGDSTECSNLLLQYGSFCTQLNRALTGIAVEQDKNTQEVFAQVKQIYKTPPIKDFGGFNFSQILPDPSKPSKRSFIEDLLFNKVTLADAGFIKQYGDCLGDIAARDLICAQKFNGLTVLPPLLTDEMIAQYTSALLAGTITSGWWFGAGAALQIPFAMQMAYRFNGIGVTQNVLYENQKLIANQFNSAIGKIQDSLSSTASALGKLQDVVNQNAQALNTLVKQLSSNFGAISSVLNDILSRLDPPEAEVQIDRLITGRLQSLQTYVTQQLIRAAEIRWSANLAATKMSECVLGQSKRVDFCGKGYHLMSFPQSAPHGVVFLHVTYVPAQEKNFTTAPAICHDGKAHFPREGVFVSNGTHWFVTQRNFYEPQIITTDNTFVSGNCDVVIGIVNNTVYDPLQPELDSGGGGSDIDPYKEFGSSYQLLNFLPLDFFPDLNALVDTATALYEEELTGREHCSPHHTAIRQALVCWDELTKLIAWMSSNITSEQVRTIIVNHVNDTWGLKVRQSLWFHLSCLTFGQHTVQEFLVSFGVWIRTPAPYRPPNAPILSTLPEHTVIC

SEQ ID NO: 10801 - protein, 1301 aa, Artificial Sequence
  SARS-CoV-2/Germany/BavPat1/2020__EPI_ISL_406862 spike protein (1-1147)(K986P_V987P_T887W_A1020W) WhcAg construct
MFVFLVLLPLVSSQCVNLTTRTQLPPAYTNSFTRGVYYPDKVFRSSVLHSTQDLFLPFFSNVTWFHAIHVSGTNGTKRFDNPVLPFNDGVYFASTEKSNIIRGWIFGTTLDSKTQSLLIVNNATNVVIKVCEFQFCNDPFLGVYYHKNNKSWMESEFRVYSSANNCTFEYVSQPFLMDLEGKQGNFKNLREFVFKNIDGYFKIYSKHTPINLVRDLPQGFSALEPLVDLPIGINITRFQTLLALHRSYLTPGDSSSGWTAGAAAYYVGYLQPRTFLLKYNENGTITDAVDCALDPLSETKCTLKSFTVEKGIYQTSNFRVQPTESIVRFPNITNLCPFGEVFNATRFASVYAWNRKRISNCVADYSVLYNSASFSTFKCYGVSPTKLNDLCFTNVYADSFVIRGDEVRQIAPGQTGKIADYNYKLPDDFTGCVIAWNSNNLDSKVGGNYNYLYRLFRKSNLKPFERDISTEIYQAGSTPCNGVEGFNCYFPLQSYGFQPTNGVGYQPYRVVVLSFELLHAPATVCGPKKSTNLVKNKCVNFNFNGLTGTGVLTESNKKFLPFQQFGRDIADTTDAVRDPQTLEILDITPCSFGGVSVITPGTNTSNQVAVLYQGVNCTEVPVAIHADQLTPTWRVYSTGSNVFQTRAGCLIGAEHVNNSYECDIPIGAGICASYQTQTNSPRRARSVASQSIIAYTMSLGAENSVAYSNNSIAIPTNFTISVTTEILPVSMTKTSVDCTMYICGDSTECSNLLLQYGSFCTQLNRALTGIAVEQDKNTQEVFAQVKQIYKTPPIKDFGGFNFSQILPDPSKPSKRSFIEDLLFNKVTLADAGFIKQYGDCLGDIAARDLICAQKFNGLTVLPPLLTDEMIAQYTSALLAGTITSGWWFGAGAALQIPFAMQMAYRFNGIGVTQNVLYENQKLIANQFNSAIGKIQDSLSSTASALGKLQDVVNQNAQALNTLVKQLSSNFGAISSVLNDILSRLDPPEAEVQIDRLITGRLQSLQTYVTQQLIRAAEIRWSANLAATKMSECVLGQSKRVDFCGKGYHLMSFPQSAPHGVVFLHVTYVPAQEKNFTTAPAICHDGKAHFPREGVFVSNGTHWFVTQRNFYEPQIITTDNTFVSGNCDVVIGIVNNTVYDPLQPELDSGGGGSDIDPYKEFGSSYQLLNFLPLDFFPDLNALVDTATALYEEELTGREHCSPHHTAIRQALVCWDELTKLIAWMSSNITSEQVRTIIVNHVNDTWGLKVRQSLWFHLSCLTFGQHTVQEFLVSFGVWIRTPAPYRPPNAPILSTLPEHTVIC

SEQ ID NO: 10802 - protein, 1301 aa, Artificial Sequence
  SARS-CoV-2/Wuhan/HBCDC-HB-02/2020__EPI_ISL_412978 spike protein (1-1147)(K986P_V987P_T887W_A1020W) WhcAg construct
MFVFLVLLPLVSSQCVNLTTRTQLPPAYTNSFTRGVYYPDKVFRSSVLHSTQDLFLPFFSNVTWFHAIHVSGTNGTKRFDNPVLPFNDGVYFASTEKSNIIRGWIFGTTLDSKTQSLLIVNNATNVVIKVCEFQFCNDPFLGVYYHKNNKSWMESEFRVYSSANNCTFEYVSQPFLMDLEGKQGNFKNLREFVFKNIDGYFKIYSKHTPINLVRDLPQGFSALEPLVDLPIGINITRFQTLLALHRSYLTPGDSSSGWTAGAAAYYVGYLQPRTFLLKYNENGTITDAVDCALDPLSETKCTLKSFTVEKGIYQTSNFRVQPTESIVRFPNITNLCPFGEVFNATRFASVYAWNRKRISNCVADYSVLYNSASFSTFKCYGVSPTKLNDLCFTNVYADSFVIRGDEVRQIAPGQTGKIADYNYKLPDDFTGCVIAWNSNNLDSKVGGNYNYLYRLFRKSNLKPFERDISTEIYQAGSTPCNGVEGFNCYFPLQSYGFQPTNGVGYQPYRVVVLSFELLHAPATVCGPKKSTNLVKNKCVNFNFNGLTGTGVLTESNKKFLPFQQFGRDIADTTDAVRDPQTLEILDITPCSFGGVSVITPGTNTSNQVAVLYQDVNCTEVPVAIHADQLTPTWRVYSTGSNVFQTRAGCLIGAEHVNNSYECDIPIGAGICASYQTQTNSPRRARSVASQSIIAYTMSLGAENSVAYSNNSIAIPTNFTISVTTEILPVSMTKTSVDCTMYICGDSTECSNFLLQYGSFCTQLNRALTGIAVEQDKNTQEVFAQVKQIYKTPPIKDFGGFNFSQILPDPSKPSKRSFIEDLLFNKVTLADAGFIKQYGDCLGDIAARDLICAQKFNGLTVLPPLLTDEMIAQYTSALLAGTITSGWWFGAGAALQIPFAMQMAYRFNGIGVTQNVLYENQKLIANQFNSAIGKIQDSLSSTASALGKLQDVVNQNAQALNTLVKQLSSNFGAISSVLNDILSRLDPPEAEVQIDRLITGRLQSLQTYVTQQLIRAAEIRWSANLAATKMSECVLGQSKRVDFCGKGYHLMSFPQSAPHGVVFLHVTYVPAQEKNFTTAPAICHDGKAHFPREGVFVSNGTHWFVTQRNFYEPQIITTDNTFVSGNCDVVIGIVNNTVYDPLQPELDSGGGGSDIDPYKEFGSSYQLLNFLPLDFFPDLNALVDTATALYEEELTGREHCSPHHTAIRQALVCWDELTKLIAWMSSNITSEQVRTIIVNHVNDTWGLKVRQSLWFHLSCLTFGQHTVQEFLVSFGVWIRTPAPYRPPNAPILSTLPEHTVIC

SEQ ID NO: 10803 - protein, 1301 aa, Artificial Sequence
  SARS-CoV-2/Australia/QLD02/2020__EPI_ISL_407896 spike protein (1-1147)(K986P_V987P_T887W_A1020W) WhcAg construct
MFVFLVLLPLVSSQCVNLTTRTQLPPAYTNSFTRGVYYPDKVFRSSVLHSTQDLFLPFFSNVTWFHAIHVSGTNGTKRFDNPVLPFNDGVYFASTEKSNIIRGWIFGTTLDSKTQSLLIVNNATNVVIKVCEFQFCNDPFLGVYYHKNNKSWMESEFRVYSSANNCTFEYVSQPFLMDLEGKQGNFKNLREFVFKNIDGYFKIYSKHTPINLVRDLPQGFSALEPLVDLPIGINITRFQTLLALHRSYLTPGDSSSGWTAGAAAYYVGYLQPRTFLLKYNENGTITDAVDCALDPLSETKCTLKSFTVEKGIYQTSNFRVQPTESIVRFPNITNLCPFGEVFNATRFASVYAWNRKRISNCVADYSVLYNSASFSTFKCYGVSPTKLNDLCFTNVYADSFVIRGDEVRQIAPGQTGKIADYNYKLPDDFTGCVIAWNSNNLDSKVGGNYNYLYRLFRKSNLKPFERDISTEIYQAGSTPCNGVEGFNCYFPLQSYGFQPTNGVGYQPYRVVVLSFELLHAPATVCGPKKSTNLVKNKCVNFNFNGLTGTGVLTESNKKFLPFQQFGRDIADTTDAVRDPQTLEILDITPCSFGGVSVITPGTNTSNQVAVLYQDVNCTEVPVAIHADQLTPTWRVYSTGSNVFQTRAGCLIGAEHVNNSYECDIPIGAGICASYQTQTNSPRRARSVASQSIIAYTMSLGAENSVAYSNNSIAIPTNFTISVTTEILPVSMTKTSVDCTMYICGDSTECSNLLLQYGSFCTQLNRALTGIAVEQDKNTQEVFAQVKQIYKTPPIKDFGGFNFSQILPDPSKPSKRSFIEDLLFNKVTLADAGFIKQYGDCLGDIAARDLICAQKFNGLTVLPPLLTDEMIAQYTSALLAGTITSGWWFGAGAALQIPFAMQMAYRFNGIGVTQNVLYENQKLIANQFNSAIGKIQDSLSSTASALGKLQDVVNQNAQALNTLVKQLSSNFGAISSVLNDILSRLDPPEAEVQIDRLITGRLQSLQTYVTQQLIRAAEIRWSANLAATKMSECVLGQSKRVDFCGKGYHLMSFPQSAPHGVVFLHVTYVPAQEKNFTTAPAICHDGKAHFPREGVFVSNGTHWFVTQRNFYEPQIITTDNTFVSGNCDVVIGIVNNTVYDPLQLELDSGGGGSDIDPYKEFGSSYQLLNFLPLDFFPDLNALVDTATALYEEELTGREHCSPHHTAIRQALVCWDELTKLIAWMSSNITSEQVRTIIVNHVNDTWGLKVRQSLWFHLSCLTFGQHTVQEFLVSFGVWIRTPAPYRPPNAPILSTLPEHTVIC

SEQ ID NO: 10804 - protein, 1301 aa, Artificial Sequence
  SARS-CoV-2/India/1-31/2020__EPI_ISL_413523 spike protein (1-1147)(K986P_V987P_T887W_A1020W) WhcAg construct
MFVFLVLLPLVSSQCVNLTTRTQLPPAYTNSFTRGVYYPDKVFRSSVLHSTQDLFLPFFSNVTWFHAIHVSGTNGTKRFDNPVLPFNDGVYFASTEKSNIIRGWIFGTTLDSKTQSLLIVNNATNVVIKVCEFQFCNDPFLGVYYHKNNKSWMESEFRVYSSANNCTFEYVSQPFLMDLEGKQGNFKNLREFVFKNIDGYFKIYSKHTPINLVRDLPQGFSALEPLVDLPIGINITRFQTLLALHRSYLTPGDSSSGWTAGAAAYYVGYLQPRTFLLKYNENGTITDAVDCALDPLSETKCTLKSFTVEKGIYQTSNFRVQPTESIVRFPNITNLCPFGEVFNATRFASVYAWNRKRISNCVADYSVLYNSASFSTFKCYGVSPTKLNDLCFTNVYADSFVIRGDEVRQIAPGQTGKIADYNYKLPDDFTGCVIAWNSNNLDSKVGGNYNYLYRLFRKSNLKPFERDISTEIYQAGSTPCNGVEGFNCYFPLQSYGFQPTNGVGYQPYRVVVLSFELLHAPATVCGPKKSTNLVKNKCVNFNFNGLTGTGVLTESNKKFLPFQQFGRDIADTTDAVRDPQTLEILDITPCSFGGVSVITPGTNTSNQVAVLYQDVNCTEVPVAIHADQLTPTWRVYSTGSNVFQTRAGCLIGAEHVNNSYECDIPIGAGICASYQTQTNSPRRARSVASQSIIAYTMSLGAENSVAYSNNSIAIPTNFTISVTTEILPVSMTKTSVDCTMYICGDSTECSNLLLQYGSFCTQLNRALTGIAVEQDKNTQEVFAQVKQIYKTPPIKDFGGFNFSQILPDPSKPSKRSFIEDLLFNKVTLADAGFIKQYGDCLGDIAARDLICAQKFNGLTVLPPLLTDEMIAQYTSALLAGTITSGWWFGAGAALQIPFAMQMAYRFNGIGVTQNVLYENQKLIANQFNSVIGKIQDSLSSTASALGKLQDVVNQNAQALNTLVKQLSSNFGAISSVLNDILSRLDPPEAEVQIDRLITGRLQSLQTYVTQQLIRAAEIRWSANLAATKMSECVLGQSKRVDFCGKGYHLMSFPQSAPHGVVFLHVTYVPAQEKNFTTAPAICHDGKAHFPREGVFVSNGTHWFVTQRNFYEPQIITTDNTFVSGNCDVVIGIVNNTVYDPLQPELDSGGGGSDIDPYKEFGSSYQLLNFLPLDFFPDLNALVDTATALYEEELTGREHCSPHHTAIRQALVCWDELTKLIAWMSSNITSEQVRTIIVNHVNDTWGLKVRQSLWFHLSCLTFGQHTVQEFLVSFGVWIRTPAPYRPPNAPILSTLPEHTVIC

SEQ ID NO: 10805 - protein, 1301 aa, Artificial Sequence
  SARS-CoV-2/Guangdong/GD2020087-P0008/2020__EPI_ISL_413863 spike protein (1-1147)(K986P_V987P_T887W_A1020W) WhcAg construct
MFVFLVLLPLVSSQCVNLTTRTQLPPAYTNSFTRGVYYPDKVFRSSVLHSTQDLFLPFFSNVTWFHAIHVSGTNGTKRFDNPVLPFNDGVYFASTEKSNIIRGWIFGTTLDSKTQSLLIVNNATNVVIKVCEFQFCNDPFLGVYYHKNNKSWMESEFRVYSSANNCTFEYVSQPFLMDLEGKQGNFKNLREFVFKNIDGYFKIYSKHTPINLVRDLPQGFSALEPLVDLPIGINITRFQTLLALHRSYLTPGDSSSGWTAGAAAYYVGYLQPRTFLLKYNENGTITDAVDCALDPLSETKCTLKSFTVEKGIYQTSNFRVQPTESIVRFPNITNLCPFGEVFNATRFASVYAWNRKRISNCVADYSVLYNSASFSTFKCYGVSPTKLNDLCFTNVYADSFVIRGDEVREIAPGQTGKIADYNYKLPDDFTGCVIAWNSNNLDSKVGGNYNYLYRLFRKSNLKPFERDISTEIYQAGSTPCNGVEGFNCYFPLQSYGFQPTNGVGYQPYRVVVLSFELLHAPATVCGPKKSTNLVKNKCVNFNFNGLTGTGVLTESNKKFLPFQQFGRDIADTTDAVRDPQTLEILDITPCSFGGVSVITPGTNTSNQVAVLYQDVNCTEVPVAIHADQLTPTWRVYSTGSNVFQTRAGCLIGAEHVNNSYECDIPIGAGICASYQTQTNSPRRARSVASQSIIAYTMSLGAENSVAYSNNSIAIPTNFTISVTTEILPVSMTKTSVDCTMYICGDSTECSNLLLQYGSFCTQLNRALTGIAVEQDKNTQEVFAQVKQIYKTPPIKDFGGFNFSQILPDPSKPSKRSFIEDLLFNKVTLADAGFIKQYGDCLGDIAARDLICAQKFNGLTVLPPLLTDEMIAQYTSALLAGTITSGWWFGAGAALQIPFAMQMAYRFNGIGVTQNVLYENQKLIANQFNSAIGKIQDSLSSTASALGKLQDVVNQNAQALNTLVKQLSSNFGAISSVLNDILSRLDPPEAEVQIDRLITGRLQSLQTYVTQQLIRAAEIRWSANLAATKMSECVLGQSKRVDFCGKGYHLMSFPQSAPHGVVFLHVTYVPAQEKNFTTAPAICHDGKAHFPREGVFVSNGTHWFVTQRNFYEPQIITTDNTFVSGNCDVVIGIVNNTVYDPLQPELDSGGGGSDIDPYKEFGSSYQLLNFLPLDFFPDLNALVDTATALYEEELTGREHCSPHHTAIRQALVCWDELTKLIAWMSSNITSEQVRTIIVNHVNDTWGLKVRQSLWFHLSCLTFGQHTVQEFLVSFGVWIRTPAPYRPPNAPILSTLPEHTVIC

SEQ ID NO: 10806 - protein, 1301 aa, Artificial Sequence
  SARS-CoV-2/Sweden/01/2020__EPI_ISL_411951 spike protein (1-1147)(K986P_V987P_T887W_A1020W) WhcAg construct
MFVFLVLLPLVSSQCVNLTTRTQLPPAYTNSFTRGVYYPDKVFRSSVLHSTQDLFLPFFSNVTWFHAIHVSGTNGTKRFDNPVLPFNDGVYFASTEKSNIIRGWIFGTTLDSKTQSLLIVNNATNVVIKVCEFQFCNDPFLGVYYHKNNKSWMESEFRVYSSANNCTFEYVSQPFLMDLEGKQGNFKNLREFVFKNIDGYFKIYSKHTPINLVRDLPQGFSALEPLVDLPIGINITRFQTLLALHRSYLTPGDSSSGWTAGAAAYYVGYLQPRTFLLKYNENGTITDAVDCALDPLSETKCTLKSFTVEKGIYQTSNFRVQPTESIVRFPNITNLCPFGEVFNATRFASVYAWNRKRISNCVADYSVLYNSASFSTFKCYGVSPTKLNDLCFTNVYADSFVIRGDEVRQIAPGQTGKIADYNYKLPDDFTGCVIAWNSNNLDSKVGGNYNYLYRLFRKSNLKPFERDISTEIYQAGSTPCNGVEGFNCYFPLQSYGFQPTNGVGYQPYRVVVLSFELLHAPATVCGPKKSTNLVKNKCVNFNFNGLTGTGVLTESNKKFLPFQQFGRDIADTTDAVRDPQTLEILDITPCSFGGVSVITPGTNTSNQVAVLYQDVNCTEVPVAIHADQLTPTWRVYSTGSNVFQTRAGCLIGAEHVNNSYECDIPIGAGICASYQTQTNSPRRARSVASQSIIAYTMSLGAENSVAYSNNSIAIPTNFTISVTTEILPVSMTKTSVDCTMYICGDSTECSNLLLQYGSFCTQLNRALTGIAVEQDKNTQEVFAQVKQIYKTPPIKDCGGFNFSQILPDPSKPSKRSFIEDLLFNKVTLADAGFIKQYGDCLGDIAARDLICAQKFNGLTVLPPLLTDEMIAQYTSALLAGTITSGWWFGAGAALQIPFAMQMAYRFNGIGVTQNVLYENQKLIANQFNSAIGKIQDSLSSTASALGKLQDVVNQNAQALNTLVKQLSSNFGAISSVLNDILSRLDPPEAEVQIDRLITGRLQSLQTYVTQQLIRAAEIRWSANLAATKMSECVLGQSKRVDFCGKGYHLMSFPQSAPHGVVFLHVTYVPAQEKNFTTAPAICHDGKAHFPREGVFVSNGTHWFVTQRNFYEPQIITTDNTFVSGNCDVVIGIVNNTVYDPLQPELDSGGGGSDIDPYKEFGSSYQLLNFLPLDFFPDLNALVDTATALYEEELTGREHCSPHHTAIRQALVCWDELTKLIAWMSSNITSEQVRTIIVNHVNDTWGLKVRQSLWFHLSCLTFGQHTVQEFLVSFGVWIRTPAPYRPPNAPILSTLPEHTVIC

SEQ ID NO: 10807 - protein, 1301 aa, Artificial Sequence
  SARS-CoV-2/Tianmen/HBCDC-HB-07/2020__EPI_ISL_412983 spike protein (1-1147)(K986P_V987P_T887W_A1020W) WhcAg construct
MFVFLVLLPLVSSQCVNLTTRTQLPPAYTNSFTRGVYYPDKVFRSSVLHSTQDLFLPFFSNVTWFHAIHVSGTNGTKRFDNPVLPFNDGVYFASTEKSNIIRGWIFGTTLDSKTQSLLIVNNATNVVIKVCEFQFCNDPFLGVYYHKNNKSWMESEFRVYSSANNCTFEYVSQPFLMDLEGKQGNFKNLREFVFKNIDGYFKIYSKHTPINLVRDLPQGFSALEPLVDLPIGINITRFQTLLALHRSYLTPGDSSSGWTAGAAAYYVGYLQPRTFLLKYNENGTITDAVDCALDPLSETKCTLKSFTVEKGIYQTSNFRVQPTESIVRFPNITNLCPFGEVFNATRFASVYAWNRKRISNCVADYSVLYNSASFSTFKCYGVSPTKLNDLCFTNVYADSFVIRGDEVRQIAPGQTGKIADYNYKLPDDFTGCVIAWNSNNLDSKVGGNYNYLYRLFRKSNLKPFERDISTEIYQAGSTPCNGVEGFNCYFPLQSYGFQPTNGVGYQPYRVVVLSFELLHAPATVCGPKKSTNLVKNKCVNFNFNGLTGTGVLTESNKKFLPFQQFGRDIADTTDAVRDPQTLEILDITPCSFGGVSVITPGTNTSNQVAVLYQDLNCTEVPVAIHADQLTPTWRVYSTGSNVFQTRAGCLIGAEHVNNSYECDIPIGAGICASYQTQTNSPRRARSVASQSIIAYTMSLGAENSVAYSNNSIAIPTNFTISVTTEILPVSMTKTSVDCTMYICGDSTECSNLLLQYGSFCTQLNRALTGIAVEQDKNTQEVFAQVKQIYKTPPIKDFGGFNFSQILPDPSKPSKRSFIEDLLFNKVTLADAGFIKQYGDCLGDIAARDLICAQKFNGLTVLPPLLTDEMIAQYTSALLAGTITSGWWFGAGAALQIPFAMQMAYRFNGIGVTQNVLYENQKLIANQFNSAIGKIQDSLSSTASALGKLQDVVNQNAQALNTLVKQLSSNFGAISSVLNDILSRLDPPEAEVQIDRLITGRLQSLQTYVTQQLIRAAEIRWSANLAATKMSECVLGQSKRVDFCGKGYHLMSFPQSAPHGVVFLHVTYVPAQEKNFTTAPAICHDGKAHFPREGVFVSNGTHWFVTQRNFYEPQIITTDNTFVSGNCDVVIGIVNNTVYDPLQPELDSGGGGSDIDPYKEFGSSYQLLNFLPLDFFPDLNALVDTATALYEEELTGREHCSPHHTAIRQALVCWDELTKLIAWMSSNITSEQVRTIIVNHVNDTWGLKVRQSLWFHLSCLTFGQHTVQEFLVSFGVWIRTPAPYRPPNAPILSTLPEHTVIC

SEQ ID NO: 10808 - protein, 1301 aa, Artificial Sequence
  SARS-CoV-2/Hong Kong/case42_VM20002493/2020__EPI_ISL_414527 spike protein (1-1147)(K986P_V987P_T887W_A1020W) WhcAg construct
MFVFLVLLPLVSSQCVNLTTRTQLPPAYTNSFTRGVYYPDKVFRSSVLHSTQDLFLPFFSNVTWFHAIHVSGTNGTKRFDNPVLPFNDGVYFASTEKSNIIRGWIFGTTLDSKTQSLLIVNNATNVVIKVCEFQFCNDPFLGVYYHKNNKSWMESEFRVYSSANNCTFEYVSQPFLMDLEGKQGNFKNLREFVFKNIDGYFKIYSKHTPINLVRDLPQGFSALEPLVDLPIGINITRFQTLLALHRSYLTPGDSSSGWTAGAAAYYVGYLQPRTFLLKYNENGTITDAVDCALDPLSETKCTLKSFTVEKGIYQTSNFRVQPTESIVRFPNITNLCPFGEVFNATRFASVYAWNRKRISNCVADYSVLYNSASFSTFKCYGVSPTKLNDLCFTNVYADSFVIRGDEVRQIAPGQTGKIADYNYKLPDDFTGCVIAWNSNNLDSKVGGNYNYLYRLFRKSNLKPFERDISTEIYQAGSTPCNGVEGFNCYFPLQSYGFQPTNGVGYQPYRVVVLSFELLHAPATVCGPKKSTNLVKNKCVNFNFNGLTGTGVLTESNKKFLPFQQFGRDIADTTDAVRDPQTLEILDITPCSFGGVSVITPGTNTSNQVAVLYQDVNCTEVPVAIHADQLTPTWRVYSTGSNVFQTRAGCLIGAEHVNNSYECDIPIGAGICASYQTQTNSPRRARSVASQSIIAYTMSLGAENSVAYSNNSIAIPTNFAISVTTEILPVSMTKTSVDCTMYICGDSTECSNLLLQYGSFCTQLNRALTGIAVEQDKNTQEVFAQVKQIYKTPPIKDFGGFNFSQILPDPSKPSKRSFIEDLLFNKVTLADAGFIKQYGDCLGDIAARDLICAQKFNGLTVLPPLLTDEMIAQYTSALLAGTITSGWWFGAGAALQIPFAMQMAYRFNGIGVTQNVLYENQKLIANQFNSAIGKIQDSLSSTASALGKLQDVVNQNAQALNTLVKQLSSNFGAISSVLNDILSRLDPPEAEVQIDRLITGRLQSLQTYVTQQLIRAAEIRWSANLAATKMSECVLGQSKRVDFCGKGYHLMSFPQSAPHGVVFLHVTYVPAQEKNFTTAPAICHDGKAHFPREGVFVSNGTHWFVTQRNFYEPQIITTDNTFVSGNCDVVIGIVNNTVYDPLQPELDSGGGGSDIDPYKEFGSSYQLLNFLPLDFFPDLNALVDTATALYEEELTGREHCSPHHTAIRQALVCWDELTKLIAWMSSNITSEQVRTIIVNHVNDTWGLKVRQSLWFHLSCLTFGQHTVQEFLVSFGVWIRTPAPYRPPNAPILSTLPEHTVIC

SEQ ID NO: 10809 - protein, 1301 aa, Artificial Sequence
  SARS-CoV-2/USA/CruiseA-23/2020__EPI_ISL_414482 spike protein (1-1147)(K986P_V987P_T887W_A1020W) WhcAg construct
MFVFLVLLPLVSSQCVNLTTRTQLPPAYTNSFTRGVYYPDKVFRSSVLHSTQDLFLPFFSNVTWFHAIHVSGTNGTKRFDNPVLPFNDGVYFASTEKSNIIRGWIFGTTLDSKTQSLLIVNNATNVVIKVCEFQFCNDPFLGVYYHKNNKSWMESEFRVYSSANNCTFEYVSQPFLMDLEVKQGNFKNLREFVFKNIDGYFKIYSKHTPINLVRDLPQGFSALEPLVDLPIGINITRFQTLLALHRSYLTPGDSSSGWTAGAAAYYVGYLQPRTFLLKYNENGTITDAVDCALDPLSETKCTLKSFTVEKGIYQTSNFRVQPTESIVRFPNITNLCPFGEVFNATRFASVYAWNRKRISNCVADYSVLYNSASFSTFKCYGVSPTKLNDLCFTNVYADSFVIRGDEVRQIAPGQTGKIADYNYKLPDDFTGCVIAWNSNNLDSKVGGNYNYLYRLFRKSNLKPFERDISTEIYQAGSTPCNGVEGFNCYFPLQSYGFQPTNGVGYQPYRVVVLSFELLHAPATVCGPKKSTNLVKNKCVNFNFNGLTGTGVLTESNKKFLPFQQFGRDIADTTDAVRDPQTLEILDITPCSFGGVSVITPGTNTSNQVAVLYQDVNCTEVPVAIHADQLTPTWRVYSTGSNVFQTRAGCLIGAEHVNNSYECDIPIGAGICASYQTQTNSPRRARSVASQSIIAYTMSLGAENSVAYSNNSIAIPTNFTISVTTEILPVSMTKTSVDCTMYICGDSTECSNLLLQYGSFCTQLNRALTGIAVEQDKNTQEVFAQVKQIYKTPPIKDFGGFNFSQILPDPSKPSKRSFIEDLLFNKVTLADAGFIKQYGDCLGDIAARDLICAQKFNGLTVLPPLLTDEMIAQYTSALLAGTITSGWWFGAGAALQIPFAMQMAYRFNGIGVTQNVLYENQKLIANQFNSAIGKIQDSLSSTASALGKLQDVVNQNAQALNTLVKQLSSNFGAISSVLNDILSRLDPPEAEVQIDRLITGRLQSLQTYVTQQLIRAAEIRWSANLAATKMSECVLGQSKRVDFCGKGYHLMSFPQSAPHGVVFLHVTYVPAQEKNFTTAPAICHDGKAHFPREGVFVSNGTHWFVTQRNFYEPQIITTDNTFVSGNCDVVIGIVNNTVYDPLQPELDSGGGGSDIDPYKEFGSSYQLLNFLPLDFFPDLNALVDTATALYEEELTGREHCSPHHTAIRQALVCWDELTKLIAWMSSNITSEQVRTIIVNHVNDTWGLKVRQSLWFHLSCLTFGQHTVQEFLVSFGVWIRTPAPYRPPNAPILSTLPEHTVIC

SEQ ID NO: 10810 - protein, 1301 aa, Artificial Sequence
  SARS-CoV-2/Hong Kong/case85_VM20002868/2020__EPI_ISL_414519 spike protein (1-1147)(K986P_V987P_T887W_A1020W) WhcAg construct
MFVFLVLVPLVSSQCVNLTTRTQLPPAYTNSFTRGVYYPDKVFRSSVLHSTQDLFLPFFSNVTWFHAIHVSGTNGTKRFDNPVLPFNDGVYFASTEKSNIIRGWIFGTTLDSKTQSLLIVNNATNVVIKVCEFQFCNDPFLGVYYHKNNKSWMESEFRVYSSANNCTFEYVSQPFLMDLEGKQGNFKNLREFVFKNIDGYFKIYSKHTPINLVRDLPQGFSALEPLVDLPIGINITRFQTLLALHRSYLTPGDSSSGWTAGAAAYYVGYLQPRTFLLKYNENGTITDAVDCALDPLSETKCTLKSFTVEKGIYQTSNFRVQPTESIVRFPNITNLCPFGEVFNATRFASVYAWNRKRISNCVADYSVLYNSASFSTFKCYGVSPTKLNDLCFTNVYADSFVIRGDEVRQIAPGQTGKIADYNYKLPDDFTGCVIAWNSNNLDSKVGGNYNYLYRLFRKSNLKPFERDISTEIYQAGSTPCNGVEGFNCYFPLQSYGFQPTNGVGYQPYRVVVLSFELLHAPATVCGPKKSTNLVKNKCVNFNFNGLTGTGVLTESNKKFLPFQQFGRDIADTTDAVRDPQTLEILDITPCSFGGVSVITPGTNTSNQVAVLYQDVNCTEVPVAIHADQLTPTWRVYSTGSNVFQTRAGCLIGAEHVNNSYECDIPIGAGICASYQTQTNSPRRARSVASQSIIAYTMSLGAENSVAYSNNSIAIPTNFTISVTTEILPVSMTKTSVDCTMYICGDSTECSNLLLQYGSFCTQLNRALTGIAVEQDKNTQEVFAQVKQIYKTPPIKDFGGFNFSQILPDPSKPSKRSFIEDLLFNKVTLADAGFIKQYGDCLGDIAARDLICAQKFNGLTVLPPLLTDEMIAQYTSALLAGTITSGWWFGAGAALQIPFAMQMAYRFNGIGVTQNVLYENQKLIANQFNSAIGKIQDSLSSTASALGKLQDVVNQNAQALNTLVKQLSSNFGAISSVLNDILSRLDPPEAEVQIDRLITGRLQSLQTYVTQQLIRAAEIRWSANLAATKMSECVLGQSKRVDFCGKGYHLMSFPQSAPHGVVFLHVTYVPAQEKNFTTAPAICHDGKAHFPREGVFVSNGTHWFVTQRNFYEPQIITTDNTFVSGNCDVVIGIVNNTVYDPLQPELDSGGGGSDIDPYKEFGSSYQLLNFLPLDFFPDLNALVDTATALYEEELTGREHCSPHHTAIRQALVCWDELTKLIAWMSSNITSEQVRTIIVNHVNDTWGLKVRQSLWFHLSCLTFGQHTVQEFLVSFGVWIRTPAPYRPPNAPILSTLPEHTVIC

SEQ ID NO: 10811 - protein, 1301 aa, Artificial Sequence; identical to SEQ ID NO: 10801
  SARS-CoV-2/England/200990660/2020__EPI_ISL_414523 spike protein (1-1147)(K986P_V987P_T887W_A1020W) WhcAg construct

SEQ ID NO: 10812 - protein, 1301 aa, Artificial Sequence
  SARS-CoV-2/Australia/NSW09/2020__EPI_ISL_413595 spike protein (1-1147)(K986P_V987P_T887W_A1020W) WhcAg construct
MFVFLVLLPLVSSQCVNLTTRTQLPPAYTNSFTRGVYYPDKVFRSSVLHSTQDLFLPFFSNVTWFHAIHVSGTNGTKRFDNPVLPFNDGVYFASTEKSNIIRGWIFGTTLDSKTQSLLIVNNATNVVIKVCEFQFCNDPFLGVYYHKNNKSWMESEFRVYSSANNCTFEYVSQPFLMDLEGKQGNFKNLREFVFKNIDGYFKIYSKHTPINLVRDLPQGFSALEPLVDLPIGINITRFQTLLALHRSYLTPGDSSSGWTAGAAAYYVGYLQPRTFLLKYNENGTITDAVDCALDPLSETKCTLKSFTVEKGIYQTSNFRVQPTESIVRFPNITNLCPFGEVFNATRFASVYAWNRKRISNCVADYSVLYNSASFSTFKCYGVSPTKLNDLCFTNVYADSFVIRGDEVRQIAPGQTGKIADYNYKLPDDFTGCVIAWNSNNLDSKVGGNYNYLYRLFRKSNLKPFERDISTEIYQAGSTPCNGVEGFNCYFPLQSYGFQPTNGVGYQPYRVVVLSFELLHAPATVCGPKKSTNLVKNKCVNFNFNGLTGTGVLTESNKKFLPFQQFGRDIADTTDAVRDPQTLEILDITPCSFGGVSVITPGTNTSNQVAVLYQDVNCTEVPVAIHADQLTPTWRVYSTGSNVFQTRAGCLIGAEHVNNSYECDIPIGAGICASYQTQTNSPRRARSVASQSIIAYTMSLGAENSVAYSNNSIAIPTNFTISVTTEILPVSMTKTSVDCTMYICGDSTECSNLLLQYGSFCTQLNRALTGIAVEQDKNTQEVFAQVKQIYKTPPIKDFGGFNFSQILPDPSKPSKRSFIEDLLFNKVTLADAGFIKQYGDCLGDIAARDLICAQKFNGLTVLPPLLTDEMIAQYTSALLAGTITSGWWFGAGAALQIPFAMQMAYRFNGIGVTQNVLYENQKLIANQFNSAIGKIQDSLSFTASALGKLQDVVNQNAQALNTLVKQLSSNFGAISSVLNDILSRLDPPEAEVQIDRLITGRLQSLQTYVTQQLIRAAEIRWSANLAATKMSECVLGQSKRVDFCGKGYHLMSFPQSAPHGVVFLHVTYVPAQEKNFTTAPAICHDGKAHFPREGVFVSNGTHWFVTQRNFYEPQIITTDNTFVSGNCDVVIGIVNNTVYDPLQPELDSGGGGSDIDPYKEFGSSYQLLNFLPLDFFPDLNALVDTATALYEEELTGREHCSPHHTAIRQALVCWDELTKLIAWMSSNITSEQVRTIIVNHVNDTWGLKVRQSLWFHLSCLTFGQHTVQEFLVSFGVWIRTPAPYRPPNAPILSTLPEHTVIC

SEQ ID NO: 10813 - protein, 1301 aa, Artificial Sequence; identical to SEQ ID NO: 10793
  SARS-CoV-2/Australia/NSW10/2020__EPI_ISL_413596 spike protein (1-1147)(K986P_V987P_T887W_A1020W) WhcAg construct

SEQ ID NO: 10814 - protein, 1301 aa, Artificial Sequence
  SARS-CoV-2/Switzerland/1000477797/2020__EPI_ISL_413023 spike protein (1-1147)(K986P_V987P_T887W_A1020W) WhcAg construct
MFVFLVLLPLVSSQCVNLTTRTQLPPAYTNSFTRGVYYPDKVFRSSVLHSTQDLFLPFFSNVTWFHAIHVSGTNGTKRFDNPVLPFNDGVYFASTEKSNIIRGWIFGTTLDSKTQSLLIVNNATNVVIKVCEFQFCNDPFLGVYYHKNNKSWMESEFRVYSSANNCTFEYVSQPFLMDLEGKQGNFKNLREFVFKNIDGYFNIYSKHTPINLVRDLPQGFSALEPLVDLPIGINITRFQTLLALHRSYLTPGDSSSGWTAGAAAYYVGYLQPRTFLLKYNENGTITDAVDCALDPLSETKCTLKSFTVEKGIYQTSNFRVQPTESIVRFPNITNLCPFGEVFNATRFASVYAWNRKRISNCVADYSVLYNSASFSTFKCYGVSPTKLNDLCFTNVYADSFVIRGDEVRQIAPGQTGKIADYNYKLPDDFTGCVIAWNSNNLDSKVGGNYNYLYRLFRKSNLKPFERDISTEIYQAGSTPCNGVEGFNCYFPLQSYGFQPTNGVGYQPYRVVVLSFELLHAPATVCGPKKSTNLVKNKCVNFNFNGLTGTGVLTESNKKFLPFQQFGRDIADTTDAVRDPQTLEILDITPCSFGGVSVITPGTNTSNQVAVLYQGVNCTEVPVAIHADQLTPTWRVYSTGSNVFQTRAGCLIGAEHVNNSYECDIPIGAGICASYQTQTNSPRRARSVASQSIIAYTMSLGAENSVAYSNNSIAIPTNFTISVTTEILPVSMTKTSVDCTMYICGDSTECSNLLLQYGSFCTQLNRALTGIAVEQDKNTQEVFAQVKQIYKTPPIKDFGGFNFSQILPDPSKPSKRSFIEDLLFNKVTLADAGFIKQYGDCLGDIAARDLICAQKFNGLTVLPPLLTDEMIAQYTSALLAGTITSGWWFGAGAALQIPFAMQMAYRFNGIGVTQNVLYENQKLIANQFNSAIGKIQDSLSSTASALGKLQDVVNQNAQALNTLVKQLSSNFGAISSVLNDILSRLDPPEAEVQIDRLITGRLQSLQTYVTQQLIRAAEIRWSANLAATKMSECVLGQSKRVDFCGKGYHLMSFPQSAPHGVVFLHVTYVPAQEKNFTTAPAICHDGKAHFPREGVFVSNGTHWFVTQRNFYEPQIITTDNTFVSGNCDVVIGIVNNTVYDPLQPELDSGGGGSDIDPYKEFGSSYQLLNFLPLDFFPDLNALVDTATALYEEELTGREHCSPHHTAIRQALVCWDELTKLIAWMSSNITSEQVRTIIVNHVNDTWGLKVRQSLWFHLSCLTFGQHTVQEFLVSFGVWIRTPAPYRPPNAPILSTLPEHTVIC

SEQ ID NO: 10815 - protein, 1301 aa, Artificial Sequence
  SARS-CoV-2/Belgium/BA-02291/2020__EPI_ISL_415159 spike protein (1-1147)(K986P_V987P_T887W_A1020W) WhcAg construct
MFVFLVLLPLVSSQCVNLTTRTQLPPAYTNSFTRGVYYPDKVFRSSVLHSTQDLFLPFFSNVTWFHAIHVSGTNGTKRFDNPVLPFNDGVYFASTEKSNIIRGWIFGTTLDSKTQSLLIVNNATNVVIKVCEFQFCNDPFLGVYYHKNNKSWMESEFRVYSSANNCTFEYVSQPFLMDLEGKQGNFKNLREFVFKNIDGYFKIYSKHTPINLVRDLPQGFSALEPLVDLPIGINITRFQTLLALHRSYLTPGDSSSGWTAGAAAYYVGYLQPRTFLLKYNENGTITDAVDCALDPLSETKCTLKSFTVEKGIYQTSNFRVQPTESIVRFPNITNLCPFGEVFNATRFASVYAWNRKRISNCVADYSVLYNSASFSTFKCYGVSPTKLNDLCFTNVYADSFVIRGDEVRQIAPGQTGKIADYNYKLPDDFTGCVIAWNSNNLDSKVGGNYNYLYRLFRRSNLKPFERDISTEIYQAGSTPCNGVEGFNCYFPLQSYGFQPTNGVGYQPYRVVVLSFELLPAPATVCGPKKSTNLVKNKCVNFNFNGLTGTGVLTESNKKFLPFQQFGRDIADTTDAVRDPQTLEILDITPCSFGGVSVITPGTNTSNQVAVLYQGVNCTEVPVAIHADQLTPTWRVYSTGSNVFQTRAGCLIGAEHVNNSYECDIPIGAGICASYQTQTNSPRRARSVASQSIIAYTMSLGAENSVAYSNNSIAIPTNFTISVTTEILPVSMTKTSVDCTMYICGDSTECSNLLLQYGSFCTQLNRALTGIAVEQDKNTQEVFAQVKQIYKTPPIKDFGGFNFSQILPDPSKPSKRSFIEDLLFNKVTLADAGFIKQYGDCLGDIAARDLICAQKFNGLTVLPPLLTDEMIAQYTSALLAGTITSGWWFGAGAALQIPFAMQMAYRFNGIGVTQNVLYENQKLIANQFNSAIGKIQDSLSSAAPALGKLQDVVNQNAQALNTLVKQLSSNFGAISSVLNDILSRLDPPEAEVQIDRLITGRLQSLQTYVTQQLIRAAEIRWSANLAATKMSECVLGQSKRVDFCGKGYHLMSFPQSAPHGVVFLHVTYVPAQEKNFTTAPAICHDGKAHFPREGVFVSNGTHWFVTQRNFYEPQIITTDNTFVSGNCDVVIGIVNNTVYDPLQPELDSGGGGSDIDPYKEFGSSYQLLNFLPLDFFPDLNALVDTATALYEEELTGREHCSPHHTAIRQALVCWDELTKLIAWMSSNITSEQVRTIIVNHVNDTWGLKVRQSLWFHLSCLTFGQHTVQEFLVSFGVWIRTPAPYRPPNAPILSTLPEHTVIC

SEQ ID NO: 10816 - protein, 1301 aa, Artificial Sequence
  SARS-CoV-2/USA/WA8-UW5/2020__EPI_ISL_413486 spike protein (1-1147)(K986P_V987P_T887W_A1020W) WhcAg construct
MFVFLVLLPLVSSQCVNLTTRTQLPPAYTNSFTRGVYYPDKVFRSSVLHSTQDLFLPFFSNVTWFHAIHVSGTNGTKRFDNPVLPFNDGVYFASTEKSNIIRGWIFGTTLDSKTQSLLIVNNATNVVIKVCEFQFCNDPFLGVYYHKNNKSWMESEFRVYSSANNCTFEYVSQPFLMDLEGKQGNFKNLREFVFKNIDGYFKIYSKHTPINLVRDLPQGFSALEPLVDLPIGINITRFQTLLALHRSYLTPGDSSSGWTAGAAAYYVGYLQPRTFLLKYNENGTITDAVDCALDPLSETKCTLKSFTVEKGIYQTSNFRVQPTESIVRFPNITNLCPFGEVFNATRFASVYAWNRKRISNCVADYSVLYNSASFSTFKCYGVSPTKLNDLCFTNVYADSFVIRGDEVRQIAPGQTGKIADYNYKLPDDFTGCVIAWNSNNLDSKVGGNYNYLYRLFRKSNLKPFERDISTEIYQAGSTPCNGVEGFNCYFPLQSYGFQPTNGVGYQPYRVVVLSFELLHAPATVCGPKKSTNLVKNKCVNFNFNGLTGTGVLTESNKKFLPFQQFGRDIADTTDAVRDPQTLEILDITPCSFGGVSVITPGTNTSNQVAVLYQDVNCTEVPVAIHADQLTPTWRVYSTGSNVFQTRAGCLIGAEYVNNSYECDIPIGAGICASYQTQTNSPRRARSVASQSIIAYTMSLGAENSVAYSNNSIAIPTNFTISVTTEILPVSMTKTSVDCTMYICGDSTECSNLLLQYGSFCTQLNRALTGIAVEQDKNTQEVFAQVKQIYKTPPIKDFGGFNFSQILPDPSKPSKRSFIEDLLFNKVTLADAGFIKQYGDCLGDIAARDLICAQKFNGLTVLPPLLTDEMIAQYTSALLAGTITSGWWFGAGAALQIPFAMQMAYRFNGIGVTQNVLYENQKLIANQFNSAIGKIQDSLSSTASALGKLQDVVNQNAQALNTLVKQLSSNFGAISSVLNDILSRLDPPEAEVQIDRLITGRLQSLQTYVTQQLIRAAEIRWSANLAATKMSECVLGQSKRVDFCGKGYHLMSFPQSAPHGVVFLHVTYVPAQEKNFTTAPAICHDGKAHFPREGVFVSNGTHWFVTQRNFYEPQIITTDNTFVSGNCDVVIGIVNNTVYDPLQPELDSGGGGSDIDPYKEFGSSYQLLNFLPLDFFPDLNALVDTATALYEEELTGREHCSPHHTAIRQALVCWDELTKLIAWMSSNITSEQVRTIIVNHVNDTWGLKVRQSLWFHLSCLTFGQHTVQEFLVSFGVWIRTPAPYRPPNAPILSTLPEHTVIC

SEQ ID NO: 10817 - protein, 1301 aa, Artificial Sequence
  SARS-CoV-2/England/20102000506/2020__EPI_ISL_415147 spike protein (1-1147)(K986P_V987P_T887W_A1020W) WhcAg construct
MFVFLVLLPLVSSQCVNLTTRTQLPPAYTNSFTRGVYYPDKVFRSSVLHSTQDLFLPFFSNVTWFHAIHVSGTNGTKRFDNPVLPFNDGVYFASTEKSNIIRGWIFGTTLDSKTQSLLIVNNATNVVIKVCEFQFCNDPFLGVYYHKNNKSWMESEFRVYSSANNCTFEYVSQPFLMDLEGKQGNFKNLREFVFKNIDGYFKIYSKHTPINLVRDLPQGFSALEPLVDLPIGINITRFQTLLALHRSYLTPGDSSSGWTAGAAAYYVGYLQPRTFLLKYNENGTITDAVDCALDPLSETKCTLKSFTVEKGIYQTSNFRVQPTESIVRFPNITNLCPFGEVFNATRFASVYAWNRKRISNCVADYSVLYNSASFSTFKCYGVSPTKLNDLCFTNVYADSFVIRGDEVRQIAPGQTGKIADYNYKLPDDFTGCVIAWNSNNLDSKVGGNYNYLYRLFRKSNLKPFERDISTEIYQAGSTPCNGVEGFNCYFPLQSYGFQPTNGVGYQPYRVVVLSFELLHAPATVCGPKKSTNLVKNKCVNFNFNGLTGTGVLTESNKKFLPFQQFGRDIADTTDAVRDPQTLEILDITPCSFGGVSVITPGTNTSNQVAVLYQGVNCTEVPVAIHADQLTPTWRVYSTGSNVFQTRAGCLIGAEHVNNSYECDIPIGAGICASYQTQTNSPRRARSVASQSIIAYTMSLGAENSVAYSNNSIAIPTNFTISVTTEILPVSMTKTSVDCTMYICGDSTECSNLLLQYGSFCTQLNRALTGIAVEQDKNTQEVFAQVKQIYKTPPIKDFGGFNFSQILPDPSKPSKRSFIEDLLFNKVTLADAGFIKQYGYCLGDIAARDLICAQKFNGLTVLPPLLTDEMIAQYTSALLAGTITSGWWFGAGAALQIPFAMQMAYRFNGIGVTQNVLYENQKLIANQFNSAIGKIQDSLSSTASALGKLQDVVNQNAQALNTLVKQLSSNFGAISSVLNDILSRLDPPEAEVQIDRLITGRLQSLQTYVTQQLIRAAEIRWSANLAATKMSECVLGQSKRVDFCGKGYHLMSFPQSAPHGVVFLHVTYVPAQEKNFTTAPAICHDGKAHFPREGVFVSNGTHWFVTQRNFYEPQIITTDNTFVSGNCDVVIGIVNNTVYDPLQPELDSGGGGSDIDPYKEFGSSYQLLNFLPLDFFPDLNALVDTATALYEEELTGREHCSPHHTAIRQALVCWDELTKLIAWMSSNITSEQVRTIIVNHVNDTWGLKVRQSLWFHLSCLTFGQHTVQEFLVSFGVWIRTPAPYRPPNAPILSTLPEHTVIC

SEQ ID NO: 10818 - protein, 1301 aa, Artificial Sequence
  SARS-CoV-2/Belgium/VAG-03013/2020__EPI_ISL_415155 spike protein (1-1147)(K986P_V987P_T887W_A1020W) WhcAg construct
MFVFLVLLPLVSSQCVNLTTRTQLPPAYTNSFTRGVYYPDKVFRSSVLHSTQDLFLPFFSNVTWFHAIHVSGTNGTKRFDNPVLPFNDGVYFASTEKSNIIRGWIFGTTLDSKTQSLLIVNNATNVVIKVCEFQFCNDPFLGVYYHKNNKSWMESEFRVYSSANNCTFEYVSQPFLMDLEGKQGNFKNLREFVFKNIDGYFKIYSKHTPINLVRDLPQGFSALEPLVDLPIGINITRFQTLLALHRSYLTPGDSSSGWTAGAAAYYVGYLQPRTFLLKYNENGTITDAVDCALDPLSETKCTLKSFTVEKGIYQTSNFRVQPTESIVRFPNITNLCPFGEVFNATRFASVYAWNRKRISNCVADYSVLYNSASFSTFKCYGVSPTKLNDLCFTNVYADSFVIRGDEVRQIAPGQTGKIADYNYKLPDDFTGCVIAWNSNNLDSKVGGNYNYLYRLFRKSNLKPFERDISTEIYQAGSTPCNGVEGFNCYFPLQSYGFQPTNGVGYQPYRVVVLSFELLHAPATVCGPKKSTNLVKNKCVNFNFNGLTGTGVLTESNKKFLPFQQFGRDIADTTDAVRDPQTLEILDITPCSFGGVSVITPGTNTSNQVAVLYQGVNCTEVPVAIHADQLTPTWRVYSTGSNVFQTRAGCLIGAEHVNNSYECDIPIGAGICASYQTQTNSPRRARSVASQSIIAYTMSLGAENSVAYSNNSIAIPTNFTISVTTEILPVSMTKTSVDCTMYICGDSTECSNLLLQYGSFCTQLNRALTGIAVEQDKNTQEVFAQVKQIYKTPPIKDFGGFNFSQILPDPSKPSKRSFIEDLLFNKVTLADAGFIKQYGDCLGDIAARDLICAQKFNGLTVLPPLLTDEMIAQYTSALLAGTITSGWWFGAGAALQIPFAMQMAYRFNGIGVTQNVLYENQKLIANQFNSAIGKIQDSLSSTATALGKLQDVVNQNAQALNTLVKQLSSNFGAISSVLNDILSRLDPPEAEVQIDRLITGRLQSLQTYVTQQLIRAAEIRWSANLAATKMSECVLGQSKRVDFCGKGYHLMSFPQSAPHGVVFLHVTYVPAQEKNFTTAPAICHDGKAHFPREGVFVSNGTHWFVTQRNFYEPQIITTDNTFVSGNCDVVIGIVNNTVYDPLQPELDSGGGGSDIDPYKEFGSSYQLLNFLPLDFFPDLNALVDTATALYEEELTGREHCSPHHTAIRQALVCWDELTKLIAWMSSNITSEQVRTIIVNHVNDTWGLKVRQSLWFHLSCLTFGQHTVQEFLVSFGVWIRTPAPYRPPNAPILSTLPEHTVIC

SEQ ID NO: 10819 - protein, 1301 aa, Artificial Sequence
  SARS-CoV-2/Belgium/BC-03016/2020__EPI_ISL_415157 spike protein (1-1147)(K986P_V987P_T887W_A1020W) WhcAg construct
MFVFLVLLPLVSSQCVNLTTRTQLPPAYTNSFTRGVYYPDKVFRSSVLHSTQDLFLPFFSNVTWFHAIHVSGTNGTKRFDNPVLPFNDGVYFASTEKSNIIRGWIFGTTLDSKTQSLLIVNNATNVVIKVCEFQFCNDPFLGVYYHKNNKSWMESEFRVYSSANNCTFEYVSQPFLMDLEGKQGNFKNLREFVFKNIDGYFKIYSKHTPINLVRDLPQGFSALEPLVDLPIGINITRFQTLLALHRSYLTPGDSSSGWTAGAAAYYVGYLQPRTFLLKYNENGTITDAVDCALDPLSETKCTLKSFTVEKGIYQTSNFRVQPTESIVRFPNITNLCPFGEVFNATRFASVYAWNRKRISNCVADYSVLYNSASFSTFKCYGVSPTKLNDLCFTNVYADSFVIRGDEVRQIAPGQTGKIADYNYKLPDDFTGCVIAWNSNNLDSKVGGNYNYLYRLFRKSNLKPFERDISTEIYQAGSTPCNGVEGFNCYFPLQSYGFQPTNGVGYQPYRVVVLSFELLHAPATVCGPKKSTNLVKNKCVNFNFNGLTGTGVLTESNKKFLPFQQFGRDIADTTDAVRDPQTLEILDITPCSFGGVSVITPGTNTSNQVAVLYQGVNCTEVPVAIHADQLTPTWRVYSTGSNVFQTRAGCLIGAEHVNNSYECDIPIGAGICASYQTQTNSPRRARSVASQSIIAYTMSLGAENSVAYSNNSIAIPTNFTISVTTEILPVSMTKTSVDCTMYICGDSTECSNLLLQYGSFCTQLNRALTGIAVEQDKNTQEVFAQVKQIYKTPPIKDFGGFNFSQILPDPSKPSKRSFIEDLLFNKVTLADAGFIKQYGDCLGDIAARDLICAQKFNGLTVLPPLLTDEMIAQYTSALLAGTITSGWWFGAGAALQIPFAMQMAYRFNGIGVTQNVLYENQKLIANQFNSAIGKIQDSLSSTAPALGKLQDVVNQNAQALNTLVKQLSSNFGAISSVLNDILSRLDPPEAEVQIDRLITGRLQSLQTYVTQQLIRAAEIRWSANLAATKMSECVLGQSKRVDFCGKGYHLMSFPQSAPHGVVFLHVTYVPAQEKNFTTAPAICHDGKAHFPREGVFVSNGTHWFVTQRNFYEPQIITTDNTFVSGNCDVVIGIVNNTVYDPLQPELDSGGGGSDIDPYKEFGSSYQLLNFLPLDFFPDLNALVDTATALYEEELTGREHCSPHHTAIRQALVCWDELTKLIAWMSSNITSEQVRTIIVNHVNDTWGLKVRQSLWFHLSCLTFGQHTVQEFLVSFGVWIRTPAPYRPPNAPILSTLPEHTVIC

SEQ ID NO: 10820 - protein, 1301 aa, Artificial Sequence
  SARS-CoV-2/Germany/BavPat3/2020__EPI_ISL_414521 spike protein (1-1147)(K986P_V987P_T887W_A1020W) WhcAg construct
MFVFLVLLPLVSSQCVNLTTRTQLPPAYTNSFTRGVYYPDKVFRSSVLHSTQDLFLPFFSNVTWFHAIHVSGTNGTKRFDNPVLPFNDGVYFASTEKSNIIRGWIFGTTLDSKTQSLLIVNNATNVVIKVCEFQFCNDPFLGVYYHKNNKSWMESEFRVYSSANNCTFEYVSQPFLMDLEGKQGNFKNLREFVFKNIDGYFKIYSKHTPINLVRDLPQGFSALEPLVDLPIGINITRFQTLLALHRSYLTPGDSSSGWTAGAAAYYVGYLQPRTFLLKYNENGTITDAVDCALDPLSETKCTLKSFTVEKGIYQTSNFRVQPTESIVRFPNITNLCPFGEVFNATRFASVYAWNRKRISNCVADYSVLYNSASFSTFKCYGVSPTKLNDLCFTNVYADSFVIRGDEVRQIAPGQTGKIADYNYKLPDDFTGCVIAWNSNNLDSKVGGNYNYLYRLFRKSNLKPFERDISTEIYQAGSTPCNGVEGFNCYFPLQSYGFQPTNGVGYQPYRVVVLSFELLHAPATVCGPKKSTNLVKNKCVNFNFNGLTGTGVLTESNKKFLPFQQFGRDIADTTDAVRDPQTLEILDITPCSFGGVSVITPGTNTSNQVAVLYQDVNCTEVPVAIHADQLTPTWRVYSTGSNVFQTRAGCLIGAEHVNNSYECDIPIGAGICASYQTQTNSPRRARSVASQSIIAYTMSLGAENSVAYSNNSIAIPTNFTISVTTEILPVSMTKTSVDCTMYICGDSTECSNLLLQYGSFCTQLNRALTGIAVEQDKNTQQVFAQVKQIYKTPPIKDFGGFNFSQILPDPSKPSKRSFIEDLLFNKVTLADAGFIKQYGDCLGDIAARDLICAQKFNGLTVLPPLLTDEMIAQYTSALLAGTITSGWWFGAGAALQIPFAMQMAYRFNGIGVTQNVLYENQKLIANQFNSAIGKIQDSLSSTASALGKLQDVVNQNAQALNTLVKQLSSNFGAISSVLNDILSRLDPPEAEVQIDRLITGRLQSLQTYVTQQLIRAAEIRWSANLAATKMSECVLGQSKRVDFCGKGYHLMSFPQSAPHGVVFLHVTYVPAQEKNFTTAPAICHDGKAHFPREGVFVSNGTHWFVTQRNFYEPQIITTDNTFVSGNCDVVIGIVNNTVYDPLQPELDSGGGGSDIDPYKEFGSSYQLLNFLPLDFFPDLNALVDTATALYEEELTGREHCSPHHTAIRQALVCWDELTKLIAWMSSNITSEQVRTIIVNHVNDTWGLKVRQSLWFHLSCLTFGQHTVQEFLVSFGVWIRTPAPYRPPNAPILSTLPEHTVIC

SEQ ID NO: 10821 - protein, 1301 aa, Artificial Sequence
  SARS-CoV-2/France/HF1805/2020__EPI_ISL_414628 spike protein (1-1147)(K986P_V987P_T887W_A1020W) WhcAg construct
MFVFLVLLPLVSSQCVNLTTRTQLPPAYTNSFTRGVYYPDKVFRSSVLHSTQDLFLPFFSNVTWFHAIHVSGTNGTKRFDNPVLPFNDGVYFASTEKSNIIRGWIFGTTLDSKTQSLLIVNNATNVVIKVCEFQFCNDPFLGVYYHKNNKSWMESEFRVYSSANNCTFEYVSQPFLMDLEGKQGNFKNLREFVFKNIDGYFKIYSKHTPINLVRDLPQGFSALEPLVDLPIGINITRFQTLLALHRSYLTPGDSSSGWTAGAAAYYVGYLQPRTFLLKYNENGTITDAVDCALDPLSETKCTLKSFTVEKGIYQTSNFRVQPTESIVRFPNITNLCPFGEVFNATRFASVYAWNRKRISNCVADYSVLYNSASFSTFKCYGVSPTKLNDLCFTNVYADSFVIRGDEVRQIAPGQTGKIADYNYKLPDDFTGCVIAWNSNNLDSKVGGNYNYLYRLFRKSNLKPFERDISTEIYQAGSTPCNGVEGFNCYFPLQSYGFQPTNGVGYQPYRVVVLSFELLHAPATVCGPKKSTNLVKNKCVNFNFNGLTGTGVLTESNKKFLPFQQFGRDIADTTDAVRDPQTLEILDITPCSFGGVSVITPGTNTSNQVAVLYQGVNCTEVPVAIHADQLTPTWRVYSTGSNVFQTRAGCLIGAEHVNNSYECDIPIGAGICASYQTQTNSPRRARSVASQSIIAYTMSLGAENSVAYSNNSIAIPTNFTISVTTEILPVSMTKTSVDCTMYICGDSTECSNLLLQYGSFCTQLNRALTGIAVEQDKNTQEVFAQVKQIYKTPPIKDFGGFNFSQILPDPSKPSKRSFIEDLLFNKVTLADAGFIKQYGDCLGDIAARDLICAQKFNGLTVLPPLLTDEMIAQYTSALLAGTITSGWWFGAGAALQIPFAMQMAYRFNGIGVTQNVLYENQKLIANQFNSAIGKIQDSLSSTASALGKLQDVVNQNAQALNTLVKQLSSNFGAISSVLNDILSRLDPPEAEVQIDRLITGRLQSLQTYVTQQLIRAAEIRWSANLAATKMSECVLGQSKRVDFCGKGYHLMSFPQSAPHGVVFLHVTYVPAQEKNFTTAPAICHDGKAHFPREGVFVSNGTHWFVTQRNFYEPQIITTDNTFVSGNCDVVIGVVNNTVYDPLQPELDSGGGGSDIDPYKEFGSSYQLLNFLPLDFFPDLNALVDTATALYEEELTGREHCSPHHTAIRQALVCWDELTKLIAWMSSNITSEQVRTIIVNHVNDTWGLKVRQSLWFHLSCLTFGQHTVQEFLVSFGVWIRTPAPYRPPNAPILSTLPEHTVIC

SEQ ID NO: 10822 - protein, 1301 aa, Artificial Sequence
  SARS-CoV-2/Netherlands/ZuidHolland_9/2020__EPI_ISL_414445 spike protein (1-1147)(K986P_V987P_T887W_A1020W) WhcAg construct
MFVFLVLLPLVSSQCVNLTTRTQLPPAYTNSFTRGVYYPDKVFRSSVLHSTQDLFLPFFSNVTWFHAIHVSGTNGTKRFDNPVLPFNDGVYFASTEKSNIIRGWIFGTTLDSKTQSLLIVNNATNVVIKVCEFQFCNDPFLGVYYHKNNKSWMESEFRVYSSANNCTFEYVSQPFLMDLEGKQGNFKNLREFVFKNIDGYFKIYSKHTPINLVRDLPQGFSALEPLVDLPIGINITRFQTLLALHRSYLTPGDSSSGWTAGAAAYYVGYLQPRTFLLKYNENGTITDAVDCALDPLSETKCTLKSFTVEKGIYQTSNFRVQPTESIVRFPNITNLCPFGEVFNATRFASVYAWNRKRISNCVADYSVLYNSASFSTFKCYGVSPTKLNDLCFTNVYADSFVIRGDEVRQIAPGQTGKIADYNYKLPDDFTGCVIAWNSNNLDSKVGGNYNYLYRLFRKSNLKPFERDISTEIYQAGSTPCNGVEGFNCYFPLQSYGFQPTNGVGYQPYRVVVLSFELLHAPATVCGPKKSTNLVKNKCVNFNFNGLTGTGVLTESNKKFLPFQQFGRDIADTTDAVRDPQTLEILDITPCSFGGVSVITPGTNTSNQVAVLYQGVNCTEVPVAIHADQLTPTWRVYSTGSNVFQTRAGCLIGAEHVNNSYECDIPIGAGICASYQTQTNSPRRARSVASQSIIAYTMSLGAENSVAYSNNSIAIPTNFTISVTTEILPVSMTKTSVDCTMYICGDSTECSNLLLQYGSFCTQLNRALTGIAVEQDKNTQEVFAQVKQIYKTPPIKDFGGFNFSQILPDPSKPSKRSFIEDLLFNKVTLADAGFIKQYGDCLGDIAARDLICVQKFNGLTVLPPLLTDEMIAQYTSALLAGTITSGWWFGAGAALQIPFAMQMAYRFNGIGVTQNVLYENQKLIANQFNSAIGKIQDSLSSTASALGKLQDVVNQNAQALNTLVKQLSSNFGAISSVLNDILSRLDPPEAEVQIDRLITGRLQSLQTYVTQQLIRAAEIRWSANLAATKMSECVLGQSKRVDFCGKGYHLMSFPQSAPHGVVFLHVTYVPAQEKNFTTAPAICHDGKAHFPREGVFVSNGTHWFVTQRNFYEPQIITTDNTFVSGNCDVVIGIVNNTVYDPLQPELDSGGGGSDIDPYKEFGSSYQLLNFLPLDFFPDLNALVDTATALYEEELTGREHCSPHHTAIRQALVCWDELTKLIAWMSSNITSEQVRTIIVNHVNDTWGLKVRQSLWFHLSCLTFGQHTVQEFLVSFGVWIRTPAPYRPPNAPILSTLPEHTVIC

SEQ ID NO: 10823 - protein, 1301 aa, Artificial Sequence
  SARS-CoV-2/Finland/FIN03032020A/2020__EPI_ISL_413602 spike protein (1-1147)(K986P_V987P_T887W_A1020W) WhcAg construct
MFVFLVLLPLVSSQCVNLTTRTQLPPAYTNSFTRGVYYPDKVFRSSVLHSTQDLFLPFFSNVTWFHAIHVSGTNGTKRFDNPVLPFNDGVYFASTEKSNIIRGWIFGTTLDSKTQSLLIVNNATNVVIKVCEFQFCNDPFLGVYYHKNNKSWMESEFRVYSSANNCTFEYVSQPFLMDLEGKQGNFKNLREFVFKNIDGYFKIYSKHTPINLVRDLPQGFSALEPLVDLPIGINITRFQTLLALHRSYLTPGDSSSGWTAGAAAYYVGYLQPRTFLLKYNENGTITDAVDCALDPLSETKCTLKSFTVEKGIYQTSNFRVQPTESIVRFPNITNLCPFGEVFNATRFASVYAWNRKRISNCVADYSVLYNSASFSTFKCYGVSPTKLNDLCFTNVYADSFVIRGDEVRQIAPGQTGKIADYNYKLPDDFTGCVISWNSNNLDSKVGGNYNYLYRLFRKSNLKPFERDISTEIYQAGSTPCNGVEGFNCYFPLQSYGFQPTNGVGYQPYRVVVLSFELLHAPATVCGPKKSTNLVKNKCVNFNFNGLTGTGVLTESNKKFLPFQQFGRDIADTTDAVRDPQTLEILDITPCSFGGVSVITPGTNTSNQVAVLYQGVNCTEVPVAIHADQLTPTWRVYSTGSNVFQTRAGCLIGAEHVNNSYECDIPIGAGICASYQTQTNSPRRARSVASQSIIAYTMSLGAENSVAYSNNSIAIPTNFTISVTTEILPVSMTKTSVDCTMYICGDSTECSNLLLQYGSFCTQLNRALTGIAVEQDKNTQEVFAQVKQIYKTPPIKDFGGFNFSQILPDPSKPSKRSFIEDLLFNKVTLADAGFIKQYGDCLGDIAARDLICAQKFNGLTVLPPLLTDEMIAQYTSALLAGTITSGWWFGAGAALQIPFAMQMAYRFNGIGVTQNVLYENQKLIANQFNSAIGKIQDSLSSTASALGKLQDVVNQNAQALNTLVKQLSSNFGAISSVLNDILSRLDPPEAEVQIDRLITGRLQSLQTYVTQQLIRAAEIRWSANLAATKMSECVLGQSKRVDFCGKGYHLMSFPQSAPHGVVFLHVTYVPAQEKNFTTAPAICHDGKAHFPREGVFVSNGTHWFVTQRNFYEPQIITTDNTFVSGNCDVVIGIVNNTVYDPLQPELDSGGGGSDIDPYKEFGSSYQLLNFLPLDFFPDLNALVDTATALYEEELTGREHCSPHHTAIRQALVCWDELTKLIAWMSSNITSEQVRTIIVNHVNDTWGLKVRQSLWFHLSCLTFGQHTVQEFLVSFGVWIRTPAPYRPPNAPILSTLPEHTVIC

SEQ ID NO: 10824 - protein, 1301 aa, Artificial Sequence
  SARS-CoV-2/France/GE1977/2020__EPI_ISL_414632 spike protein (1-1147)(K986P_V987P_T887W_A1020W) WhcAg construct
MFVFLVLLPLVSSQCVNLTTRTQLPPAYTNSFTRGVYYPDKVFRSSVLHSTQDLFLPFFSNVTWFHAIHVSGTNGTKRFDNPVLPFNDGVYFASTEKSNIIRGWIFGTTLDSKTQSLLIVNNATNVVIKVCEFQFCNDPFLGVYYHKNNKSWMESEFRVYSSANNCTFEYVSQPFLMDLEGKQGNFKNLREFVFKNIDGYFKIYSKHTPINLVRDLPQGFSALEPLVDLPIGINITRFQTLLALHRSYLTPGDSSSGWTAGAAAYYVGYLQPRTFLLKYNENGTITDAVDCALDPLSETKCTLKSFTVEKGIYQTSNFRVQPTESIVRFPNITNLCPFGEVFNATRFASVYAWNRKRISNCVADYSVLYNSASFSTFKCYGVSPTKLNDLCFTNVYADSFVIRGDEVRQIAPGQTGKIADYNYKLPDDFTGCVIAWNSNNLDSKVGGNYNYLYRLFRKSNLKPFERDISTEIYQAGSTPCNGVEGFNCYFPLQSYGFQPTNGVGYQPYRVVVLSFELLHAPATVCGPKKSTNLVKNKCVNFNFNGLTGTGVLTESNKKFLPFQQFGRDIADTTDAVRDPQTLEILDITPCSFGGVSVITPGTNTSNQVAVLYQGVNCTEVPVAIHADQLTPTWRVYSTGSNVFQTRAGCLIGAEHVNNSYECDIPIGAGICASYQTQTNSPRRARSVASQSIIAYTMSLGAENSVAYSNNSIAIPTNFTISVTTEILPVSMTKTSVDCTMYICGDSTECSNLLLQYGSFCTQLNRALTGIAVEQDKNTQEVFAQVKQIYKTPPIKDFGGFNFSQILPDPSKPSKRSFIEDLLFNKVTLADAGFIKQYGDCLGDIAARDLICAQKFNGLTVLPPLLTDEMIAQYTSALLAGTITSGWWFGAGAALQIPFAMQMAYRFNGIGVTQNVLYENQKLIANQFNSAIGKIQDSLFSTASALGKLQDVVNQNAQALNTLVKQLSSNFGAISSVLNDILSRLDPPEAEVQIDRLITGRLQSLQTYVTQQLIRAAEIRWSANLAATKMSECVLGQSKRVDFCGKGYHLMSFPQSAPHGVVFLHVTYVPAQEKNFTTAPAICHDGKAHFPREGVFVSNGTHWFVTQRNFYEPQIITTDNTFVSGNCDVVIGIVNNTVYDPLQPELDSGGGGSDIDPYKEFGSSYQLLNFLPLDFFPDLNALVDTATALYEEELTGREHCSPHHTAIRQALVCWDELTKLIAWMSSNITSEQVRTIIVNHVNDTWGLKVRQSLWFHLSCLTFGQHTVQEFLVSFGVWIRTPAPYRPPNAPILSTLPEHTVIC

SEQ ID NO: 10825 - protein, 1301 aa, Artificial Sequence
  SARS-CoV-2/Finland/FIN-313/2020__EPI_ISL_414641 spike protein (1-1147)(K986P_V987P_T887W_A1020W) WhcAg construct
MFVFLVLLPLVSSQCVNLTTRTQLPPAYTNSFTRGVYYPDKVFRSSVLHSTQDLFLPFFSNVTWFHAIHVSGTNGTKRFDNPVLPFNDGVYFASTEKSNIIRGWIFGTTLDSKTQSLLIVNNATNVVIKVCEFQFCNDPFLGVYYHKNNKSWMESEFRVYSSANNCTFEYVSQPFLMDLEGKQGNFKNLREFVFKNIDGYFKIYSKHTPINLVRDLPQGFSALEPLVDLPIGINITRFKTLLALHRSYLTPGDSSSGWTAGAAAYYVGYLQPRTFLLKYNENGTITDAVDCALDPLSETKCTLKSFTVEKGIYQTSNFRVQPTESIVRFPNITNLCPFGEVFNATRFASVYAWNRKRISNCVADYSVLYNSASFSTFKCYGVSPTKLNDLCFTNVYADSFVIRGDEVRQIAPGQTGKIADYNYKLPDDFTGCVIAWNSNNLDSKVGGNYNYLYRLFRKSNLKPFERDISTEIYQAGSTPCNGVEGFNCYFPLQSYGFQPTNGVGYQPYRVVVLSFELLHAPATVCGPKKSTNLVKNKCVNFNFNGLTGTGVLTESNKKFLPFQQFGRDIADTTDAVRDPQTLEILDITPCSFGGVSVITPGTNTSNQVAVLYQGVNCTEVPVAIHADQLTPTWRVYSTGSNVFQTRAGCLIGAEHVNNSYECDIPIGAGICASYQTQTNSPRRARSVASQSIIAYTMSLGAENSVAYSNNSIAIPTNFTISVTTEILPVSMTKTSVDCTMYICGDSTECSNLLLQYGSFCTQLNRALTGIAVEQDKNTQEVFAQVKQIYKTPPIKDFGGFNFSQILPDPSKPSKRSFIEDLLFNKVTLADAGFIKQYGDCLGDIAARDLICAQKFNGLTVLPPLLTDEMIAQYTSALLAGTITSGWWFGAGAALQIPFAMQMAYRFNGIGVTQNVLYENQKLIANQFNSAIGKIQDSLSSTASALGKLQDVVNQNAQALNTLVKQLSSNFGAISSVLNDILSRLDPPEAEVQIDRLITGRLQSLQTYVTQQLIRAAEIRWSANLAATKMSECVLGQSKRVDFCGKGYHLMSFPQSAPHGVVFLHVTYVPAQEKNFTTAPAICHDGKAHFPREGVFVSNGTHWFVTQRNFYEPQIITTDNTFVSGNCDVVIGIVNNTVYDPLQPELDSGGGGSDIDPYKEFGSSYQLLNFLPLDFFPDLNALVDTATALYEEELTGREHCSPHHTAIRQALVCWDELTKLIAWMSSNITSEQVRTIIVNHVNDTWGLKVRQSLWFHLSCLTFGQHTVQEFLVSFGVWIRTPAPYRPPNAPILSTLPEHTVIC

SEQ ID NO: 10826 - protein, 1301 aa, Artificial Sequence
  SARS-CoV-2/Netherlands/ZuidHolland_2/2020__EPI_ISL_414556 spike protein (1-1147)(K986P_V987P_T887W_A1020W) WhcAg construct
MFVFLVLLPLVSSQCVNLTTRTQLPPAYTNSFTRGVYYPDKVFRSSVLHSTQDLFLPFFSNVTWFHAIHVSGTNGTKRFDNPVLPFNDGVYFASTEKSNIIRGWIFGTTLDSKTQSLLIVNNATNVVIKVCEFQFCNDPFLGVYYHKNNKSWMESEFRVYSSANNCTFEYVSQPFLMDLEGKQGNFKNLREFVFKNIDGYFKIYSKHTPINLVRDLPQGFSALEPLVDLPIGINITRFQTLLALHRSYLTPGDSSSGWTAGAAAYYVGYLQPRTFLLKYNENGTITDAVDCALDPLSETKCTLKSFTVEKGIYQTSNFRVQPTESIVRFPNITNLCPFGEVFNATRFASVYAWNRKRISNCVADYSVLYNSASFSTFKCYGVSPTKLNDLCFTNVYADSFVIRGDEVRQIAPGQTGKIADYNYKLPDDFTGCVIAWNSNNLDSKVGGNYNYLYRLFRKSNLKPFERDISTEIYQAGSTPCNGVEGFNCYFPLQSYGFQPTNGVGYQPYRVVVLSFELLHAPATVCGPKKSTNLVKNKCVNFNFNGLTGTGVLTESNKKFLPFQQFGRDIADTTDAVRDPQTLEILDITPCSFGGVSVITPGTNTSNQVAVLYQGVNCTEVPVAIHADQLTPTWRVYSTGSNVFQTRAGCLIGAEHVNNSYECDIPIGAGICASYQTQTNSPRRARSVASQSIIAYTMSLGAENSVAYSNNSIAIPTNFTISVTTEILPVSMTKTSVDCTMYICGDSTECSNLLLQYGSFCTQLNRALTGIALEQDKNTQEVFAQVKQIYKTPPIKDFGGFNFSQILPDPSKPSKRSFIEDLLFNKVTLADAGFIKQYGDCLGDIAARDLICAQKFNGLTVLPPLLTDEMIAQYTSALLAGTITSGWWFGAGAALQIPFAMQMAYRFNGIGVTQNVLYENQKLIANQFNSAIGKIQDSLSSTASALGKLQDVVNQNAQALNTLVKQLSSNFGAISSVLNDILSRLDPPEAEVQIDRLITGRLQSLQTYVTQQLIRAAEIRWSANLAATKMSECVLGQSKRVDFCGKGYHLMSFPQSAPHGVVFLHVTYVPAQEKNFTTAPAICHDGKAHFPREGVFVSNGTHWFVTQRNFYEPQIITTDNTFVSGNCDVVIGIVNNTVYDPLQPELDSGGGGSDIDPYKEFGSSYQLLNFLPLDFFPDLNALVDTATALYEEELTGREHCSPHHTAIRQALVCWDELTKLIAWMSSNITSEQVRTIIVNHVNDTWGLKVRQSLWFHLSCLTFGQHTVQEFLVSFGVWIRTPAPYRPPNAPILSTLPEHTVIC

SEQ ID NO: 10827 - protein, 1301 aa, Artificial Sequence
  SARS-CoV-2/USA/WA-UW31/2020__EPI_ISL_414618 spike protein (1-1147)(K986P_V987P_T887W_A1020W) WhcAg construct
MFVFLVLLPLVSSQCVNLTTRTQLPPAYTNSFTRGVYYPDKVFRSSVLHSTQDLFLPFFSNVTWFHAIHVSGTNGTKRFDNPVLPFNDGVYFASTEKSNIIRGWIFGTTLDSKTQSLLIVNNATNVVIKVCEFQFCNDPFLGVYYHKNNKSWMESEFRVYSSANNCTFEYVSQPFLMDLEGKQGNFKNLREFVFKNIDGYFKIYSKHTPINLVRDLPQGFSALEPLVDLPIGINITRFQTLLALHRSYLTPGDSSSGWTAGAAAYYVGYLQPRTFLLKYNENGTITDAVDCALDPLSETKCTLKSFTVEKGIYQTSNFRVQPTESIVRFPNITNLCPFGEVFNATRFASVYAWNRKRISNCVADYSVLYNSASFSTFKCYGVSPTKLNDLCFTNVYADSFVIRGDEVRQIAPGQTGKIADYNYKLPDDFTGCVIAWNSNNLDSKVGGNYNYLYRLFRKSNLKPFERDISTEIYQAGSTPCNGAEGFNCYFPLQSYGFQPTNGVGYQPYRVVVLSFELLHAPATVCGPKKSTNLVKNKCVNFNFNGLTGTGVLTESNKKFLPFQQFGRDIADTTDAVRDPQTLEILDITPCSFGGVSVITPGTNTSNQVAVLYQDVNCTEVPVAIHADQLTPTWRVYSTGSNVFQTRAGCLIGAEHVNNSYECDIPIGAGICASYQTQTNSPRRARSVASQSIIAYTMSLGAENSVAYSNNSIAIPTNFTISVTTEILPVSMTKTSVDCTMYICGDSTECSNLLLQYGSFCTQLNRALTGIAVEQDKNTQEVFAQVKQIYKTPPIKDFGGFNFSQILPDPSKPSKRSFIEDLLFNKVTLADAGFIKQYGDCLGDIAARDLICAQKFNGLTVLPPLLTDEMIAQYTSALLAGTITSGWWFGAGAALQIPFAMQMAYRFNGIGVTQNVLYENQKLIANQFNSAIGKIQDSLSSTASALGKLQDVVNQNAQALNTLVKQLSSNFGAISSVLNDILSRLDPPEAEVQIDRLITGRLQSLQTYVTQQLIRAAEIRWSANLAATKMSECVLGQSKRVDFCGKGYHLMSFPQSAPHGVVFLHVTYVPAQEKNFTTAPAICHDGKAHFPREGVFVSNGTHWFVTQRNFYEPQIITTDNTFVSGNCDVVIGIVNNTVYDPLQPELDSGGGGSDIDPYKEFGSSYQLLNFLPLDFFPDLNALVDTATALYEEELTGREHCSPHHTAIRQALVCWDELTKLIAWMSSNITSEQVRTIIVNHVNDTWGLKVRQSLWFHLSCLTFGQHTVQEFLVSFGVWIRTPAPYRPPNAPILSTLPEHTVIC

SEQ ID NO: 10828 - protein, 1301 aa, Artificial Sequence
  SARS-CoV-2/South Korea/SNU01/2020__EPI_ISL_411929 spike protein (1-1147)(K986P_V987P_T887W_A1020W) WhcAg construct
MFVFLVLLPLVSSQCVNLTTRTQLPPAYTNSFTRGVYYPDKVFRSSVLHSTQDLFLPFFSNVTWFHAIHVSGTNGTKRFDNPVLPFNDGVYFASTEKSNIIRGWIFGTTLDSKTQSLLIVNNATNVVIKVCEFQFCNDPFLGVYYHKNNKSWMESEFRVYSSANNCTFEYVSQPFLMDLEGKQGNFKNLREFVFKNIDGYFKIYSKHTPINLVRDLPQGFWALEPLVDLPIGINITRFQTLLALHRSYLTPGDSSSGWTAGAAAYYVGYLQPRTFLLKYNENGTITDAVDCALDPLSETKCTLKSFTVEKGIYQTSNFRVQPTESIVRFPNITNLCPFGEVFNATRFASVYAWNRKRISNCVADYSVLYNSASFSTFKCYGVSPTKLNDLCFTNVYADSFVIRGDEVRQIAPGQTGKIADYNYKLPDDFTGCVIAWNSNNLDSKVGGNYNYLYRLFRKSNLKPFERDISTEIYQAGSTPCNGVEGFNCYFPLQSYGFQPTNGVGYQPYRVVVLSFELLHAPATVCGPKKSTNLVKNKCVNFNFNGLTGTGVLTESNKKFLPFQQFGRDIADTTDAVRDPQTLEILDITPCSFGGVSVITPGTNTSNQVAVLYQDVNCTEVPVAIHADQLTPTWRVYSTGSNVFQTRAGCLIGAEHVNNSYECDIPIGAGICASYQTQTNSPRRARSVASQSIIAYTMSLGAENSVAYSNNSIAIPTNFTISVTTEILPVSMTKTSVDCTMYICGDSTECSNLLLQYGSFCTQLNRALTGIAVEQDKNTQEVFAQVKQIYKTPPIKDFGGFNFSQILPDPSKPSKRSFIEDLLFNKVTLADAGFIKQYGDCLGDIAARDLICAQKFNGLTVLPPLLTDEMIAQYTSALLAGTITSGWWFGAGAALQIPFAMQMAYRFNGIGVTQNVLYENQKLIANQFNSAIGKIQDSLSSTASALGKLQDVVNQNAQALNTLVKQLSSNFGAISSVLNDILSRLDPPEAEVQIDRLITGRLQSLQTYVTQQLIRAAEIRWSANLAATKMSECVLGQSKRVDFCGKGYHLMSFPQSAPHGVVFLHVTYVPAQEKNFTTAPAICHDGKAHFPREGVFVSNGTHWFVTQRNFYEPQIITTDNTFVSGNCDVVIGIVNNTVYDPLQPELDSGGGGSDIDPYKEFGSSYQLLNFLPLDFFPDLNALVDTATALYEEELTGREHCSPHHTAIRQALVCWDELTKLIAWMSSNITSEQVRTIIVNHVNDTWGLKVRQSLWFHLSCLTFGQHTVQEFLVSFGVWIRTPAPYRPPNAPILSTLPEHTVIC

SEQ ID NO: 10829 - protein, 1301 aa, Artificial Sequence
  SARS-CoV-2/China/WF0004/2020__EPI_ISL_413694 spike protein (1-1147)(K986P_V987P_T887W_A1020W) WhcAg construct
MFVFLVLLPLVSSQCVNLTTRTQLPPAYTNSFTRGVYYPDKVFRSSVLHSTQDLFLPFFSNVTWFHAIHVSGTNGTKRFDNPVLPFNDGVYFASTEKSNIIRGWIFGTTLDSKTQSLLIVNNATNVVIKVCEFQFCNDPFLGVYYHKNNKSWTESEFRVYSSANNCTFEYVSQPFLMDLEGKQGNFKNLREFVFKNIDGYFKIYSKHTPINLVRDLPQGFSALEPLVDLPIGINITRFQTLLALHRSYLTPGDSSSGWTAGAAAYYVGYLQPRTFLLKYNENGTITDAVDCALDPLSETKCTLKSFTVEKGIYQTSNFRVQPTESIVRFPNITNLCPFGEVFNATRFASVYAWNRKRISNCVADYSVLYNSASFSTFKCYGVSPTKLNDLCFTNVYADSFVIRGDEVRQIAPGQTGKIADYNYKLPDDFTGCVIAWNSNNLDSKVGGNYNYLYRLFRKSNLKPFERDISTEIYQAGSTPCNGVEGFNCYFPLQSYGFQPTNGVGYQPYRVVVLSFELLHAPATVCGPKKSTNLVKNKCVNFNFNGLTGTGVLTESNKKFLPFQQFGRDIADTTDAVRDPQTLEILDITPCSFGGVSVITPGTNTSNQVAVLYQDVNCTEVPVAIHADQLTPTWRVYSTGSNVFQTRAGCLIGAEHVNNSYECDIPIGAGICASYQTQTNSPRRARSVASQSIIAYTMSLGAENSVAYSNNSIAIPTNFTISVTTEILPVSMTKTSVDCTMYICGDSTECSNLLLQYGSFCTQLNRALTGIAVEQDKNTQEVFAQVKQIYKTPPIKDFGGFNFSQILPDPSKPSKRSFIEDLLFNKVTLADAGFIKQYGDCLGDIAARDLICAQKFNGLTVLPPLLTDEMIAQYTSALLAGTITSGWWFGAGAALQIPFAMQMAYRFNGIGVTQNVLYENQKLIANQFNSAIGKIQDSLSSTASALGKLQDVVNQNAQALNTLVKQLSSNFGAISSVLNDILSRLDPPEAEVQIDRLITGRLQSLQTYVTQQLIRAAEIRWSANLAATKMSECVLGQSKRFDFCGKGYHLMSFPQSAPHGVVFLHVTYVPAQEKNFTTAPAICHDGKAHFPREGVFVSNGTHWFVTQRNFYEPQIITTDNTFVSGNCDVVIGIVNNTVYDPLQPELDSGGGGSDIDPYKEFGSSYQLLNFLPLDFFPDLNALVDTATALYEEELTGREHCSPHHTAIRQALVCWDELTKLIAWMSSNITSEQVRTIIVNHVNDTWGLKVRQSLWFHLSCLTFGQHTVQEFLVSFGVWIRTPAPYRPPNAPILSTLPEHTVIC

SEQ ID NO: 10830 - protein, 1301 aa, Artificial Sequence
  SARS-CoV-2/China/WF0028/2020__EPI_ISL_413791 spike protein (1-1147)(K986P_V987P_T887W_A1020W) WhcAg construct
MFVFLVLLPLVSSQCVNLTTRTQLPPAYTNSFTRGVYYPDKVFRSSVLHSTQDLFLPFFSNVTWFHAIHVSGTNGTKRFDNPVLPFNDGVYFASTEKSNIIRGWIFGTTLDSKTQSLLIVNNATNVVIKVCEFQFCNDPFLGVYYHKNNKSWMESEFRVYSSANNCTFEYVSQPFLMDLEGKQGNFKNLREFVFKNIDGYFKIYSKHTPINLVRDLPQGFSALEPLVDLPIGINITRFQTLLALHRSYLTPGDSSSGWTAGAAAYYVGYLQPRTFLLKYNENGTITDAVDCALDPLSETKCTLKSFTVEKGIYQTSNFRVQPTESIVRFPNITNLCPFGEVFNATRFASVYAWNRKRISNCVADYSVLYNSASFSTFKCYGVSPTKLNDLCFTNVYADSFVIRGDEVRQIAPGQTGKIADYNYKLPDDFTGCVIAWNSNNLDSKVGGNYNYLYRLFRKSNLKPFERDISTEIYQAGSTPCNGVEGFNCYFPLQSYGFQPTNGVGYQPYRVVVLSFELLHAPATVCGPKKSTNLVKNKCVNFNFNGLTGTGVLTESNKKFLPFQQFGRDIADTTDAVRDPQTLEILDITPCSFGGVSVITPGTNTSNQVAVLYQDVNCTEVPVAIHADQLTPTWRVYSTGSNVFQTRAGCLIGAEHVNNSYECDIPIGAGICASYQTQTNSPRRARSVASQSIIAYTMSLGAENSVAYSNNSIAIPTNFTISVTTEILPVSMTKTSVDCTMYICGDSTECSNLLLQYGSFCTQLNRALTGIAVEQDKNTQEVFAQVKQIYKTPPIKDFGGFNFSQILPDPSKPSKRSFIEDLLFNKVTLADAGFIKQYGDCLGDIAARDLICAQKFNGLTVLPPLLTDEMIAQYTSALLAGTITSGWWFGAGAALQIPFAMQMAYRFNGIGVTQNVLYENQKLIANQFNSAIGKIQDSLSSTASALGKLQDVVNQNAQALNTLVKQLSSNFGAISSVLNDILSRLDPPEAEVQIDRLITGRLQSLQTYVTQQLIRAAEIRWSANLAATKMSECVLGQSKRVDFCGKGYHLMSFPQSAPHGVVFLHVTYVPAQEKNFTTAPAICHDGKAHFPREGVFVSNGTHWFVTQRNFYEPQIITTDNTFVSGNCDVVIGIVNNTVYDPLQPELESGGGGSDIDPYKEFGSSYQLLNFLPLDFFPDLNALVDTATALYEEELTGREHCSPHHTAIRQALVCWDELTKLIAWMSSNITSEQVRTIIVNHVNDTWGLKVRQSLWFHLSCLTFGQHTVQEFLVSFGVWIRTPAPYRPPNAPILSTLPEHTVIC

SEQ ID NO: 10831 - protein, 1301 aa, Artificial Sequence
  SARS-CoV-2/2019-nCoV/USA-CruiseA-18/2020__MT159716.1 spike protein (1-1147)(K986P_V987P_T887W_A1020W) WhcAg construct
MFVFLVLLPLVSSQCVNLTTRTQLPPAYTNSFTRGVYYPDKVFRSSVLHSTQDLFLPFFSNVTWFHAIHVSGTNGTKRFDNPVLPFNDGVYFASTEKSNIIRGWIFGTTLDSKTQSLLIVNNATNVVIKVCEFQFCNDPFLGVYYHKNNKSWMESELRVYSSANNCTFEYVSQPFLMDLEGKQGNFKNLREFVFKNIDGYFKIYSKHTPINLVRDLPQGFSALEPLVDLPIGINITRFQTLLALHRSYLTPGDSSSGWTAGAAAYYVGYLQPRTFLLKYNENGTITDAVDCALDPLSETKCTLKSFTVEKGIYQTSNFRVQPTESIVRFPNITNLCPFGEVFNATRFASVYAWNRKRISNCVADYSVLYNSASFSTFKCYGVSPTKLNDLCFTNVYADSFVIRGDEVRQIAPGQTGKIADYNYKLPDDFTGCVIAWNSNNLDSKVGGNYNYLYRLFRKSNLKPFERDISTEIYQAGSTPCNGVEGFNCYFPLQSYGFQPTNGVGYQPYRVVVLSFELLHAPATVCGPKKSTNLVKNKCVNFNFNGLTGTGVLTESNKKFLPFQQFGRDIADTTDAVRDPQTLEILDITPCSFGGVSVITPGTNTSNQVAVLYQDVNCTEVPVAIHADQLTPTWRVYSTGSNVFQTRAGCLIGAEHVNNSYECDIPIGAGICASYQTQTNSPRRARSVASQSIIAYTMSLGAENSVAYSNNSIAIPTNFTISVTTEILPVSMTKTSVDCTMYICGDSTECSNLLLQYGSFCTQLNRALTGIAVEQDKNTQEVFAQVKQIYKTPPIKDFGGFNFSQILPDPSKPSKRSFIEDLLFNKVTLADAGFIKQYGDCLGDIAARDLICAQKFNGLTVLPPLLTDEMIAQYTSALLAGTITSGWWFGAGAALQIPFAMQMAYRFNGIGVTQNVLYENQKLIANQFNSAIGKIQDSLSSTASALGKLQDVVNQNAQALNTLVKQLSSNFGAISSVLNDILSRLDPPEAEVQIDRLITGRLQSLQTYVTQQLIRAAEIRWSANLAATKMSECVLGQSKRVDFCGKGYHLMSFPQSAPHGVVFLHVTYVPAQEKNFTTAPAICHDGKAHFPREGVFVSNGTHWFVTQRNFYEPQIITTDNTFVSGNCDVVIGIVNNTVYDPLQPELDSGGGGSDIDPYKEFGSSYQLLNFLPLDFFPDLNALVDTATALYEEELTGREHCSPHHTAIRQALVCWDELTKLIAWMSSNITSEQVRTIIVNHVNDTWGLKVRQSLWFHLSCLTFGQHTVQEFLVSFGVWIRTPAPYRPPNAPILSTLPEHTVIC

SEQ ID NO: 10832 - protein, 1301 aa, Artificial Sequence
  SARS-CoV-2/SARS-CoV-2/Yunnan-01/human/2020/CHN__MT049951.1 spike protein (1-1147)(K986P_V987P_T887W_A1020W) WhcAg construct
MFVFLVLLPLVSSQCVNLTTRTQLPPANTNSFTRGVYYPDKVFRSSVLHSTQDLFLPFFSNVTWFHAIHVSGTNGTKRFDNPVLPFNDGVYFASTEKSNIIRGWIFGTTLDSKTQSLLIVNNATNVVIKVCEFQFCNDPFLGVYYHKNNKSWMESEFRVYSSANNCTFEYVSQPFLMDLEGKQGNFKNLREFVFKNIDGYFKIYSKHTPINLVRDLPQGFSALEPLVDLPIGINITRFQTLLALHRSYLTPGDSSSGWTAGAAAYYVGYLQPRTFLLKYNENGTITDAVDCALDPLSETKCTLKSFTVEKGIYQTSNFRVQPTESIVRFPNITNLCPFGEVFNATRFASVYAWNRKRISNCVADYSVLYNSASFSTFKCYGVSPTKLNDLCFTNVYADSFVIRGDEVRQIAPGQTGKIADYNYKLPDDFTGCVIAWNSNNLDSKVGGNYNYLYRLFRKSNLKPFERDISTEIYQAGSTPCNGVEGFNCYFPLQSYGFQPTNGVGYQPYRVVVLSFELLHAPATVCGPKKSTNLVKNKCVNFNFNGLTGTGVLTESNKKFLPFQQFGRDIADTTDAVRDPQTLEILDITPCSFGGVSVITPGTNTSNQVAVLYQDVNCTEVPVAIHADQLTPTWRVYSTGSNVFQTRAGCLIGAEHVNNSYECDIPIGAGICASYQTQTNSPRRARSVASQSIIAYTMSLGAENSVAYSNNSIAIPTNFTISVTTEILPVSMTKTSVDCTMYICGDSTECSNLLLQYGSFCTQLNRALTGIAVEQDKNTQEVFAQVKQIYKTPPIKDFGGFNFSQILPDPSKPSKRSFIEDLLFNKVTLADAGFIKQYGDCLGDIAARDLICAQKFNGLTVLPPLLTDEMIAQYTSALLAGTITSGWWFGAGAALQIPFAMQMAYRFNGIGVTQNVLYENQKLIANQFNSAIGKIQDSLSSTASALGKLQDVVNQNAQALNTLVKQLSSNFGAISSVLNDILSRLDPPEAEVQIDRLITGRLQSLQTYVTQQLIRAAEIRWSANLAATKMSECVLGQSKRVDFCGKGYHLMSFPQSAPHGVVFLHVTYVPAQEKNFTTAPAICHDGKAHFPREGVFVSNGTHWFVTQRNFYEPQIITTDNTFVSGNCDVVIGIVNNTVYDPLQPELDSGGGGSDIDPYKEFGSSYQLLNFLPLDFFPDLNALVDTATALYEEELTGREHCSPHHTAIRQALVCWDELTKLIAWMSSNITSEQVRTIIVNHVNDTWGLKVRQSLWFHLSCLTFGQHTVQEFLVSFGVWIRTPAPYRPPNAPILSTLPEHTVIC

SEQ ID NO: 10833 - protein, 1301 aa, Artificial Sequence
  SARS-CoV-2/USA/WA-UW292/2020__EPI_ISL_418077 spike protein (1-1147)(K986P_V987P_T887W_A1020W) WhcAg construct
MFVFLVLLPLVSSQCVNLTTRTQLPPAYTNSFTRGVYYPDKVFRSSVLHSTQDLFLPFFSNVTWFHAIHVSGTNGTKRFDNPVLPFNDGVYFASTEKSNIIRGWIFGTTLDSKTQSLLIVNNATNVVIKVCEFQFCNDPFLGVYYHKNNKSWMESEFRVYSSANNCTFEYVSQPFLMDLEGKQGNFKNLREFVFKNIDGYFKIYSKHTPINLVRDLPQGFSALEPLVDLPIGINITRFQTLLALHRSYLTPGDSSSGWTAGAAAYYVGYLQPRTFLLKYNENGTITDAVDCALDPLSETKCTLKSFTVEKGIYQTSNFRVQPTESIVRFPNITNLCPFGEVFNATRFASVYAWNRKRISNCVADYSVLYNSASFSTFKCYGVSPTKLNDLCFTNVYADSFVIRGDEVRQIAPGQTGKIADYNYKLPDDFTGCVIAWNSNNLDSKVGGNYNYLYRLFRKSNLKPFERDISTEIYQASSTPCNGVEGFNCYFPLQSYGFQPTNGVGYQPYRVVVLSFELLHAPATVCGPKKSTNLVKNKCVNFNFNGLTGTGVLTESNKKFLPFQQFGRDIADTTDAVRDPQTLEILDITPCSFGGVSVITPGTNTSNQVAVLYQDVNCTEVPVAIHADQLTPTWRVYSTGSNVFQTRAGCLIGAEHVNNSYECDIPIGAGICASYQTQTNSPRRARSVASQSIIAYTMSLGAENSVAYSNNSIAIPTNFTISVTTEILPVSMTKTSVDCTMYICGDSTECSNLLLQYGSFCTQLNRALTGIAVEQDKNTQEVFAQVKQIYKTPPIKDFGGFNFSQILPDPSKPSKRSFIEDLLFNKVTLADAGFIKQYGDCLGDIAARDLICAQKFNGLTVLPPLLTDEMIAQYTSALLAGTITSGWWFGAGAALQIPFAMQMAYRFNGIGVTQNVLYENQKLIANQFNSAIGKIQDSLSSTASALGKLQDVVNQNAQALNTLVKQLSSNFGAISSVLNDILSRLDPPEAEVQIDRLITGRLQSLQTYVTQQLIRAAEIRWSANLAATKMSECVLGQSKRVDFCGKGYHLMSFPQSAPHGVVFLHVTYVPAQEKNFTTAPAICHDGKAHFPREGVFVSNGTHWFVTQRNFYEPQIITTDNTFVSGNCDVVIGIVNNTVYDPLQPELDSGGGGSDIDPYKEFGSSYQLLNFLPLDFFPDLNALVDTATALYEEELTGREHCSPHHTAIRQALVCWDELTKLIAWMSSNITSEQVRTIIVNHVNDTWGLKVRQSLWFHLSCLTFGQHTVQEFLVSFGVWIRTPAPYRPPNAPILSTLPEHTVIC

SEQ ID NO: 10834 - protein, 1301 aa, Artificial Sequence
  SARS-CoV-2/Iceland/192/2020__EPI_ISL_417819 spike protein (1-1147)(K986P_V987P_T887W_A1020W) WhcAg construct
MFVFFVLLPLVSSQCVNLTTRTQLPPAYTNSFTRGVYYPDKVFRSSVLHSTQDLFLPFFSNVTWFHAIHVSGTNGTKRFDNPVLPFNDGVYFASTEKSNIIRGWIFGTTLDSKTQSLLIVNNATNVVIKVCEFQFCNDPFLGVYYHKNNKSWMESEFRVYSSANNCTFEYVSQPFLMDLEGKQGNFKNLREFVFKNIDGYFKIYSKHTPINLVRDLPQGFSALEPLVDLPIGINITRFQTLLALHRSYLTPGDSSSGWTAGAAAYYVGYLQPRTFLLKYNENGTITDAVDCALDPLSETKCTLKSFTVEKGIYQTSNFRVQPTESIVRFPNITNLCPFGEVFNATRFASVYAWNRKRISNCVADYSVLYNSASFSTFKCYGVSPTKLNDLCFTNVYADSFVIRGDEVRQIAPGQTGKIADYNYKLPDDFTGCVIAWNSNNLDSKVGGNYNYLYRLFRKSNLKPFERDISTEIYQAGSTPCNGVEGFNCYFPLQSYGFQPTNGVGYQPYRVVVLSFELLHAPATVCGPKKSTNLVKNKCVNFNFNGLTGTGVLTESNKKFLPFQQFGRDIADTTDAVRDPQTLEILDITPCSFGGVSVITPGTNTSNQVAVLYQGVNCTEVPVAIHADQLTPTWRVYSTGSNVFQTRAGCLIGAEHVNNSYECDIPIGAGICASYQTQTNSPRRARSVASQSIIAYTMSLGAENSVAYSNNSIAIPTNFTISVTTEILPVSMTKTSVDCTMYICGDSTECSNLLLQYGSFCTQLNRALTGIAVEQDKNTQEVFAQVKQIYKTPPIKDFGGFNFSQILPDPSKPSKRSFIEDLLFNKVTLADAGFIKQYGDCLGDIAARDLICAQKFNGLTVLPPLLTDEMIAQYTSALLAGTITSGWWFGAGAALQIPFAMQMAYRFNGIGVTQNVLYENQKLIANQFNSAIGKIQDSLSSTASALGKLQDVVNQNAQALNTLVKQLSSNFGAISSVLNDILSRLDPPEAEVQIDRLITGRLQSLQTYVTQQLIRAAEIRWSANLAATKMSECVLGQSKRVDFCGKGYHLMSFPQSAPHGVVFLHVTYVPAQEKNFTTAPAICHDGKAHFPREGVFVSNGTHWFVTQRNFYEPQIITTDNTFVSGNCDVVIGIVNNTVYDPLQPELDSGGGGSDIDPYKEFGSSYQLLNFLPLDFFPDLNALVDTATALYEEELTGREHCSPHHTAIRQALVCWDELTKLIAWMSSNITSEQVRTIIVNHVNDTWGLKVRQSLWFHLSCLTFGQHTVQEFLVSFGVWIRTPAPYRPPNAPILSTLPEHTVIC

SEQ ID NO: 10835 - protein, 1301 aa, Artificial Sequence
  SARS-CoV-2/Belgium/ULG-6939/2020__EPI_ISL_417020 spike protein (1-1147)(K986P_V987P_T887W_A1020W) WhcAg construct
MFVFLVLLPLVSSQCVNLTTRTQLPPAYTNSFTRGVYYPDKVFRSSVLHSTQDLFLPFFSNVTWFHAIHVSGTNGTKRFDNPVLPFNDGVYFASTEKSNIIRGWIFGTTLDSKTQSLLIVNNATNVVIKVCEFQFCNDPFLGVYYHKNNKSWMESEFRVYSSANNCTFEYVSQPFLMDLEGKQGNFKNLREFVFKNIDGYFKIYSKHTPINLVRDLPQGFSALEPLVDLPIGINITRFQTLLALHRSYLTPGDSSSGWTAGAAAYYVGYLQPRTFLLKYNENGTITDAVDCALDPLSETKCTLKSFTVEKGIYQTSNFRVQPTESIVRFPNITNLCPFGEVFNATRFASVYAWNRKRISNCVADYSVLYNSASFSTFKCYGVSPTKLNDLCFTNVYADSFVIRGDEVRQIAPGQTGKIADYNYKLPDDFTGCVIAWNSNNLDSKVGGNYNYLYRLFRKSNLKPFERDISTEIYQAGSTPCNGVEGFNCYFPLQSYGFQPTNGVGYQPYRVVVLSFELLHAPATVCGPKKSTNLVKNKCVNFNFNGLTGTGVLTESNKKFLPFQQFGRDIADTTDAVRDPQTLEILDITPCSFGGVSVITPGTNTSNQVAVLYQGVNCTEVPVAIHADQLTPTWRVYSTGSNVFQTRAGCLIGAEHVNNSYECDIPIGAGICASYQTQTNSPRRARSVASQSIIAYTMSLGAENSVVYSNNSIAIPTNFTISVTTEILPVSMTKTSVDCTMYICGDSTECSNLLLQYGSFCTQLNRALTGIAVEQDKNTQEVFAQVKQIYKTPPIKDFGGFNFSQILPDPSKPSKRSFIEDLLFNKVTLADAGFIKQYGDCLGDIAARDLICAQKFNGLTVLPPLLTDEMIAQYTSALLAGTITSGWWFGAGAALQIPFAMQMAYRFNGIGVTQNVLYENQKLIANQFNSAIGKIQDSLSSTASALGKLQDVVNQNAQALNTLVKQLSSNFGAISSVLNDILSRLDPPEAEVQIDRLITGRLQSLQTYVTQQLIRAAEIRWSANLAATKMSECVLGQSKRVDFCGKGYHLMSFPQSAPHGVVFLHVTYVPAQEKNFTTAPAICHDGKAHFPREGVFVSNGTHWFVTQRNFYEPQIITTDNTFVSGNCDVVIGIVNNTVYDPLQPELDSGGGGSDIDPYKEFGSSYQLLNFLPLDFFPDLNALVDTATALYEEELTGREHCSPHHTAIRQALVCWDELTKLIAWMSSNITSEQVRTIIVNHVNDTWGLKVRQSLWFHLSCLTFGQHTVQEFLVSFGVWIRTPAPYRPPNAPILSTLPEHTVIC

SEQ ID NO: 10836 - protein, 1301 aa, Artificial Sequence
  SARS-CoV-2/France/HF2496/2020__EPI_ISL_418231 spike protein (1-1147)(K986P_V987P_T887W_A1020W) WhcAg construct
MFVFLVLLPLVSSQCVNLTTRTQLPPAYTNSFTRGVYYPDKVFRSSVLHSTQDLFLPFFSNVTWFHAIHVSGTNGTKRFDNPVLPFNDGVYFASTEKSNIIRGWIFGTTLDSKTQSLLIVNNATNVVIKVCEFQFCNDPFLGVYYHKNNKSWMESEFRVYSSANNCTFEYVSQPFLMDLEGKQGNFKNLREFVFKNIDGYFKIYSKHTPINLVRDLPQGFSALEPLVDLPIGINITRFQTLLALHRSYLTPGDSSSGWTAGAAAYYVGYLQPRTFLLKYNENGTITDAVDCALDPLSETKCTLKSFTVEKGIYQTSNFRVQPTESIVRFPNITNLCPFGEVFNATRFASVYAWNRKRISNCVADYSVLYNSASFSTFKCYGVSPTKLNDLCFTNVYADSFVIRGDEVRQIAPGQTGKIADYNYKLPDDFTGCVIAWNSNNLDSKVGGNYNYLYRLFRKSNLKPFERDISTEIYQAGSTPCNGVEGFNCYFPLQSYGFQPTNGVGYQPYRVVVLSFELLHAPATVCGPKKSTNLVKNKCVNFNFNGLTGTGVLTESNKKFLPFQQFGRDIADTTDAVRDPQTLEILDITPCSFGGVSVITPGTNTSNQVAVLYQGVNCTEVPVAIHADQLTPTWRVYSTGSNVFQTRAGCLIGAEHVNNSYECDIPIGAGICASYQTQTNSPRRARSVASQSIIAYTMSLGAENSVAYSNNSIAIPTNFTISVTTEILPVSMTKTSVDCTMYICGDSTECSNLLLQYGSFCTQLNRALTGIAVEQDKNTQEVFAQVKQIYKTPPIKDFGGFNFSQILPDPSKPSKRSFIEDLLFNKVTLADAGFIKQYGDCLGDIVARDLICAQKFNGLTVLPPLLTDEMIAQYTSALLAGTITSGWWFGAGAALQIPFAMQMAYRFNGIGVTQNVLYENQKLIANQFNSAIGKIQDSLSSTASALGKLQDVVNQNAQALNTLVKQLSSNFGAISSVLNDILSRLDPPEAEVQIDRLITGRLQSLQTYVTQQLIRAAEIRWSANLAATKMSECVLGQSKRVDFCGKGYHLMSFPQSAPHGVVFLHVTYVPAQEKNFTTAPAICHDGKAHFPREGVFVSNGTHWFVTQRNFYEPQIITTDNTFVSGNCDVVIGIVNNTVYDPLQPELDSGGGGSDIDPYKEFGSSYQLLNFLPLDFFPDLNALVDTATALYEEELTGREHCSPHHTAIRQALVCWDELTKLIAWMSSNITSEQVRTIIVNHVNDTWGLKVRQSLWFHLSCLTFGQHTVQEFLVSFGVWIRTPAPYRPPNAPILSTLPEHTVIC

SEQ ID NO: 10837 - protein, 1301 aa, Artificial Sequence
  SARS-CoV-2/USA/WA-UW291/2020__EPI_ISL_418076 spike protein (1-1147)(K986P_V987P_T887W_A1020W) WhcAg construct
MFVFLVLLPLVSSQCVNLTTRTQLPPAYTNSFTRGVYYPDKVFRSSVLHSTQDLFLPFFSNVTWFHAIHVSGTNGTKRFDNPVLPFNDGVYFASTEKSNIIRGWIFGTTLDSKTQSLLIVNNATNVVIKVCEFQFCNDPFLGVYYHKNNKSWMESEFRVYSSANNCTFEYVSQPFLMDLEGKQGNFKNLREFVFKNIDGYFKIYSKHTPINLVRDLPQGFSALEPLVDLPIGINITRFQTLLALHRSYLTPGDSSSGWTAGAAAYYVGYLQPRTFLLKYNENGTITDAVDCALDPLSETKCTLKSFTVEKGIYQTSNFRVQPTESIVRFPNITNLCPFGEVFNATRFASVYAWNRKRISNCVADYSVLYNSASFSTFKCYGVSPTKLNDLCFTNVYADSFVIRGDEVRQIAPGQTGKIADYNYKLPDDFTGCVIAWNSNNLDSKVGGNYNYLYRLFRKSNLKPFERDISTEIYQAGSTPCNGVEGFNCYFPLQSYGFQPTNGVGYQPYRVVVLSFELLHAPATVCGPKKSTNLVKNKCVNFNFNGLTGTGVLTESNKKFLPFQQFGRDIADTTDAVRDPQTLEILDITPCSFGGVSVITPGTNTSNQVAVLYQGVNCTEVPVAIHADQLTPTWRVYSTGSNVFQTRAGCLIGAEHVNNSYECDIPIGAGICASYQTQTNSPRRARSVASQSIIAYTMSLGAENSVAYSNNSIAIPTNFTISVTTEILPVSMTKTSVDCTMYICGDSTECSNLLLQYGSFCTQLNRALTGIAVEQDKNTQEVFAQVKQIYKTPPIKDFGGFNFSQILPDPSKPSKRSFIEDLLFNKVTLADAGFIKQYGDCLGDIAARDLICAQKFNGLTVLPPLLTDEMIAQYTSALLAGTITSGWWFGAGAALQIPFAMQMAYRFNGIGVTQNVLYENQKLIANQFNSAIGKIQYSLSSTASALGKLQDVVNQNAQALNTLVKQLSSNFGAISSVLNDILSRLDPPEAEVQIDRLITGRLQSLQTYVTQQLIRAAEIRWSANLAATKMSECVLGQSKRVDFCGKGYHLMSFPQSAPHGVVFLHVTYVPAQEKNFTTAPAICHDGKAHFPREGVFVSNGTHWFVTQRNFYEPQIITTDNTFVSGNCDVVIGIVNNTVYDPLQPELDSGGGGSDIDPYKEFGSSYQLLNFLPLDFFPDLNALVDTATALYEEELTGREHCSPHHTAIRQALVCWDELTKLIAWMSSNITSEQVRTIIVNHVNDTWGLKVRQSLWFHLSCLTFGQHTVQEFLVSFGVWIRTPAPYRPPNAPILSTLPEHTVIC

SEQ ID NO: 10838 - protein, 1301 aa, Artificial Sequence; identical to SEQ ID NO: 10801
  SARS-CoV-2/Portugal/PT0034/2020__EPI_ISL_418019 spike protein (1-1147)(K986P_V987P_T887W_A1020W) WhcAg construct

SEQ ID NO: 10839 - protein, 1301 aa, Artificial Sequence; identical to SEQ ID NO: 10793
  SARS-CoV-2/Iceland/202/2020__EPI_ISL_417750 spike protein (1-1147)(K986P_V987P_T887W_A1020W) WhcAg construct

SEQ ID NO: 10840 - protein, 1301 aa, Artificial Sequence
  SARS-CoV-2/USA/WA-UW261/2020__EPI_ISL_418046 spike protein (1-1147)(K986P_V987P_T887W_A1020W) WhcAg construct
MFVFLVLLPLVSSQCVNLTTRTQLPPAYTNSFTRGVYYPDKVFRSSVLHSTQDLFLPFFSNVTWFHAIHVSGTNGTKRFDNPVLPFNDGVYFASTEKSNIIRGWIFGTTLDSKTQSLLIVNNATNVVIKVCEFQFCNDPFLGVYYHKNNKSWMESEFRVYSSANNCTFEYVSQPFLMDLEGKQGNFKNLREFVFKNIDGYFKIYSKHTPINLVRDLPQGFSALEPLVDLPIGINITRFQTLLALHRSYLTPGDSSSGWTAGAAAYYVGYLQPRTFLLKYNENGTITDAVDCALDPLSETKCTLKSFTVEKGIYQTSNFRVQPTESIVRFPNITNLCPFGEVFNATRFTSVYAWNRKRISNCVADYSVLYNSASFSTFKCYGVSPTKLNDLCFTNVYADSFVIRGDEVRQIAPGQTGKIADYNYKLPDDFTGCVIAWNSNNLDSKVGGNYNYLYRLFRKSNLKPFERDISTEIYQAGSTPCNGVEGFNCYFPLQSYGFQPTNGVGYQPYRVVVLSFELLHAPATVCGPKKSTNLVKNKCVNFNFNGLTGTGVLTESNKKFLPFQQFGRDIADTTDAVRDPQTLEILDITPCSFGGVSVITPGTNTSNQVAVLYQDVNCTEVPVAIHADQLTPTWRVYSTGSNVFQTRAGCLIGAEHVNNSYECDIPIGAGICASYQTQTNSPRRARSVASQSIIAYTMSLGAENSVAYSNNSIAIPTNFTISVTTEILPVSMTKTSVDCTMYICGDSTECSNLLLQYGSFCTQLNRALTGIAVEQDKNTQEVFAQVKQIYKTPPIKDFGGFNFSQILPDPSKPSKRSFIEDLLFNKVTLADAGFIKQYGDCLGDIAARDLICAQKFNGLTVLPPLLTDEMIAQYTSALLAGTITSGWWFGAGAALQIPFAMQMAYRFNGIGVTQNVLYENQKLIANQFNSAIGKIQDSLSSTASALGKLQDVVNQNAQALNTLVKQLSSNFGAISSVLNDILSRLDPPEAEVQIDRLITGRLQSLQTYVTQQLIRAAEIRWSANLAATKMSECVLGQSKRVDFCGKGYHLMSFPQSAPHGVVFLHVTYVPAQEKNFTTAPAICHDGKAHFPREGVFVSNGTHWFVTQRNFYEPQIITTDNTFVSGNCDVVIGIVNNTVYDPLQPELDSGGGGSDIDPYKEFGSSYQLLNFLPLDFFPDLNALVDTATALYEEELTGREHCSPHHTAIRQALVCWDELTKLIAWMSSNITSEQVRTIIVNHVNDTWGLKVRQSLWFHLSCLTFGQHTVQEFLVSFGVWIRTPAPYRPPNAPILSTLPEHTVIC

SEQ ID NO: 10841 - protein, 1301 aa, Artificial Sequence
  SARS-CoV-2/Portugal/PT0035/2020__EPI_ISL_418020 spike protein (1-1147)(K986P_V987P_T887W_A1020W) WhcAg construct
MFVFLVLLPLVSSQCVNLTTRTQLPPAYTNSFTRGVYYPDKVFRSSVLHSTQDLFLPFFSNVTWFHAIHVSGTNGTKRFDNPVLPFNDGVYFASTEKSNIIRGWIFGTTLDSKTQSLLIVNNATNVVIKVCEFQFCNDPFLGVYYHKNNKSWMESEFRVYSSANNCTFEYVSQPFLMDLEGKQGNFKNLREFVFKNIDGYFKIYSKHTPINLVRDLPQGFSALEPLVDLPIGINITRFQTLLALHRSYLTPGDSSSGWTAGAAAYYVGYLQPRTFLLKYNENGTITDAVDCALDPLSETKCTLKSFTVEKGIYQTSNFRVQPTESIVRFPNITNLCPFGEVFNATRFASVYAWNRKRISNCVADYSVLYNSASFSTFKCYGVSPTKLNDLCFTNVYADSFVIRGDEVRQIAPGQTGKIADYNYKLPDDFTGCVIAWNSNNLDSKVGGNYNYLYRLFRKSNLKPFERDISTEIYQAGSTPCNGVEGFNCYFPLQSYGFQPTNGVGYQPYRVVVLSFELLHAPATVCGPKKSTNLVKNKCVNFNFNGLTGTGVLTESNKKFLPFQQFGRDIADTTDAVRDPQTLEILDITPCSFGGVSVITPGTNTSNQVAVLYQDVNCTEVPVAIHADQLTPTWRVYSTGSNVFQTRAGCLIGAEHVNNSYECDIPIGAGICASYQTQTNSPRRARSVASQSIIAYTMSLGAENSVAYSNNSIAIPTNFTISVTTEILPVSMTKTSVDCTMYICGDSTECSNLLLQYGSFCTQLNRALTGIAVEQDKNTQEVFAQVKQIYKTPPIKDFGGFNFSQILPDPSKPSKRSFIEDLLFNKVTLADAGFIKQYGDCLGDISARDLICAQKFNGLTVLPPLLTDEMIAQYTSALLAGTITSGWWFGAGAALQIPFAMQMAYRFNGIGVTQNVLYENQKLIANQFNSAIGKIQDSLSSTASALGKLQDVVNQNAQALNTLVKQLSSNFGAISSVLNDILSRLDPPEAEVQIDRLITGRLQSLQTYVTQQLIRAAEIRWSANLAATKMSECVLGQSKRVDFCGKGYHLMSFPQSAPHGVVFLHVTYVPAQEKNFTTAPAICHDGKAHFPREGVFVSNGTHWFVTQRNFYEPQIITTDNTFVSGNCDVVIGIVNNTVYDPLQPELDSGGGGSDIDPYKEFGSSYQLLNFLPLDFFPDLNALVDTATALYEEELTGREHCSPHHTAIRQALVCWDELTKLIAWMSSNITSEQVRTIIVNHVNDTWGLKVRQSLWFHLSCLTFGQHTVQEFLVSFGVWIRTPAPYRPPNAPILSTLPEHTVIC

SEQ ID NO: 10842 - protein, 1301 aa, Artificial Sequence
  SARS-CoV-2/USA/NY-NYUMC7/2020__EPI_ISL_418192 spike protein (1-1147)(K986P_V987P_T887W_A1020W) WhcAg construct
MFVFLVLLPLVSSQCVNLTTRTQLPPAYTNSFTRGVYYPDKVFRSSVLHSTQDLFLPFFSNVTWFHAIHVSGTNGTKRFDNPVLPFNDGVYFASTEKSNIIRGWIFGTTLDSKTQSLLIVNNATNVVIKVCEFQFCNDPFLGVYHHKNNKSWMESEFRVYSSANNCTFEYVSQPFLMDLEGKQGNFKNLREFVFKNIDGYFKIYSKHTPINLVRDLPQGFSALEPLVDLPIGINITRFQTLLALHRSYLTPGDSSSGWTAGAAAYYVGYLQPRTFLLKYNENGTITDAVDCALDPLSETKCTLKSFTVEKGIYQTSNFRVQPTESIVRFPNITNLCPFGEVFNATRFASVYAWNRKRISNCVADYSVLYNSASFSTFKCYGVSPTKLNDLCFTNVYADSFVIRGDEVRQIAPGQTGKIADYNYKLPDDFTGCVIAWNSNNLDSKVGGNYNYLYRLFRKSNLKPFERDISTEIYQAGSTPCNGVEGFNCYFPLQSYGFQPTNGVGYQPYRVVVLSFELLHAPATVCGPKKSTNLVKNKCVNFNFNGLTGTGVLTESNKKFLPFQQFGRDIADTTDAVRDPQTLEILDITPCSFGGVSVITPGTNTSNQVAVLYQGVNCTEVPVAIHADQLTPTWRVYSTGSNVFQTRAGCLIGAEHVNNSYECDIPIGAGICASYQTQTNSPRRARSVASQSIIAYTMSLGAENSVAYSNNSIAIPTNFTISVTTEILPVSMTKTSVDCTMYICGDSTECSNLLLQYGSFCTQLNRALTGIAVEQDKNTQEVFAQVKQIYKTPPIKDFGGFNFSQILPDPSKPSKRSFIEDLLFNKVTLADAGFIKQYGDCLGDIAARDLICAQKFNGLTVLPPLLTDEMIAQYTSALLAGTITSGWWFGAGAALQIPFAMQMAYRFNGIGVTQNVLYENQKLIANQFNSAIGKIQDSLSSTASALGKLQDVVNQNAQALNTLVKQLSSNFGAISSVLNDILSRLDPPEAEVQIDRLITGRLQSLQTYVTQQLIRAAEIRWSANLAATKMSECVLGQSKRVDFCGKGYHLMSFPQSAPHGVVFLHVTYVPAQEKNFTTAPAICHDGKAHFPREGVFVSNGTHWFVTQRNFYEPQIITTDNTFVSGNCDVVIGIVNNTVYDPLQPELDSGGGGSDIDPYKEFGSSYQLLNFLPLDFFPDLNALVDTATALYEEELTGREHCSPHHTAIRQALVCWDELTKLIAWMSSNITSEQVRTIIVNHVNDTWGLKVRQSLWFHLSCLTFGQHTVQEFLVSFGVWIRTPAPYRPPNAPILSTLPEHTVIC

SEQ ID NO: 10843 - protein, 1301 aa, Artificial Sequence
  SARS-CoV-2/Iceland/189/2020__EPI_ISL_417709 spike protein (1-1147)(K986P_V987P_T887W_A1020W) WhcAg construct
MFVFLVLLPLVSSQCVNLTTRTQLPPAYTNSFTRGVYYPDKVFRSSVLHSTQDLFLPFFSNVTWFHAIHVSGTNGTKRFDNPVLPFNDGVYFASTEKSNIIRGWIFGTTLDSKTQSLLIVNNATNVVIKVCEFQFCNDPFLGVYYHKNNKSWMESEFRVYSSANNCTFEYVSQPFLMDLEGKQGNFKNLREFVFKNIDGYFKIYSKHTPINLVRDLPQGFSALEPLVDLPIGINITRFQTLLALHRSYLTPGDSSSGWTAGAAAYYVGYLQPRTFLLKYNENGTITDAVDCALDPLSETKCTLKSFTVEKGIYQTSNFRVQPTESIVRFPNITNLCPFGEVFNATRFASVYAWNRKRISNCVADYSVLYNSASFSTFKCYGVSPTKLNDLCFTNVYADSFVIRGDEVRQIAPGQTGKIADYNYKLPDDFTGCVIAWNSNNLDSKVGGNYNYLYRLFRKSNLKPFERDISTEIYQAGSTPCNGVEGFNCYFPLQSYGFQPTNGVGYQPYRVVVLSFELLHAPATVCGPKKSTNLVKNKCVNFNFNGLTGTGVLTESNKKFLPFQQFGRDIADTTDAVRDPQTLEILDITPCSFGGVSVITPGTNTSNQVAVLYQGVNCTEVPVAIHADQLTPTWRVYSTGSNVFQTRAGCLIGAEHVNNSYECDIPIGAGICASYQTQTNSPRRARSVASQSIIAYTMSLGAENSVAYSNNSIAIPTNFTISVTTEILPVSMTKTSVDCTMYICGDSTECSNLLLQYGSFCTQLNRALTGIAVEQDKNTQEVFAQVKQIYKTPPIKDFGGFNFSQILPDPSKPSKRSFIEDLLFNKVTLADAGFTKQYGDCLGDIAARDLICAQKFNGLTVLPPLLTDEMIAQYTSALLAGTITSGWWFGAGAALQIPFAMQMAYRFNGIGVTQNVLYENQKLIANQFNSAIGKIQDSLSSTASALGKLQDVVNQNAQALNTLVKQLSSNFGAISSVLNDILSRLDPPEAEVQIDRLITGRLQSLQTYVTQQLIRAAEIRWSANLAATKMSECVLGQSKRVDFCGKGYHLMSFPQSAPHGVVFLHVTYVPAQEKNFTTAPAICHDGKAHFPREGVFVSNGTHWFVTQRNFYEPQIITTDNTFVSGNCDVVIGIVNNTVYDPLQPELDSGGGGSDIDPYKEFGSSYQLLNFLPLDFFPDLNALVDTATALYEEELTGREHCSPHHTAIRQALVCWDELTKLIAWMSSNITSEQVRTIIVNHVNDTWGLKVRQSLWFHLSCLTFGQHTVQEFLVSFGVWIRTPAPYRPPNAPILSTLPEHTVIC

SEQ ID NO: 10844 - protein, 1301 aa, Artificial Sequence
  SARS-CoV-2/Australia/NSW56/2020__EPI_ISL_417408 spike protein (1-1147)(K986P_V987P_T887W_A1020W) WhcAg construct
MFVFLVLLPLVSSQCVNLTTRTQLPPAYTNSFTRGVYYPDKVFRSSVLHSTQDLFLPFFSNVTWFHAIHVSGTNGTKRFDNPVLPFNDGVYFASTEKSNIIRGWIFGTTLDSKTQSLLIVNNATNVVIKVCEFQFCNDPFLGVYYHKNNKSWMESEFRVYSSANNCTFEYVSQPFLMDLEGKQGNFKNLREFVFKNIDGYFKIYSKHTPINLVRDLPQGFSALEPLVDLPIGINITRFQTLLALHRSYLTPGDSSSGWTAGAAAYYVGYLQPRTFLLKYNENGTITDAVDCALDPLSETKCTLKSFTVEKGIYQTSNFRVQPTESIVRFPNITNLCPFGEVFNATRFASVYAWNRKRISNCVADYSVLYNSASFSTFKCYGVSPTKLNDLCFTNVYADSFVIRGDEVRQIAPGQTGKIADYNYKLPDDFTGCVIAWNSNNLDSKVGGNYNYLYRLFRKSNLKPFERDISTEIYQAGSTPCNGVEGFNCYFPLQSYGFQPTNGVGYQPYRVVVLSFELLHAPATVCGPKKSTNLVKNKCVNFNFNGLTGTGVLTESNKKFLPFQQFGRDIADTTDAVRDPQTLEILDITPCSFGGVSVITPGTNTSNQVAVLYQDVNCTEVPVAIHADQLTPTWRVYSTGSNVFQTRAGCLIGAEHVNNSYECDIPIGAGICASYQTQTNSPRRARSVASQSIIAYTMSLGAENSVAYSNNSIAIPTNFTISVTTEILPVSMTKTSVDCTMYICGDSTECSNLLLQYGSFCTQLNRALTGIAVEQDKNTQEVFAQVKQIYKTPPIKDFGGFNFSQILPDSSKPSKRSFIEDLLFNKVTLADAGFIKQYGDCLGDIAARDLICAQKFNGLTVLPPLLTDEMIAQYTSALLAGTITSGWWFGAGAALQIPFAMQMAYRFNGIGVTQNVLYENQKLIANQFNSAIGKIQDSLSSTASALGKLQDVVNQNAQALNTLVKQLSSNFGAISSVLNDILSRLDPPEAEVQIDRLITGRLQSLQTYVTQQLIRAAEIRWSANLAATKMSECVLGQSKRVDFCGKGYHLMSFPQSAPHGVVFLHVTYVPAQEKNFTTAPAICHDGKAHFPREGVFVSNGTHWFVTQRNFYEPQIITTDNTFVSGNCDVVIGIVNNTVYDPLQPELDSGGGGSDIDPYKEFGSSYQLLNFLPLDFFPDLNALVDTATALYEEELTGREHCSPHHTAIRQALVCWDELTKLIAWMSSNITSEQVRTIIVNHVNDTWGLKVRQSLWFHLSCLTFGQHTVQEFLVSFGVWIRTPAPYRPPNAPILSTLPEHTVIC

SEQ ID NO: 10845 - protein, 1301 aa, Artificial Sequence
  SARS-CoV-2/Iceland/280/2020__EPI_ISL_417608 spike protein (1-1147)(K986P_V987P_T887W_A1020W) WhcAg construct
MFVFLVLLPLVSSQCVNLTTRTQLPPAYTNSFTRGVYYPDKVFRSSVLHSTQDLFLPFFSNVTWFHAIHVSGTNGTKRFDNPVLPFNDGVYFASTEKSNIIRGWIFGTTLDSKTQSLLIVNNATNVVIKVCEFQFCNDPFLGVYYHKNNKSWMESEFRVYSSANNCTFEYVSQPFLMDLEGKQGNFKNLREFVFKNIDGYFKIYSKHTPINLVRDLPQGFSALEPLVDLPIGINITRFQTLLALHRSYLTPGDSSSGWTAGAAAYYVGYLQPRTFLLKYNENGTITDAVDCALDPLSETKCTLKSFTVEKGIYQTSNFRVQPTESIVRFPNITNLCPFGEVFNATRFASVYAWNRKRISNCVADYSVLYNSASFSTFKCYGVSPTKLNDLCFTNVYADSFVIRGDEVRQIAPGQTGKIADYNYKLPDDFTGCVIAWNSNNLDSKVGGNYNYLYRLFRKSNLKPFERDISTEIYQAGSTPCNGVEGFNCYFPLQSYGFQPTNGVGYQPYRVVVLSFELLHAPATVCGPKKSTNLVKNKCVNFNFNGLTGTGVLTESNKKFLPFQQFGRDIADTTDAVRDPQTLEILDITPCSFGGVSVITPGTNTSNQVAVLYQGVNCTEVPVAIHADQLTPTWRVYSTGSNVFQTRAGCLIGAEHVNNSYECDIPIGAGICASYHTQTNSPRRARSVASQSIIAYTMSLGAENSVAYSNNSIAIPTNFTISVTTEILPVSMTKTSVDCTMYICGDSTECSNLLLQYGSFCTQLNRALTGIAVEQDKNTQEVFAQVKQIYKTPPIKDFGGFNFSQILPDPSKPSKRSFIEDLLFNKVTLADAGFIKQYGDCLGDIAARDLICAQKFNGLTVLPPLLTDEMIAQYTSALLAGTITSGWWFGAGAALQIPFAMQMAYRFNGIGVTQNVLYENQKLIANQFNSAIGKIQDSLSSTASALGKLQDVVNQNAQALNTLVKQLSSNFGAISSVLNDILSRLDPPEAEVQIDRLITGRLQSLQTYVTQQLIRAAEIRWSANLAATKMSECVLGQSKRVDFCGKGYHLMSFPQSAPHGVVFLHVTYVPAQEKNFTTAPAICHDGKAHFPREGVFVSNGTHWFVTQRNFYEPQIITTDNTFVSGNCDVVIGIVNNTVYDPLQPELDSGGGGSDIDPYKEFGSSYQLLNFLPLDFFPDLNALVDTATALYEEELTGREHCSPHHTAIRQALVCWDELTKLIAWMSSNITSEQVRTIIVNHVNDTWGLKVRQSLWFHLSCLTFGQHTVQEFLVSFGVWIRTPAPYRPPNAPILSTLPEHTVIC

SEQ ID NO: 10846 - protein, 1301 aa, Artificial Sequence; identical to SEQ ID NO: 10801
  SARS-CoV-2/Iceland/247/2020__EPI_ISL_417575 spike protein (1-1147)(K986P_V987P_T887W_A1020W) WhcAg construct

SEQ ID NO: 10847 - protein, 1301 aa, Artificial Sequence
  SARS-CoV-2/Iceland/238/2020__EPI_ISL_417566 spike protein (1-1147)(K986P_V987P_T887W_A1020W) WhcAg construct
MFVFLVLLPLVSSQCVNLTTRTQLPPAYTNSFTRGVYYPDKVFRSSVLHSTQDLFLPFFSNVTWFHAIHVSGTNGTKRFDNPVLPFNDGVYFASTEKSNIIRGWIFGTTLDSKTQSLLIVNNATNVVIKVCEFQFCNDPFLGVYYHKNNKSWMESEFRVYSSANNCTFEYVSQPFLMDLEGKQGNFKNLREFVFKNIDGYFKIYSKHTPINLVRDLPQGFSALEPLVDLPIGINITRFQTLLALHRSYLTPGDSSSGWTAGAAAYYVGYLQPRTFLLKYNENGTITDAVDCALDPLSETKCTLKSFTVEKGIYQTSNFRVQPTESIVRFPNITNLCPFGEVFNATRFASVYAWNRKRISNCVADYSVLYNSASFSTFKCYGVSPTKLNDLCFTNVYADSFVIRGDEVRQIAPGQTGKIADYNYKLPDDFTGCVIAWNSNNLDSKVGGNYNYLYRLFRKSNLKPFERDISTEIYQAGSTPCNGVEGFNCYFPLQSYGFQPTNGVGYQPYRVVVLSFELLHAPATVCGPKKSTNLVKNKCVNFNFNGLTGTGVLTESNKKFLPFQQFGRDIADTTDAVRDPQTLEILDITPCSFGGVSVITPGTNTSNQVAVLYQGVNCTEVPVAIHADQLTPTWRVYSTGSNVFQTRAGCLIGAEHVNNSYECDIPIGAGICASYQTQTNSPRRARSVASQSIIAYTMSLGAENSVAYSNNSIAIPTNFTISVTTEILPVSMTKTSVDCTMYICGDSTECSNLLLQYGSFCTQLNRALTGIAVEQDKNTQEVFAQVKQIYKTPPIKDFGGFNFSQILPDPSKPSKRSFIEDLLFNKVTLADVGFIKQYGDCLGDIAARDLICAQKFNGLTVLPPLLTDEMIAQYTSALLAGTITSGWWFGAGAALQIPFAMQMAYRFNGIGVTQNVLYENQKLIANQFNSAIGKIQDSLSSTASALGKLQDVVNQNAQALNTLVKQLSSNFGAISSVLNDILSRLDPPEAEVQIDRLITGRLQSLQTYVTQQLIRAAEIRWSANLAATKMSECVLGQSKRVDFCGKGYHLMSFPQSAPHGVVFLHVTYVPAQEKNFTTAPAICHDGKAHFPREGVFVSNGTHWFVTQRNFYEPQIITTDNTFVSGNCDVVIGIVNNTVYDPLQPELDSGGGGSDIDPYKEFGSSYQLLNFLPLDFFPDLNALVDTATALYEEELTGREHCSPHHTAIRQALVCWDELTKLIAWMSSNITSEQVRTIIVNHVNDTWGLKVRQSLWFHLSCLTFGQHTVQEFLVSFGVWIRTPAPYRPPNAPILSTLPEHTVIC

SEQ ID NO: 10848 - protein, 1301 aa, Artificial Sequence
  SARS-CoV-2/Greece/16/2020__EPI_ISL_418265 spike protein (1-1147)(K986P_V987P_T887W_A1020W) WhcAg construct
MFVFLVLLPLVSSQCVNLTTRTQLPPAYTNSFTRGVYYPDKVFRSSVLHSTQDLFLPFFSNVTWFHAIHVSGTNGTKRFDNPVLPFNDGVYFASTEKSNIIRGWIFGTTLDSKTQSLLIVNNATNVVIKVCEFQFCNDPFLGVYYHKNNKSWMESEFRVYSSANNCTFEYVSQPFLMDLEGKQGNFKNLREFVFKNVDGYFKIYSKHTPINLVRDLPQGFSALEPLVDLPIGINITRFQTLLALHRSYLTPGDSSSGWTAGAAAYYVGYLQPRTFLLKYNENGTITDAVDCALDPLSETKCTLKSFTVEKGIYQTSNFRVQPTESIVRFPNITNLCPFGEVFNATRFASVYAWNRKRISNCVADYSVLYNSASFSTFKCYGVSPTKLNDLCFTNVYADSFVIRGDEVRQIAPGQTGKIADYNYKLPDDFTGCVIAWNSNNLDSKVGGNYNYLYRLFRKSNLKPFERDISTEIYQAGSTPCNGVEGFNCYFPLQSYGFQPTNGVGYQPYRVVVLSFELLHAPATVCGPKKSTNLVKNKCVNFNFNGLTGTGVLTESNKKFLPFQQFGRDIADTTDAVRDPQTLEILDITPCSFGGVSVITPGTNTSNQVAVLYQDVNCTEVPVAIHADQLTPTWRVYSTGSNVFQTRAGCLIGAEHVNNSYECDIPIGAGICASYQTQTNSPRRARSVASQSIIAYTMSLGAENSVAYSNNSIAIPTNFTISVTTEILPVSMTKTSVDCTMYICGDSTECSNLLLQYGSFCTQLNRALTGIAVEQDKNTQEVFAQVKQIYKTPPIKDFGGFNFSQILPDPSKPSKRSFIEDLLFNKVTLADAGFIKQYGDCLGDIAARDLICAQKFNGLTVLPPLLTDEMIAQYTSALLAGTITSGWWFGAGAALQIPFAMQMAYRFNGIGVTQNVLYENQKLIANQFNSAIGKIQDSLSSTASALGKLQDVVNQNAQALNTLVKQLSSNFGAISSVLNDILSRLDPPEAEVQIDRLITGRLQSLQTYVTQQLIRAAEIRWSANLAATKMSECVLGQSKRVDFCGKGYHLMSFPQSAPHGVVFLHVTYVPAQEKNFTTAPAICHDGKAHFPREGVFVSNGTHWFVTQRNFYEPQIITTDNTFVSGNCDVVIGIVNNTVYDPLQPELDSGGGGSDIDPYKEFGSSYQLLNFLPLDFFPDLNALVDTATALYEEELTGREHCSPHHTAIRQALVCWDELTKLIAWMSSNITSEQVRTIIVNHVNDTWGLKVRQSLWFHLSCLTFGQHTVQEFLVSFGVWIRTPAPYRPPNAPILSTLPEHTVIC

SEQ ID NO: 10849 - protein, 1301 aa, Artificial Sequence
  SARS-CoV-2/Iceland/319/2020__EPI_ISL_417648 spike protein (1-1147)(K986P_V987P_T887W_A1020W) WhcAg construct
MFVFLVLLPLVSSQCVNLTTRTQLPPAYTNSFTRGVYYPDKVFRSSVLHSTQDLFLPFFSNVTWFHAIHVSGTNGTKRFDNPVLPFNDGVYFASTEKSNIIRGWIFGTTLDSKTQSLLIVNNATNVVIKVCEFQFCNDPFLGVYYHKNNKSWMESEFRVYSSANNCTFEYVSQPFLIDLEGKQGNFKNLREFVFKNIDGYFKIYSKHTPINLVRDLPQGFSALEPLVDLPIGINITRFQTLLALHRSYLTPGDSSSGWTAGAAAYYVGYLQPRTFLLKYNENGTITDAVDCALDPLSETKCTLKSFTVEKGIYQTSNFRVQPTESIVRFPNITNLCPFGEVFNATRFASVYAWNRKRISNCVADYSVLYNSASFSTFKCYGVSPTKLNDLCFTNVYADSFVIRGDEVRQIAPGQTGKIADYNYKLPDDFTGCVIAWNSNNLDSKVGGNYNYLYRLFRKSNLKPFERDISTEIYQAGSTPCNGVEGFNCYFPLQSYGFQPTNGVGYQPYRVVVLSFELLHAPATVCGPKKSTNLVKNKCVNFNFNGLTGTGVLTESNKKFLPFQQFGRDIADTTDAVRDPQTLEILDITPCSFGGVSVITPGTNTSNQVAVLYQGVNCTEVPVAIHADQLTPTWRVYSTGSNVFQTRAGCLIGAEHVNNSYECDIPIGAGICASYQTQTNSPRRARSVASQSIIAYTMSLGAENSVAYSNNSIAIPTNFTISVTTEILPVSMTKTSVDCTMYICGDSTECSNLLLQYGSFCTQLNRALTGIAVEQDKNTQEVFAQVKQIYKTPPIKDFGGFNFSQILPDPSKPSKRSFIEDLLFNKVTLADAGFIKQYGDCLGDIAARDLICAQKFNGLTVLPPLLTDEMIAQYTSALLAGTITSGWWFGAGAALQIPFAMQMAYRFNGIGVTQNVLYENQKLIANQFNSAIGKIQDSLSSTASALGKLQDVVNQNAQALNTLVKQLSSNFGAISSVLNDILSRLDPPEAEVQIDRLITGRLQSLQTYVTQQLIRAAEIRWSANLAATKMSECVLGQSKRVDFCGKGYHLMSFPQSAPHGVVFLHVTYVPAQEKNFTTAPAICHDGKAHFPREGVFVSNGTHWFVTQRNFYEPQIITTDNTFVSGNCDVVIGIVNNTVYDPLQPELDSGGGGSDIDPYKEFGSSYQLLNFLPLDFFPDLNALVDTATALYEEELTGREHCSPHHTAIRQALVCWDELTKLIAWMSSNITSEQVRTIIVNHVNDTWGLKVRQSLWFHLSCLTFGQHTVQEFLVSFGVWIRTPAPYRPPNAPILSTLPEHTVIC

SEQ ID NO: 10850 - protein, 1301 aa, Artificial Sequence
  SARS-CoV-2/Congo/94/2020__EPI_ISL_417947 spike protein (1-1147)(K986P_V987P_T887W_A1020W) WhcAg construct
MFVFLVLLPLVSSQCVNLTTRTQLPPAYTNSFTRGVYYPDKVFRSSVLHSTQDLFLPFFSNVTWFHAIHVSGTNGTKRFDNPVLPFNDGVYFASTEKSNIIRGWIFGTTLDSKTQSLLIVNNATNVVIKVCEFQFCNDPFLGVYYHKNNKSWMESEFRVYSSANNCTFEYVSQPFLMDLEGKQGNFKNLREFVFKNIDGYFKIYSKHTPINLVRDLPQGFSALEPLVDLPIGINITRFQTLLALHRSYLTPGDSSSGWTAGAAAYYVGYLQPRTFLLKYNENGTITDAVDCALDPLSETKCTLKSFTVEKGIYQTSNFRVQPTESIVRFPNITNLCPFGEVFNATRFASVYAWNRKRISNCVADYSVLYNSASFSTFKCYGVSPTKLNDLCFTNVYADSFVIRGDEVRQIAPGQTGKIADYNYKLPDDFTGCVIAWNSNNLDSKVGGNYNYLYRLFRKSNLKPFERDISTEIYQAGSTPCNGVEGFNCYFPLQSYGFQPTNGVGYQPYRVVVLSFELLHAPATVCGPKKSTNLVKNKCVNFNFNGLTGTGVLTESNKKFLPFQQFGRDIADTTDAVRDPQTLEILDITPCSFGGVSVITPGTNTSNQVAVLYQGVNCTEVPVAIHADQLTPTWRVYSTGSNVFQTRAGCLIGAEHVNNSYECDIPIGAGICASYQTQTNSPRRARSVASQSIIAYTMSLGAENSVAYSNNSIAIPTNFTISVTTEILPVSMTKTSVDCTMYICGDSTECSNLLLQYGSFCTQLNRALTGIAVEQDKNTQEVFAQVKQIYKTPPIKDFGGFNFSQILPDPSKPSKRSFIEDILFNKVTLADAGFIKQYGDCLGDIAARDLICAQKFNGLTVLPPLLTDEMIAQYTSALLAGTITSGWWFGAGAALQIPFAMQMAYRFNGIGVTQNVLYENQKLIANQFNSAIGKIQDSLSSTASALGKLQDVVNQNAQALNTLVKQLSSNFGAISSVLNDILSRLDPPEAEVQIDRLITGRLQSLQTYVTQQLIRAAEIRWSANLAATKMSECVLGQSKRVDFCGKGYHLMSFPQSAPHGVVFLHVTYVPAQEKNFTTAPAICHDGKAHFPREGVFVSNGTHWFVTQRNFYEPQIITTDNTFVSGNCDVVIGIVNNTVYDPLQPELDSGGGGSDIDPYKEFGSSYQLLNFLPLDFFPDLNALVDTATALYEEELTGREHCSPHHTAIRQALVCWDELTKLIAWMSSNITSEQVRTIIVNHVNDTWGLKVRQSLWFHLSCLTFGQHTVQEFLVSFGVWIRTPAPYRPPNAPILSTLPEHTVIC

SEQ ID NO: 10851 - protein, 1301 aa, Artificial Sequence
  SARS-CoV-2/Congo/158/2020__EPI_ISL_417950 spike protein (1-1147)(K986P_V987P_T887W_A1020W) WhcAg construct
MFVFLVLLPLVSSQCVNLTTRTQLPPAYTNSFTRGVYYPDKVFRSSVLHSTQDLFLPFFSNVTWFHAIHVSGTNGTKRFDNPVLPFNDGVYFASTEKSNIIRGWIFGTTLDSKTQSLLIVNNATNVVIKVCEFQFCNDPFLGVYYHKNNKSWMESEFRVYSSANNCTFEYVSQPFLMDLEGKQGNFKNLREFVFKNIDGYFKIYSKHTPINLVRDLPQGFSALEPLVDLPIGINITRFQTLLALHRSYLTPGDSSSGWTAGAAAYYVGYLQPRTFLLKYNENGTITDAVDCALDPLSETKCTLKSFTVEKGIYQTSNFRVQPTESIVRFPNITNLCPFGEVFNATRFASVYAWNRKRISNCVADYSVLYNSASFSTFKCYGVSPTKLNDLCFTNVYADSFVIRGDEVRQIAPGQTGKIADYNYKLPDDFTGCVIAWNSNNLDSKVGGNYNYLYRLFRKSNLKPFERDISTEIYQAGSTPCNGVEGFNCYFPLQSYGFQPTNGVGYQPYRVVVLSFELLHAPATVCGPKKSTNLVKNKCVNFNFNGLTGTGVLTESNKKFLPFQQFGRDIADTTDAVRDPQTLEILDITPCSFGGVSVITPGTNTSNQVAVLYQDVNCTEVPVAIHADQLTPTWRVYSTGSNVFQTRAGCLIGAEHVNNSYECDIPIGAGICASYQTQTNSPRRARSVASQSIIAYTMSLGAENSVAYSNNSIAIPTNFTISVTTEILPVSMTKTSVDCTMYICGDSTECSNLLLQYGSFCTQLNRALTGIAVEQDKNTQEVFAQVKQIYKTPPIKDFGGFNFSQILPDPSKPSKRSFIEDLLFNKVTLADAGFIKQYGDCLGDIAARDLICAQKFNGLTVLPPLLTDEMIAQYTSALLAGTITSGWWFGAGAALQIPFAMQMAYRFNGIGVTQNVLYENQKLIANQFNSAIGKIQDSLSSTASALGKLQDVVNQNAQALNTLVKQLSSNFGAISSVLNDILSRLDPPEAEVQIDRLITGRLQSLQTYVTQQLIRAAEIRWSANLAATKMSECVLGQSKRVDFCGKGYHLMSFPQSAPHGVVFLHVTYVPAQEKNFTTAPAICHDGKAHFPREGVFVSNGTHWFVTQRNFYEPQIITTDNTFLSGNCDVVIGIVNNTVYDPLQPELDSGGGGSDIDPYKEFGSSYQLLNFLPLDFFPDLNALVDTATALYEEELTGREHCSPHHTAIRQALVCWDELTKLIAWMSSNITSEQVRTIIVNHVNDTWGLKVRQSLWFHLSCLTFGQHTVQEFLVSFGVWIRTPAPYRPPNAPILSTLPEHTVIC

SEQ ID NO: 10852 - protein, 1301 aa, Artificial Sequence
  SARS-CoV-2/USA/UT-00034/2020__EPI_ISL_417977 spike protein (1-1147)(K986P_V987P_T887W_A1020W) WhcAg construct
MFVFLVLLPLVSSQCVNLTTRTQLPPAYTNSFTRGVYYPDKVFRSSVLHSTQDLFLPFFSNVTWFHAIHVSGTNGTKRFDNPVLPFNDGVYFASTEKSNIIRGWIFGTTLDSKTQSLLIVNNATNVVIKVCEFQFCNDPFLGVYYYKNNKSWMESEFRVYSSANNCTFEYVSQPFLMDLEGKQGNFKNLREFVFKNIDGYFKIYSKHTPINLVRDLPQGFSALEPLVDLPIGINITRFQTLLALHRSYLTPGDSSSGWTAGAAAYYVGYLQPRTFLLKYNENGTITDAVDCALDPLSETKCTLKSFTVEKGIYQTSNFRVQPTESIVRFPNITNLCPFGEVFNATRFASVYAWNRKRISNCVADYSVLYNSASFSTFKCYGVSPTKLNDLCFTNVYADSFVIRGDEVRQIAPGQTGKIADYNYKLPDDFTGCVIAWNSNNLDSKVGGNYNYLYRLFRKSNLKPFERDISTEIYQAGSTPCNGVEGFNCYFPLQSYGFQPTNGVGYQPYRVVVLSFELLHAPATVCGPKKSTNLVKNKCVNFNFNGLTGTGVLTESNKKFLPFQQFGRDIADTTDAVRDPQTLEILDITPCSFGGVSVITPGTNTSNQVAVLYQGVNCTEVPVAIHADQLTPTWRVYSTGSNVFQTRAGCLIGAEHVNNSYECDIPIGAGICASYQTQTNSPRRARSVASQSIIAYTMSLGAENSVAYSNNSIAIPTNFTISVTTEILPVSMTKTSVDCTMYICGDSTECSNLLLQYGSFCTQLNRALTGIAVEQDKNTQEVFAQVKQIYKTPPIKDFGGFNFSQILPDPSKPSKRSFIEDLLFNKVTLADAGFIKQYGDCLGDIAARDLICAQKFNGLTVLPPLLTDEMIAQYTSALLAGTITSGWWFGAGAALQIPFAMQMAYRFNGIGVTQNVLYENQKLIANQFNSAIGKIQDSLSSTASALGKLQDVVNQNAQALNTLVKQLSSNFGAISSVLNDILSRLDPPEAEVQIDRLITGRLQSLQTYVTQQLIRAAEIRWSANLAATKMSECVLGQSKRVDFCGKGYHLMSFPQSAPHGVVFLHVTYVPAQEKNFTTAPAICHDGKAHFPREGVFVSNGTHWFVTQRNFYEPQIITTDNTFVSGNCDVVIGIVNNTVYDPLQPELDSGGGGSDIDPYKEFGSSYQLLNFLPLDFFPDLNALVDTATALYEEELTGREHCSPHHTAIRQALVCWDELTKLIAWMSSNITSEQVRTIIVNHVNDTWGLKVRQSLWFHLSCLTFGQHTVQEFLVSFGVWIRTPAPYRPPNAPILSTLPEHTVIC

SEQ ID NO: 10853 - protein, 1301 aa, Artificial Sequence
  SARS-CoV-2/USA/UT-00033/2020__EPI_ISL_417976 spike protein (1-1147)(K986P_V987P_T887W_A1020W) WhcAg construct
MFVFLVLLPLVSSQCVNLTTRTQLPPAYTNSFTRGVYYPDKVFRSSVLHSTQDLFLPFFSNVTWFHAIHVSGTNGTKRFDNPVLPFNDGVYFASTEKSNIIRGWIFGTTLDSKTQSLLIVNNATNVVIKVCEFQFCNDPFLGVYYHKNNKSWMESEFRVYSSANNCTFEYVSQPFLMDLEGKQGNFKNLREFVFKNIDGYFKIYSKHTPINLVRDLPQGFSALEPLVDLPIGINITRFQTLLALHRSYLTPGDSSSGLTAGAAAYYVGYLQPRTFLLKYNENGTITDAVDCALDPLSETKCTLKSFTVEKGIYQTSNFRVQPTESIVRFPNITNLCPFGEVFNATRFASVYAWNRKRISNCVADYSVLYNSASFSTFKCYGVSPTKLNDLCFTNVYADSFVIRGDEVRQIAPGQTGKIADYNYKLPDDFTGCVIAWNSNNLDSKVGGNYNYLYRLFRKSNLKPFERDISTEIYQAGSTPCNGVEGFNCYFPLQSYGFQPTNGVGYQPYRVVVLSFELLHAPATVCGPKKSTNLVKNKCVNFNFNGLTGTGVLTESNKKFLPFQQFGRDIADTTDAVRDPQTLEILDITPCSFGGVSVITPGTNTSNQVAVLYQGVNCTEVPVAIHADQLTPTWRVYSTGSNVFQTRAGCLIGAEHVNNSYECDIPIGAGICASYQTQTNSPRRARSVASQSIIAYTMSLGAENSVAYSNNSIAIPTNFTISVTTEILPVSMTKTSVDCTMYICGDSTECSNLLLQYGSFCTQLNRALTGIAVEQDKNTQEVFAQVKQIYKTPPIKDFGGFNFSQILPDPSKPSKRSFIEDLLFNKVTLADAGFIKQYGDCLGDIAARDLICAQKFNGLTVLPPLLTDEMIAQYTSALLAGTITSGWWFGAGAALQIPFAMQMAYRFNGIGVTQNVLYENQKLIANQFNSAIGKIQDSLSSTASALGKLQDVVNQNAQALNTLVKQLSSNFGAISSVLNDILSRLDPPEAEVQIDRLITGRLQSLQTYVTQQLIRAAEIRWSANLAATKMSECVLGQSKRVDFCGKGYHLMSFPQSAPHGVVFLHVTYVPAQEKNFTTAPAICHDGKAHFPREGVFVSNGTHWFVTQRNFYEPQIITTDNTFVSGNCDVVIGIVNNTVYDPLQPELDSGGGGSDIDPYKEFGSSYQLLNFLPLDFFPDLNALVDTATALYEEELTGREHCSPHHTAIRQALVCWDELTKLIAWMSSNITSEQVRTIIVNHVNDTWGLKVRQSLWFHLSCLTFGQHTVQEFLVSFGVWIRTPAPYRPPNAPILSTLPEHTVIC

SEQ ID NO: 10854 - protein, 1301 aa, Artificial Sequence
  SARS-CoV-2/USA/WI-13/2020__EPI_ISL_417516 spike protein (1-1147)(K986P_V987P_T887W_A1020W) WhcAg construct
MFVFLVLLPLVSSQCVNLTTRTQLPPAYTNSFTRGVYYPDKVFRSSVLHSTQDLFLPFFSNVTWFHAIHVSGTNGTKRFDNPVLPFNDGVYFASTEKSNIIRGWIFGTTLDSKTQSLLIVNNATNVVIKVCEFQFCNDPFLGVYYHKNNKSWMESEFRVYSSANNCTFEYVSQPFLMDLEGKQGNFKNLREFVFKNIDGYFKIYSKHTPINLVRDLPQGFSALEPLVDLPIGINITRFQTLLALHRSYLTPGDSSSGWTAGAAAYYVGYLQPRTFLLKYNENGTITDAVDCALDPLSETKCTLKSFTVEKGIYQTSNFRVLPTESIVRFPNITNLCPFGEVFNATRFASVYAWNRKRISNCVADYSVLYNSASFSTFKCYGVSPTKLNDLCFTNVYADSFVIRGDEVRQIAPGQTGKIADYNYKLPDDFTGCVIAWNSNNLDSKVGGNYNYLYRLFRKSNLKPFERDISTEIYQAGSTPCNGVEGFNCYFPLQSYGFQPTNGVGYQPYRVVVLSFELLHAPATVCGPKKSTNLVKNKCVNFNFNGLTGTGVLTESNKKFLPFQQFGRDIADTTDAVRDPQTLEILDITPCSFGGVSVITPGTNTSNQVAVLYQGVNCTEVPVAIHADQLTPTWRVYSTGSNVFQTRAGCLIGAEHVNNSYECDIPIGAGICASYQTQTNSPRRARSVASQSIIAYTMSLGAENSVAYSNNSIAIPTNFTISVTTEILPVSMTKTSVDCTMYICGDSTECSNLLLQYGSFCTQLNRALTGIAVEQDKNTQEVFAQVKQIYKTPPIKDFGGFNFSQILPDPSKPSKRSFIEDLLFNKVTLADAGFIKQYGDCLGDIAARDLICAQKFNGLTVLPPLLTDEMIAQYTSALLAGTITSGWWFGAGAALQIPFAMQMAYRFNGIGVTQNVLYENQKLIANQFNSAIGKIQDSLSSTASALGKLQDVVNQNAQALNTLVKQLSSNFGAISSVLNDILSRLDPPEAEVQIDRLITGRLQSLQTYVTQQLIRAAEIRWSANLAATKMSECVLGQSKRVDFCGKGYHLMSFPQSAPHGVVFLHVTYVPAQEKNFTTAPAICHDGKAHFPREGVFVSNGTHWFVTQRNFYEPQIITTDNTFVSGNCDVVIGIVNNTVYDPLQPELDSGGGGSDIDPYKEFGSSYQLLNFLPLDFFPDLNALVDTATALYEEELTGREHCSPHHTAIRQALVCWDELTKLIAWMSSNITSEQVRTIIVNHVNDTWGLKVRQSLWFHLSCLTFGQHTVQEFLVSFGVWIRTPAPYRPPNAPILSTLPEHTVIC

SEQ ID NO: 10855 - protein, 1300 aa, Artificial Sequence
  SARS-CoV-2/India/1-27/2020__EPI_ISL_413522 spike protein (1-1146)(K985P_V986P_T886W_A1019W) WhcAg construct
MFVFLVLLPLVSSQCVNLTTRTQLPPAYTNSFTRGVYYPDKVFRSSVLHSTQDLFLPFFSNVTWFHAIHVSGTNGTKRFDNPVLPFNDGVYFASTEKSNIIRGWIFGTTLDSKTQSLLIVNNATNVVIKVCEFQFCNDPFLGVYHKNNKSWMESEFRVYSSANNCTFEYVSQPFLMDLEGKQGNFKNLREFVFKNIDGYFKIYSKHTPINLVRDLPQGFSALEPLVDLPIGINITRFQTLLALHRSYLTPGDSSSGWTAGAAAYYVGYLQPRTFLLKYNENGTITDAVDCALDPLSETKCTLKSFTVEKGIYQTSNFRVQPTESIVRFPNITNLCPFGEVFNATRFASVYAWNRKRISNCVADYSVLYNSASFSTFKCYGVSPTKLNDLCFTNVYADSFVIRGDEVIQIAPGQTGKIADYNYKLPDDFTGCVIAWNSNNLDSKVGGNYNYLYRLFRKSNLKPFERDISTEIYQAGSTPCNGVEGFNCYFPLQSYGFQPTNGVGYQPYRVVVLSFELLHAPATVCGPKKSTNLVKNKCVNFNFNGLTGTGVLTESNKKFLPFQQFGRDIADTTDAVRDPQTLEILDITPCSFGGVSVITPGTNTSNQVAVLYQDVNCTEVPVAIHADQLTPTWRVYSTGSNVFQTRAGCLIGAEHVNNSYECDIPIGAGICASYQTQTNSPRRARSVASQSIIAYTMSLGAENSVAYSNNSIAIPTNFTISVTTEILPVSMTKTSVDCTMYICGDSTECSNLLLQYGSFCTQLNRALTGIAVEQDKNTQEVFAQVKQIYKTPPIKDFGGFNFSQILPDPSKPSKRSFIEDLLFNKVTLADAGFIKQYGDCLGDIAARDLICAQKFNGLTVLPPLLTDEMIAQYTSALLAGTITSGWWFGAGAALQIPFAMQMAYRFNGIGVTQNVLYENQKLIANQFNSAIGKIQDSLSSTASALGKLQDVVNQNAQALNTLVKQLSSNFGAISSVLNDILSRLDPPEAEVQIDRLITGRLQSLQTYVTQQLIRAAEIRWSANLAATKMSECVLGQSKRVDFCGKGYHLMSFPQSAPHGVVFLHVTYVPAQEKNFTTAPAICHDGKAHFPREGVFVSNGTHWFVTQRNFYEPQIITTDNTFVSGNCDVVIGIVNNTVYDPLQPELDSGGGGSDIDPYKEFGSSYQLLNFLPLDFFPDLNALVDTATALYEEELTGREHCSPHHTAIRQALVCWDELTKLIAWMSSNITSEQVRTIIVNHVNDTWGLKVRQSLWFHLSCLTFGQHTVQEFLVSFGVWIRTPAPYRPPNAPILSTLPEHTVIC

SEQ ID NO: 10856 - protein, 1295 aa, Artificial Sequence
  SARS-CoV-2/pangolin/Guangxi/P4L/2017__EPI_ISL_410538 spike protein (1-1141)(K980P_V981P_T881W_A1014W) WhcAg construct
MFVFLFVLPLVSSQCVNLTTRTGIPPGYTNSSTRGVYYPDKVFRSSILHLTQDLFLPFFSNVTWFNTINYQGGFKKFDNPVLPFNDGVYFASTEKSNIIRGWIFGTTLDARTQSLLIVNNATNVVIKVCEFQFCTDPFLGVYYHNNNKTWVENEFRVYSSANNCTFEYISQPFLMDLEGKQGNFKNLREFVFKNVDGYFKIYSKHTPIDLVRDLPRGFAALEPLVDLPIGINITRFQTLLALHRSYLTPGNLESGWTTGAAAYYVGYLQQRTFLLSYNQNGTITDAVDCSLDPLSETKCTLKSLTVEKGIYQTSNFRVQPTISIVRFPNITNLCPFGEVFNASKFASVYAWNRKRISNCVADYSVLYNSTSFSTFKCYGVSPTKLNDLCFTNVYADSFVVKGDEVRQIAPGQTGVIADYNYKLPDDFTGCVIAWNSVKQDALTGGNYGYLYRLFRKSKLKPFERDISTEIYQAGSTPCNGQVGLNCYYPLERYGFHPTTGVNYQPFRVVVLSFELLNGPATVCGPKLSTTLVKDKCVNFNFNGLTGTGVLTTSKKQFLPFQQFGRDISDTTDAVRDPQTLEILDITPCSFGGVSVITPGTNTSNQVAVLYQDVNCTEVPMAIHAEQLTPAWRVYSAGANVFQTRAGCLVGAEHVNNSYECDIPVGAGICASYHSMSSLRSVNQRSIIAYTMSLGAENSVAYSNNSIAIPTNFTISVTTEILPVSMTKTSVDCTMYICGDSIECSNLLLQYGSFCTQLNRALTGIAVEQDKNTQEVFAQVKQIYKTPPIKDFGGFNFSQILPDPSKPSKRSFIEDLLFNKVTLADAGFIKQYGDCLGDIAARDLICAQKFNGLTVLPPLLTDEMIAQYTSALLAGTITSGWWFGAGAALQIPFAMQMAYRFNGIGVTQNVLYENQKLIANQFNSAIGKIQDSLSSTASALGKLQDVVNQNAQALNTLVKQLSSNFGAISSVLNDILSRLDPPEAEVQIDRLITGRLQSLQTYVTQQLIRAAEIRWSANLAATKMSECVLGQSKRVDFCGKGYHLMSFPQSAPHGVVFLHVTYVPAQEKNFTTAPAICHEGKAHFPREGVFVSNGTHWFITQRNFYEPQIITTDNTFVSGSCDVVIGIVNNTVYDPLQPELDSGGGGSDIDPYKEFGSSYQLLNFLPLDFFPDLNALVDTATALYEEELTGREHCSPHHTAIRQALVCWDELTKLIAWMSSNITSEQVRTIIVNHVNDTWGLKVRQSLWFHLSCLTFGQHTVQEFLVSFGVWIRTPAPYRPPNAPILSTLPEHTVIC

SEQ ID NO: 10857 - protein, 1295 aa, Artificial Sequence
  SARS-CoV-2/pangolin/Guangxi/P5L/2017__EPI_ISL_410540 spike protein (1-1141)(K980P_V981P_T881W_A1014W) WhcAg construct
MFVFLFVLPLVSSQCVNLTTRTGIPPGYTNSSTRGVYYPDKVFRSSILHLTQDLFLPFFSNVTWFNTINYQGGFKKFDNPVLPFNDGVYFASTEKSNIIRGWIFGTTLDARTQSLLIVNNATNVVIKVCEFQFCTDPFLGVYYHNNNKTWVENEFRVYSSANNCTFEYISQPFLMDLEGKQGNFKNLREFVFKNVDGYFKIYSKHTPIDLVRDLPRGFAALEPLVDLPIGINITRFQTLLALHRSYLTPGKLESGWTTGAAAYYVGYLQQRTFLLSYNQNGTITDAVDCSLDPLSETKCTLKSLTVEKGIYQTSNFRVQPTISIVRFPNITNLCPFGEVFNASKFASVYAWNRKRISNCVADYSVLYNSTSFSTFKCYGVSPTKLNDLCFTNVYADSFVVKGDEVRQIAPGQTGVIADYNYKLPDDFTGCVIAWNSVKQDALTGGNYGYLYRLFRKSKLKPFERDISTEIYQAGSTPCNGQVGLNCYYPLERYGFHPTTGVNYQPFRVVVLSFELLNGPATVCGPKLSTTLVKDKCVNFNFNGLTGTGVLTTSKKQFLPFQQFGRDISDTTDAVRDPQTLEILDITPCSFGGVSVITPGTNTSNQVAVLYQDVNCTEVPMAIHAEQLTPAWRVYSAGANVFQTRAGCLVGAEHVNNSYECDIPVGAGICASYHSMSSFRSVNQRSIIAYTMSLGAENSVAYSNNSIAIPTNFTISVTTEILPVSMTKTSVDCTMYICGDSIECSNLLLQYGSFCTQLNRALTGIAVEQDKNTQEVFAQVKQIYKTPPIKDFGGFNFSQILPDPSKPSKRSFIEDLLFNKVTLADAGFIKQYGDCLGDIAARDLICAQKFNGLTVLPPLLTDEMIAQYTSALLAGTITSGWWFGAGAALQIPFAMQMAYRFNGIGVTQNVLYENQKLIANQFNSAIGKIQDSLSSTASALGKLQDVVNQNAQALNTLVKQLSSNFGAISSVLNDILSRLDPPEAEVQIDRLITGRLQSLQTYVTQQLIRAAEIRWSANLAATKMSECVLGQSKRVDFCGKGYHLMSFPQSAPHGVVFLHVTYVPAQEKNFTTAPAICHEGKAHFPREGVFVSNGTHWFITQRNFYEPQIITTDNTFVSGSCDVVIGIVNNTVYDPLQPELDSGGGGSDIDPYKEFGSSYQLLNFLPLDFFPDLNALVDTATALYEEELTGREHCSPHHTAIRQALVCWDELTKLIAWMSSNITSEQVRTIIVNHVNDTWGLKVRQSLWFHLSCLTFGQHTVQEFLVSFGVWIRTPAPYRPPNAPILSTLPEHTVIC

SEQ ID NO: 10858 - protein, 1295 aa, Artificial Sequence
  SARS-CoV-2/pangolin/Guangxi/P5E/2017__EPI_ISL_410541 spike protein (1-1141)(K980P_V981P_T881W_A1014W) WhcAg construct
MFVFLFVLPLVSSQCVNLTTRTGIPPGYTNSSTRGVYYPDKVFRSSILHLTQDLFLPFFSNVTWFNTITYQGGSKKFDNPVLPFNDGVYFASTEKSNIIRGWIFGTTLDARTQSLLIVNNATNVVIKVCEFQFCTDPFLGVYYHNNNKTWVENEFRVYSSANNCTFEYISQPFLMDLEGKQGNFKNLREFVFKNVDGYFKIYSKHTPIDLVRDLPRGFAALEPLVDLPIGINITRFQTLLALHRSYLTPGKLESGWTTGAAAYYVGYLQQRTFLLSYNQNGTITDAVDCSLDPLSETKCTLKSLTVEKGIYQTSNFRVQPTISIVRFPNITNLCPFGEVFNASKFASVYAWNRKRISNCVADYSVLYNSTSFSTFKCYGVSPTKLNDLCFTNVYADSFVVKGDEVRQIAPGQTGVIADYNYKLPDDFTGCVIAWNSVKQDALTGDNYGYLYRLFRKSKLKPFERDISTEIYQAGSTPCNGQVGLNCYYPLERYGFHPTTGVNYQPFRVVVLSFELLNGPATVCGPKLSTTLVKDKCVNFNFNGLTGTGVLTTSKKQFLPFQQFGRDISDTTDAVRDPQTLEILDITPCSFGGVSVITPGTNTSNQVAVLYQDVNCTEVPMAIHAEQLTPAWRVYSAGANVFQTRAGCLVGAEHVNNSYECDIPVGAGICASYHSMSSFRSVNQRSIIAYTMSLGAENSVAYSNNSIAIPTNFTISVTTEILPVSMTKTSVDCTMYICGDSIECSNLLLQYGSFCTQLNRALTGIAVEQDKNTQEVFAQVKQIYKTPPIKDFGGFNFSQILPDPSKPSKRSFIEDLLFNKVTLADAGFIKQYGDCLGDIAARDLICAQKFNGLTVLPPLLTDEMIAQYTSALLAGTITSGWWFGAGAALQIPFAMQMAYRFNGIGVTQNVLYENQKLIANQFNSAIGKIQDSLSSTASALGKLQDVVNQNAQALNTLVKQLSSNFGAISSVLNDILSRLDPPEAEVQIDRLITGRLQSLQTYVTQQLIRAAEIRWSANLAATKMSECVLGQSKRVDFCGKGYHLMSFPQSAPHGVVFLHVTYVPAQEKNFTTAPAICHEGKAHFPREGVFVSNGTHWFITQRNFYEPQIITTDNTFVSGSCDVVIGIVNNTVYDPLQPELDSGGGGSDIDPYKEFGSSYQLLNFLPLDFFPDLNALVDTATALYEEELTGREHCSPHHTAIRQALVCWDELTKLIAWMSSNITSEQVRTIIVNHVNDTWGLKVRQSLWFHLSCLTFGQHTVQEFLVSFGVWIRTPAPYRPPNAPILSTLPEHTVIC

SEQ ID NO: 10859 - protein, 1293 aa, Artificial Sequence
  SARS-CoV-2/pangolin/Guangxi/P1E/2017__EPI_ISL_410539 spike protein (1-1139)(K978P_V979P_T879W_A1012W) WhcAg construct
MFVFLFVLPLVSSQCVNLTTRTGIQPGYTNSSTRGVYYPDKVFRSSILHLTQDLFLPFFSNVTWFNTINYQGGFKKFDNPVLPFNDGVYFASTEKSNIIRGWIFGTTLDARTQSLLIVNNATNVVIKVCEFQFCTDPFLGVYYHNNNKTWVENEFRVYSSANNCTFEYISQPFLMDLEGKQGNFKNLREFVFKNVDGYFKIYSKHTPIDLVRDLPRGFAALEPLVDLPIGINITRFQTLLALHRSYLTPGKLESGWTTGAAAYYVGYLQQRTFLLSYNQNGTITDAVDCSLDPLSETKCTLKSLTVEKGIYQTSNFRVQPTISIVRFPNITNLCPFGEVFNASKFASVYAWNRKRISNCVADYSVLYNSTSFSTFKCYGVSPTKLNDLCFTNVYADSFVVKGDEVRQIAPGQTGVIADYNYKLPDDFTGCVIAWNSVKQDALTGGNYLYRLFRKSKLKPFERDISTEIYQAGSTPCNGQVGLNCYYPLERYGFHPTTGVNYQPFRVVVLSFELLNGPATVCGPKLSTTLVKDKCVNFNFNGLTGTGVLTTSKKQFLPFQQFGRDISDTTDAVRDPQTLEILDITPCSFGGVSVITPGTNTSNQVAVLYQDVNCTEVPMAIHAEQLTPAWRVYSAGANVFQTRAGCLVGAEHVNNSYECDIPVGAGICASYHSMSSLRSVNQRSIIAYTMSLGAENSVAYSNNSIAIPTNFTISVTTEILPVSMTKTSVDCTMYICGDSIECSNLLLQYGSFCTQLNRALTGIAVEQDKNTQEVFAQVKQIYKTPPIKDFGGFNFSQILPDPSKPSKRSFIEDLLFNKVTLADAGFIKQYGDCLGDIAARDLICAQKFNGLTVLPPLLTDEMIAQYTSALLAGTITSGWWFGAGAALQIPFAMQMAYRFNGIGVTQNVLYENQKLIANQFNSAIGKIQDSLSSTASALGKLQDVVNQNAQALNTLVKQLSSNFGAISSVLNDILSRLDPPEAEVQIDRLITGRLQSLQTYVTQQLIRAAEIRWSANLAATKMSECVLGQSKRVDFCGKGYHLMSFPQSAPHGVVFLHVTYVPAQEKNFTTAPAICHEGKAHFPREGVFVSNGTHWFITQRNFYEPQIITTDNTFVSGSCDVVIGIVNNTVYDPLQPELDSGGGGSDIDPYKEFGSSYQLLNFLPLDFFPDLNALVDTATALYEEELTGREHCSPHHTAIRQALVCWDELTKLIAWMSSNITSEQVRTIIVNHVNDTWGLKVRQSLWFHLSCLTFGQHTVQEFLVSFGVWIRTPAPYRPPNAPILSTLPEHTVIC

SEQ ID NO: 10860 - protein, 1301 aa, Artificial Sequence
  SARS-CoV-2/Wuhan/WIV05/2019__EPI_ISL_402128 spike protein (1-1147)(K986P_V987P_P1069F) WhcAg construct
MFVFLVLLPLVSSQCVNLTTRTQLPPAYTNSFTRGVYYPDKVFRSSVLHSTQDLFLPFFSNVTWFHAIHVSGTNGTKRFDNPVLPFNDGVYFASTEKSNIIRGWIFGTTLDSKTQSLLIVNNATNVVIKVCEFQFCNDPFLGVYYHKNNKSWMESEFRVYSSANNCTFEYVSQPFLMDLEGKQGNFKNLREFVFKNIDGYFKIYSKHTPINLVRDLPQGFSALEPLVDLPIGINITRFQTLLALHRSYLTPGDSSSGWTAGAAAYYVGYLQPRTFLLKYNENGTITDAVDCALDPLSETKCTLKSFTVEKGIYQTSNFRVQPTESIVRFPNITNLCPFGEVFNATRFASVYAWNRKRISNCVADYSVLYNSASFSTFKCYGVSPTKLNDLCFTNVYADSFVIRGDEVRQIAPGQTGKIADYNYKLPDDFTGCVIAWNSNNLDSKVGGNYNYLYRLFRKSNLKPFERDISTEIYQAGSTPCNGVEGFNCYFPLQSYGFQPTNGVGYQPYRVVVLSFELLHAPATVCGPKKSTNLVKNKCVNFNFNGLTGTGVLTESNKKFLPFQQFGRDIADTTDAVRDPQTLEILDITPCSFGGVSVITPGTNTSNQVAVLYQDVNCTEVPVAIHADQLTPTWRVYSTGSNVFQTRAGCLIGAEHVNNSYECDIPIGAGICASYQTQTNSPRRARSVASQSIIAYTMSLGAENSVAYSNNSIAIPTNFTISVTTEILPVSMTKTSVDCTMYICGDSTECSNLLLQYGSFCTQLNRALTGIAVEQDKNTQEVFAQVKQIYKTPPIKDFGGFNFSQILPDPSKPSKRSFIEDLLFNKVTLADAGFIKQYGDCLGDIAARDLICAQKFNGLTVLPPLLTDEMIAQYTSALLAGTITSGWTFGAGAALQIPFAMQMAYRFNGIGVTQNVLYENQKLIANQFNSAIGKIQDSLSSTASALGKLQDVVNQNAQALNTLVKQLSSNFGAISSVLNDILSRLDPPEAEVQIDRLITGRLQSLQTYVTQQLIRAAEIRASANLAATKMSECVLGQSKRVDFCGKGYHLMSFPQSAPHGVVFLHVTYVFAQEKNFTTAPAICHDGKAHFPREGVFVSNGTHWFVTQRNFYEPQIITTDNTFVSGNCDVVIGIVNNTVYDPLQPELDSGGGGSDIDPYKEFGSSYQLLNFLPLDFFPDLNALVDTATALYEEELTGREHCSPHHTAIRQALVCWDELTKLIAWMSSNITSEQVRTIIVNHVNDTWGLKVRQSLWFHLSCLTFGQHTVQEFLVSFGVWIRTPAPYRPPNAPILSTLPEHTVIC

SEQ ID NO: 10861 - protein, 1297 aa, Artificial Sequence
  SARS-CoV-2/bat/Yunnan/RaTG13/2013__EPI_ISL_402131 spike protein (1-1143)(K982P_V983P_P1065F) WhcAg construct
MFVFLVLLPLVSSQCVNLTTRTQLPPAYTNSSTRGVYYPDKVFRSSVLHLTQDLFLPFFSNVTWFHAIHVSGTNGIKRFDNPVLPFNDGVYFASTEKSNIIRGWIFGTTLDSKTQSLLIVNNATNVVIKVCEFQFCNDPFLGVYYHKNNKSWMESEFRVYSSANNCTFEYVSQPFLMDLEGKQGNFKNLREFVFKNIDGYFKIYSKHTPINLVRDLPPGFSALEPLVDLPIGINITRFQTLLALHRSYLTPGDSSSGWTAGAAAYYVGYLQPRTFLLKYNENGTITDAVDCALDPLSETKCTLKSFTVEKGIYQTSNFRVQPTDSIVRFPNITNLCPFGEVFNATTFASVYAWNRKRISNCVADYSVLYNSTSFSTFKCYGVSPTKLNDLCFTNVYADSFVITGDEVRQIAPGQTGKIADYNYKLPDDFTGCVIAWNSKHIDAKEGGNFNYLYRLFRKANLKPFERDISTEIYQAGSKPCNGQTGLNCYYPLYRYGFYPTDGVGHQPYRVVVLSFELLNAPATVCGPKKSTNLVKNKCVNFNFNGLTGTGVLTESNKKFLPFQQFGRDIADTTDAVRDPQTLEILDITPCSFGGVSVITPGTNASNQVAVLYQDVNCTEVPVAIHADQLTPTWRVYSTGSNVFQTRAGCLIGAEHVNNSYECDIPIGAGICASYQTQTNSRSVASQSIIAYTMSLGAENSVAYSNNSIAIPTNFTISVTTEILPVSMTKTSVDCTMYICGDSTECSNLLLQYGSFCTQLNRALTGIAVEQDKNTQEVFAQVKQIYKTPPIKDFGGFNFSQILPDPSKPSKRSFIEDLLFNKVTLADAGFIKQYGDCLGDIAARDLICAQKFNGLTVLPPLLTDEMIAQYTSALLAGTITSGWTFGAGAALQIPFAMQMAYRFNGIGVTQNVLYENQKLIANQFNSAIGKIQDSLSSTASALGKLQDVVNQNAQALNTLVKQLSSNFGAISSVLNDILSRLDPPEAEVQIDRLITGRLQSLQTYVTQQLIRAAEIRASANLAATKMSECVLGQSKRVDFCGKGYHLMSFPQSAPHGVVFLHVTYVFAQEKNFTTAPAICHDGKAHFPREGVFVSNGTHWFVTQRNFYEPQIITTDNTFVSGSCDVVIGIVNNTVYDPLQPELDSGGGGSDIDPYKEFGSSYQLLNFLPLDFFPDLNALVDTATALYEEELTGREHCSPHHTAIRQALVCWDELTKLIAWMSSNITSEQVRTIIVNHVNDTWGLKVRQSLWFHLSCLTFGQHTVQEFLVSFGVWIRTPAPYRPPNAPILSTLPEHTVIC

SEQ ID NO: 10862 - protein, 1301 aa, Artificial Sequence
  SARS-CoV-2/Wuhan/HBCDC-HB-01/2019__EPI_ISL_402132 spike protein (1-1147)(K986P_V987P_P1069F) WhcAg construct
MFVFLVLLPLVSSQCVNLTTRTQLPPAYTNSITRGVYYPDKVFRSSVLHSTQDLFLPFFSNVTWFHAIHVSGTNGTKRFDNPVLPFNDGVYFASTEKSNIIRGWIFGTTLDSKTQSLLIVNNATNVVIKVCEFQFCNDPFLGVYYHKNNKSWMESEFRVYSSANNCTFEYVSQPFLMDLEGKQGNFKNLREFVFKNIDGYFKIYSKHTPINLVRDLPQGFSALEPLVDLPIGINITRFQTLLALHRSYLTPGDSSSGWTAGAAAYYVGYLQPRTFLLKYNENGTITDAVDCALDPLSETKCTLKSFTVEKGIYQTSNFRVQPTESIVRFPNITNLCPFGEVFNATRFASVYAWNRKRISNCVADYSVLYNSASFSTFKCYGVSPTKLNDLCFTNVYADSFVIRGDEVRQIAPGQTGKIADYNYKLPDDFTGCVIAWNSNNLDSKVGGNYNYLYRLFRKSNLKPFERDISTEIYQAGSTPCNGVEGFNCYFPLQSYGFQPTNGVGYQPYRVVVLSFELLHAPATVCGPKKSTNLVKNKCVNFNFNGLTGTGVLTESNKKFLPFQQFGRDIADTTDAVRDPQTLEILDITPCSFGGVSVITPGTNTSNQVAVLYQDVNCTEVPVAIHADQLTPTWRVYSTGSNVFQTRAGCLIGAEHVNNSYECDIPIGAGICASYQTQTNSPRRARSVASQSIIAYTMSLGAENSVAYSNNSIAIPTNFTISVTTEILPVSMTKTSVDCTMYICGDSTECSNLLLQYGSFCTQLNRALTGIAVEQDKNTQEVFAQVKQIYKTPPIKDFGGFNFSQILPDPSKPSKRSFIEDLLFNKVTLADAGFIKQYGDCLGDIAARDLICAQKFNGLTVLPPLLTDEMIAQYTSALLAGTITSGWTFGAGAALQIPFAMQMAYRFNGIGVTQNVLYENQKLIANQFNSAIGKIQDSLSSTASALGKLQDVVNQNAQALNTLVKQLSSNFGAISSVLNDILSRLDPPEAEVQIDRLITGRLQSLQTYVTQQLIRAAEIRASANLAATKMSECVLGQSKRVDFCGKGYHLMSFPQSAPHGVVFLHVTYVFAQEKNFTTAPAICHDGKAHFPREGVFVSNGTHWFVTQRNFYEPQIITTDNTFVSGNCDVVIGIVNNTVYDPLQPELDSGGGGSDIDPYKEFGSSYQLLNFLPLDFFPDLNALVDTATALYEEELTGREHCSPHHTAIRQALVCWDELTKLIAWMSSNITSEQVRTIIVNHVNDTWGLKVRQSLWFHLSCLTFGQHTVQEFLVSFGVWIRTPAPYRPPNAPILSTLPEHTVIC

SEQ ID NO: 10863 - protein, 1301 aa, Artificial Sequence
  SARS-CoV-2/Guangdong/20SF028/2020__EPI_ISL_403936 spike protein (1-1147)(K986P_V987P_P1069F) WhcAg construct
MFVFLVLLPLVSSQCVNLTTRTQLPPAYTNSFTRGVYYPDKVFRSSVLYSTQDLFLPFFSNVTWFHAIHVSGTNGTKRFDNPVLPFNDGVYFASTEKSNIIRGWIFGTTLDSKTQSLLIVNNATNVVIKVCEFQFCNDPFLGVYYHKNNKSWMESEFRVYSSANNCTFEYVSQPFLMDLEGKQGNFKNLREFVFKNIDGYFKIYSKHTPINLVRDLPQGFSALEPLVDLPIGINITRFQTLLALHRSYLTPGDSSSGWTAGAAAYYVGYLQPRTFLLKYNENGTITDAVDCALDPLSETKCTLKSFTVEKGIYQTSNFRVQPTESIVRFPNITNLCPFGEVFNATRFASVYAWNRKRISNCVADYSVLYNSASFSTFKCYGVSPTKLNDLCFTNVYADSFVIRGDEVRQIAPGQTGKIADYNYKLPDDFTGCVIAWNSNNLDSKVGGNYNYLYRLFRKSNLKPFERDISTEIYQAGSTPCNGVEGFNCYFPLQSYGFQPTNGVGYQPYRVVVLSFELLHAPATVCGPKKSTNLVKNKCVNFNFNGLTGTGVLTESNKKFLPFQQFGRDIADTTDAVRDPQTLEILDITPCSFGGVSVITPGTNTSNQVAVLYQDVNCTEVPVAIHADQLTPTWRVYSTGSNVFQTRAGCLIGAEHVNNSYECDIPIGAGICASYQTQTNSPRRARSVASQSIIAYTMSLGAENSVAYSNNSIAIPTNFTISVTTEILPVSMTKTSVDCTMYICGDSTECSNLLLQYGSFCTQLNRALTGIAVEQDKNTQEVFAQVKQIYKTPPIKDFGGFNFSQILPDPSKPSKRSFIEDLLFNKVTLADAGFIKQYGDCLGDIAARDLICAQKFNGLTVLPPLLTDEMIAQYTSALLAGTITSGWTFGAGAALQIPFAMQMAYRFNGIGVTQNVLYENQKLIANQFNSAIGKIQDSLSSTASALGKLQDVVNQNAQALNTLVKQLSSNFGAISSVLNDILSRLDPPEAEVQIDRLITGRLQSLQTYVTQQLIRAAEIRASANLAATKMSECVLGQSKRVDFCGKGYHLMSFPQSAPHGVVFLHVTYVFAQEKNFTTAPAICHDGKAHFPREGVFVSNGTHWFVTQRNFYEPQIITTDNTFVSGNCDVVIGIVNNTVYDPLQPELDSGGGGSDIDPYKEFGSSYQLLNFLPLDFFPDLNALVDTATALYEEELTGREHCSPHHTAIRQALVCWDELTKLIAWMSSNITSEQVRTIIVNHVNDTWGLKVRQSLWFHLSCLTFGQHTVQEFLVSFGVWIRTPAPYRPPNAPILSTLPEHTVIC

SEQ ID NO: 10864 - protein, 1301 aa, Artificial Sequence
  SARS-CoV-2/Shenzhen/SZTH-001/2020__EPI_ISL_406592 spike protein (1-1147)(K986P_V987P_P1069F) WhcAg construct
MFVFLVLLPLVSSQCVNLTTRTQLPPAYTNSFTRGVYYPDKVFRSSVLHSTQDLFLPFFSNVTWFHAIHVSGTNGTKRFDNPVLPFNDGVYFASTEKSNIIRGWIFGTTLDSKTQSLLIVNNATNVVIKVCEFQFCNDPFLGVYYHKNNKSWMESEFRVYSSANNCTFEYVSQPFLMDLEGKQGNFKNLREFVFKNIDGYFKIYSKHTPINLVRDLPQGFSALEPLVDLPIGINITRFQTLLALHRSYLTPGDSSSGWTAGAAAYYVGYLQPRTFLLKYNENGTITDAVDCALDPLSETKCTLKSFTVEKGIYQTSNFRVQPTESIVRFPNITNLCPFGEVFNATRFASVYAWNRKRISNCVADYSVLYNSASFSTFKCYGVSPTKLNDLCFTNVYADSFVIRGDEVRQIAPGQTGKIADYNYKLPDDFTGCVIAWNSNNLDSKVGGNYNYLYRLFRKSNLKPFERDISTEIYQAGSTPCNGVEGFNCYFPLQSYGFQPTNGVGYQPYRVVVLSFELLHAPATVCGPKKSTNLVKNKCVNFNFNGLTGTGVLTESNKKFLPFQQFGRDIADTTDAVRDPQTLEILDITPCSFGGVSVITPGTNTSNQVAVLYQDVNCTEVPVAIHADQLTPTWRVYSTGSNVFQTRAGCLIGAEHVNNSYECDIPIGAGICASYQTQTNSPRRARSVASQSIIAYTMSLGAENSVAYSNNSIAIPTNFTISVTTEILPVSMTKTSVDCTMYICGDSTECSNLLLQYGSFCTQLNRALTGIAVEQDKNTQEVFAQVKQIYKTPPIKDFGGFNFSQILPDPSKPSKRSFIEDLLFNKVTLADAGFIKQYGDCLGDIAARDLICAQKFNGLTVLPPLLTDEMIAQYTSALLAGTITSGWTFGAGAALQIPFAMQMAYRFNGIGVTQNVLYENQKLIANQFNSAIGKIQDSLSSTASALGKLQDVVNQNAQALNTLVKQLSSNFGAISSVLNDILSRLDPPEAEVQIDRLITGRLQSLQTYVTQQLIRAAEIRASANLAATKMSECVLGQSKRVDFCGKGYHLMSFPQSAPHGVVFLHVTYVFAQEKNFTTAPAICHDGKAHFPREGVFVSNGTHWFVTQRNFYEPQIITTDNTFVSGNCDVLIGIVNNTVYDPLQPELDSGGGGSDIDPYKEFGSSYQLLNFLPLDFFPDLNALVDTATALYEEELTGREHCSPHHTAIRQALVCWDELTKLIAWMSSNITSEQVRTIIVNHVNDTWGLKVRQSLWFHLSCLTFGQHTVQEFLVSFGVWIRTPAPYRPPNAPILSTLPEHTVIC

SEQ ID NO: 10865 - protein, 1301 aa, Artificial Sequence
  SARS-CoV-2/Shenzhen/SZTH-004/2020__EPI_ISL_406595 spike protein (1-1147)(K986P_V987P_P1069F) WhcAg construct
MFVFLVLLPLVSSQCVNLTTRTQLPPAYTNSFTRGVYYPDKVFRSSVLHSTQDLFLPFFSNVTWFHAIHVSGTNGTKRFDNPVLPFNDGVYFASTEKSNIIRGWIFGTTLDSKTQSLLIVNNATNVVIKVCEFQFCNDPFLGVYYHKNNKSWMESEFRVYSSANNCTFEYVSQPFLMDLEGKQGNFKNLREFVFKNIDGYFKIYSKHTPINLVRDLPQGFSALEPLVDLPIGINITRFQTLLALHRSYLTPGDSSSGWTAGAAAYYVGYLQPRTFLLKYNENGTITDAVDCALDPLSETKCTLKSFTVEKGIYQTSNFRVQPTESIVRFPNITNLCPFGEVFNATRFASVYAWDRKRISNCVAYYSVLYNSASFSTFKCYGVSPTKLNDLCFTNVYADSFVIRGDEVRQIAPGQTGKIADYNYKLPDDFTGCVIAWNSNNLDSKVGGNYNYLYRLFRKSNLKPFERDISTEIYQAGSTPCNGVEGFNCYFPLQSYGFQPTNGVGYQPYRVVVLSFELLHAPATVCGPKKSTNLVKNKCVNFNFNGLTGTGVLTESNKKFLPFQQFGRDIADTTDAVRDPQTLEILDITPCSFGGVSVITPGTNTSNQVAVLYQDVNCTEVPVAIHADQLTPTWRVYSTGSNVFQTRAGCLIGAEHVNNSYECDIPIGAGICASYQTQTNSPRRARSVASQSIIAYTMSLGAENSVAYSNNSIAIPTNFTISVTTEILPVSMTKTSVDCTMYICGDSTECSNLLLQYGSFCTQLNRALTGIAVEQDKNTQEVFAQVKQIYKTPPIKDFGGFNFSQILPDPSKPSKRSFIEDLLFNKVTLADAGFIKQYGDCLGDIAARDLICAQKFNGLTVLPPLLTDEMIAQYTSALLAGTITSGWTFGAGAALQIPFAMQMAYRFNGIGVTQNVLYENQKLIANQFNSAIGKIQDSLSSTASALGKLQDVVNQNAQALNTLVKQLSSNFGAISSVLNDILSRLDPPEAEVQIDRLITGRLQSLQTYVTQQLIRAAEIRASANLAATKMSECVLGQSKRVDFCGKGYHLMSFPQSAPHGVVFLHVTYVFAQEKNFTTAPAICHDGKAHFPREGVFVSNGTHWFVTQRNFYEPQIITTDNTFVSGNCDVVIGIVNNTVYDPLQPELDSGGGGSDIDPYKEFGSSYQLLNFLPLDFFPDLNALVDTATALYEEELTGREHCSPHHTAIRQALVCWDELTKLIAWMSSNITSEQVRTIIVNHVNDTWGLKVRQSLWFHLSCLTFGQHTVQEFLVSFGVWIRTPAPYRPPNAPILSTLPEHTVIC

SEQ ID NO: 10866 - protein, 1301 aa, Artificial Sequence
  SARS-CoV-2/France/IDF0372/2020__EPI_ISL_406596 spike protein (1-1147)(K986P_V987P_P1069F) WhcAg construct
MFVFLVLLPLVSSQCVNLTTRTQLPPAYTNSFTRGVYYPDKVFRSSVLHSTQDLFLPFFSNVTWFHAIHVSGTNGTKRFDNPVLPFNDGVYFASTEKSNIIRGWIFGTTLDSKTQSLLIVNNATNVVIKVCEFQFCNDPFLGVYYHKNNKSWMESEFRVYSSANNCTFEYVSQPFLMDLEGKQGNFKNLREFVFKNIDGYFKIYSKHTPINLVRDLPQGFSALEPLVDLPIGINITRFQTLLALHRSYLTPGDSSSGWTAGAAAYYVGYLQPRTFLLKYNENGTITDAVDCALDPLSETKCTLKSFTVEKGIYQTSNFRVQPTESIVRFPNITNLCPFGEVFNATRFASVYAWNRKRISNCVADYSFLYNSASFSTFKCYGVSPTKLNDLCFTNVYADSFVIRGDEVRQIAPGQTGKIADYNYKLPDDFTGCVIAWNSNNLDSKVGGNYNYLYRLFRKSNLKPFERDISTEIYQAGSTPCNGVEGFNCYFPLQSYGFQPTNGVGYQPYRVVVLSFELLHAPATVCGPKKSTNLVKNKCVNFNFNGLTGTGVLTESNKKFLPFQQFGRDIADTTDAVRDPQTLEILDITPCSFGGVSVITPGTNTSNQVAVLYQDVNCTEVPVAIHADQLTPTWRVYSTGSNVFQTRAGCLIGAEHVNNSYECDIPIGAGICASYQTQTNSPRRARSVASQSIIAYTMSLGAENSVAYSNNSIAIPTNFTISVTTEILPVSMTKTSVDCTMYICGDSTECSNLLLQYGSFCTQLNRALTGIAVEQDKNTQEVFAQVKQIYKTPPIKDFGGFNFSQILPDPSKPSKRSFIEDLLFNKVTLADAGFIKQYGDCLGDIAARDLICAQKFNGLTVLPPLLTDEMIAQYTSALLAGTITSGWTFGAGAALQIPFAMQMAYRFNGIGVTQNVLYENQKLIANQFNSAIGKIQDSLSSTASALGKLQDVVNQNAQALNTLVKQLSSNFGAISSVLNDILSRLDPPEAEVQIDRLITGRLQSLQTYVTQQLIRAAEIRASANLAATKMSECVLGQSKRVDFCGKGYHLMSFPQSAPHGVVFLHVTYVFAQEKNFTTAPAICHDGKAHFPREGVFVSNGTHWFVTQRNFYEPQIITTDNTFVSGNCDVVIGIVNNTVYDPLQPELDSGGGGSDIDPYKEFGSSYQLLNFLPLDFFPDLNALVDTATALYEEELTGREHCSPHHTAIRQALVCWDELTKLIAWMSSNITSEQVRTIIVNHVNDTWGLKVRQSLWFHLSCLTFGQHTVQEFLVSFGVWIRTPAPYRPPNAPILSTLPEHTVIC

SEQ ID NO: 10867 - protein, 1301 aa, Artificial Sequence
  SARS-CoV-2/Australia/VIC01/2020__EPI_ISL_406844 spike protein (1-1147)(K986P_V987P_P1069F) WhcAg construct
MFVFLVLLPLVSSQCVNLTTRTQLPPAYTNSFTRGVYYPDKVFRSSVLHSTQDLFLPFFSNVTWFHAIHVSGTNGTKRFDNPVLPFNDGVYFASTEKSNIIRGWIFGTTLDSKTQSLLIVNNATNVVIKVCEFQFCNDPFLGVYYHKNNKSWMESEFRVYSSANNCTFEYVSQPFLMDLEGKQGNFKNLREFVFKNIDGYFKIYSKHTPINLVRDLPQGFSALEPLVDLPIGINITRFQTLLALHRRYLTPGDSSSGWTAGAAAYYVGYLQPRTFLLKYNENGTITDAVDCALDPLSETKCTLKSFTVEKGIYQTSNFRVQPTESIVRFPNITNLCPFGEVFNATRFASVYAWNRKRISNCVADYSVLYNSASFSTFKCYGVSPTKLNDLCFTNVYADSFVIRGDEVRQIAPGQTGKIADYNYKLPDDFTGCVIAWNSNNLDSKVGGNYNYLYRLFRKSNLKPFERDISTEIYQAGSTPCNGVEGFNCYFPLQSYGFQPTNGVGYQPYRVVVLSFELLHAPATVCGPKKSTNLVKNKCVNFNFNGLTGTGVLTESNKKFLPFQQFGRDIADTTDAVRDPQTLEILDITPCSFGGVSVITPGTNTSNQVAVLYQDVNCTEVPVAIHADQLTPTWRVYSTGSNVFQTRAGCLIGAEHVNNSYECDIPIGAGICASYQTQTNSPRRARSVASQSIIAYTMSLGAENSVAYSNNSIAIPTNFTISVTTEILPVSMTKTSVDCTMYICGDSTECSNLLLQYGSFCTQLNRALTGIAVEQDKNTQEVFAQVKQIYKTPPIKDFGGFNFSQILPDPSKPSKRSFIEDLLFNKVTLADAGFIKQYGDCLGDIAARDLICAQKFNGLTVLPPLLTDEMIAQYTSALLAGTITSGWTFGAGAALQIPFAMQMAYRFNGIGVTQNVLYENQKLIANQFNSAIGKIQDSLSSTASALGKLQDVVNQNAQALNTLVKQLSSNFGAISSVLNDILSRLDPPEAEVQIDRLITGRLQSLQTYVTQQLIRAAEIRASANLAATKMSECVLGQSKRVDFCGKGYHLMSFPQSAPHGVVFLHVTYVFAQEKNFTTAPAICHDGKAHFPREGVFVSNGTHWFVTQRNFYEPQIITTDNTFVSGNCDVVIGIVNNTVYDPLQPELDSGGGGSDIDPYKEFGSSYQLLNFLPLDFFPDLNALVDTATALYEEELTGREHCSPHHTAIRQALVCWDELTKLIAWMSSNITSEQVRTIIVNHVNDTWGLKVRQSLWFHLSCLTFGQHTVQEFLVSFGVWIRTPAPYRPPNAPILSTLPEHTVIC

SEQ ID NO: 10868 - protein, 1301 aa, Artificial Sequence
  SARS-CoV-2/Germany/BavPat1/2020__EPI_ISL_406862 spike protein (1-1147)(K986P_V987P_P1069F) WhcAg construct
MFVFLVLLPLVSSQCVNLTTRTQLPPAYTNSFTRGVYYPDKVFRSSVLHSTQDLFLPFFSNVTWFHAIHVSGTNGTKRFDNPVLPFNDGVYFASTEKSNIIRGWIFGTTLDSKTQSLLIVNNATNVVIKVCEFQFCNDPFLGVYYHKNNKSWMESEFRVYSSANNCTFEYVSQPFLMDLEGKQGNFKNLREFVFKNIDGYFKIYSKHTPINLVRDLPQGFSALEPLVDLPIGINITRFQTLLALHRSYLTPGDSSSGWTAGAAAYYVGYLQPRTFLLKYNENGTITDAVDCALDPLSETKCTLKSFTVEKGIYQTSNFRVQPTESIVRFPNITNLCPFGEVFNATRFASVYAWNRKRISNCVADYSVLYNSASFSTFKCYGVSPTKLNDLCFTNVYADSFVIRGDEVRQIAPGQTGKIADYNYKLPDDFTGCVIAWNSNNLDSKVGGNYNYLYRLFRKSNLKPFERDISTEIYQAGSTPCNGVEGFNCYFPLQSYGFQPTNGVGYQPYRVVVLSFELLHAPATVCGPKKSTNLVKNKCVNFNFNGLTGTGVLTESNKKFLPFQQFGRDIADTTDAVRDPQTLEILDITPCSFGGVSVITPGTNTSNQVAVLYQGVNCTEVPVAIHADQLTPTWRVYSTGSNVFQTRAGCLIGAEHVNNSYECDIPIGAGICASYQTQTNSPRRARSVASQSIIAYTMSLGAENSVAYSNNSIAIPTNFTISVTTEILPVSMTKTSVDCTMYICGDSTECSNLLLQYGSFCTQLNRALTGIAVEQDKNTQEVFAQVKQIYKTPPIKDFGGFNFSQILPDPSKPSKRSFIEDLLFNKVTLADAGFIKQYGDCLGDIAARDLICAQKFNGLTVLPPLLTDEMIAQYTSALLAGTITSGWTFGAGAALQIPFAMQMAYRFNGIGVTQNVLYENQKLIANQFNSAIGKIQDSLSSTASALGKLQDVVNQNAQALNTLVKQLSSNFGAISSVLNDILSRLDPPEAEVQIDRLITGRLQSLQTYVTQQLIRAAEIRASANLAATKMSECVLGQSKRVDFCGKGYHLMSFPQSAPHGVVFLHVTYVFAQEKNFTTAPAICHDGKAHFPREGVFVSNGTHWFVTQRNFYEPQIITTDNTFVSGNCDVVIGIVNNTVYDPLQPELDSGGGGSDIDPYKEFGSSYQLLNFLPLDFFPDLNALVDTATALYEEELTGREHCSPHHTAIRQALVCWDELTKLIAWMSSNITSEQVRTIIVNHVNDTWGLKVRQSLWFHLSCLTFGQHTVQEFLVSFGVWIRTPAPYRPPNAPILSTLPEHTVIC

SEQ ID NO: 10869 - protein, 1301 aa, Artificial Sequence
  SARS-CoV-2/Wuhan/HBCDC-HB-02/2020__EPI_ISL_412978 spike protein (1-1147)(K986P_V987P_P1069F) WhcAg construct
MFVFLVLLPLVSSQCVNLTTRTQLPPAYTNSFTRGVYYPDKVFRSSVLHSTQDLFLPFFSNVTWFHAIHVSGTNGTKRFDNPVLPFNDGVYFASTEKSNIIRGWIFGTTLDSKTQSLLIVNNATNVVIKVCEFQFCNDPFLGVYYHKNNKSWMESEFRVYSSANNCTFEYVSQPFLMDLEGKQGNFKNLREFVFKNIDGYFKIYSKHTPINLVRDLPQGFSALEPLVDLPIGINITRFQTLLALHRSYLTPGDSSSGWTAGAAAYYVGYLQPRTFLLKYNENGTITDAVDCALDPLSETKCTLKSFTVEKGIYQTSNFRVQPTESIVRFPNITNLCPFGEVFNATRFASVYAWNRKRISNCVADYSVLYNSASFSTFKCYGVSPTKLNDLCFTNVYADSFVIRGDEVRQIAPGQTGKIADYNYKLPDDFTGCVIAWNSNNLDSKVGGNYNYLYRLFRKSNLKPFERDISTEIYQAGSTPCNGVEGFNCYFPLQSYGFQPTNGVGYQPYRVVVLSFELLHAPATVCGPKKSTNLVKNKCVNFNFNGLTGTGVLTESNKKFLPFQQFGRDIADTTDAVRDPQTLEILDITPCSFGGVSVITPGTNTSNQVAVLYQDVNCTEVPVAIHADQLTPTWRVYSTGSNVFQTRAGCLIGAEHVNNSYECDIPIGAGICASYQTQTNSPRRARSVASQSIIAYTMSLGAENSVAYSNNSIAIPTNFTISVTTEILPVSMTKTSVDCTMYICGDSTECSNFLLQYGSFCTQLNRALTGIAVEQDKNTQEVFAQVKQIYKTPPIKDFGGFNFSQILPDPSKPSKRSFIEDLLFNKVTLADAGFIKQYGDCLGDIAARDLICAQKFNGLTVLPPLLTDEMIAQYTSALLAGTITSGWTFGAGAALQIPFAMQMAYRFNGIGVTQNVLYENQKLIANQFNSAIGKIQDSLSSTASALGKLQDVVNQNAQALNTLVKQLSSNFGAISSVLNDILSRLDPPEAEVQIDRLITGRLQSLQTYVTQQLIRAAEIRASANLAATKMSECVLGQSKRVDFCGKGYHLMSFPQSAPHGVVFLHVTYVFAQEKNFTTAPAICHDGKAHFPREGVFVSNGTHWFVTQRNFYEPQIITTDNTFVSGNCDVVIGIVNNTVYDPLQPELDSGGGGSDIDPYKEFGSSYQLLNFLPLDFFPDLNALVDTATALYEEELTGREHCSPHHTAIRQALVCWDELTKLIAWMSSNITSEQVRTIIVNHVNDTWGLKVRQSLWFHLSCLTFGQHTVQEFLVSFGVWIRTPAPYRPPNAPILSTLPEHTVIC

SEQ ID NO: 10870 - protein, 1301 aa, Artificial Sequence
  SARS-CoV-2/Australia/QLD02/2020__EPI_ISL_407896 spike protein (1-1147)(K986P_V987P_P1069F) WhcAg construct
MFVFLVLLPLVSSQCVNLTTRTQLPPAYTNSFTRGVYYPDKVFRSSVLHSTQDLFLPFFSNVTWFHAIHVSGTNGTKRFDNPVLPFNDGVYFASTEKSNIIRGWIFGTTLDSKTQSLLIVNNATNVVIKVCEFQFCNDPFLGVYYHKNNKSWMESEFRVYSSANNCTFEYVSQPFLMDLEGKQGNFKNLREFVFKNIDGYFKIYSKHTPINLVRDLPQGFSALEPLVDLPIGINITRFQTLLALHRSYLTPGDSSSGWTAGAAAYYVGYLQPRTFLLKYNENGTITDAVDCALDPLSETKCTLKSFTVEKGIYQTSNFRVQPTESIVRFPNITNLCPFGEVFNATRFASVYAWNRKRISNCVADYSVLYNSASFSTFKCYGVSPTKLNDLCFTNVYADSFVIRGDEVRQIAPGQTGKIADYNYKLPDDFTGCVIAWNSNNLDSKVGGNYNYLYRLFRKSNLKPFERDISTEIYQAGSTPCNGVEGFNCYFPLQSYGFQPTNGVGYQPYRVVVLSFELLHAPATVCGPKKSTNLVKNKCVNFNFNGLTGTGVLTESNKKFLPFQQFGRDIADTTDAVRDPQTLEILDITPCSFGGVSVITPGTNTSNQVAVLYQDVNCTEVPVAIHADQLTPTWRVYSTGSNVFQTRAGCLIGAEHVNNSYECDIPIGAGICASYQTQTNSPRRARSVASQSIIAYTMSLGAENSVAYSNNSIAIPTNFTISVTTEILPVSMTKTSVDCTMYICGDSTECSNLLLQYGSFCTQLNRALTGIAVEQDKNTQEVFAQVKQIYKTPPIKDFGGFNFSQILPDPSKPSKRSFIEDLLFNKVTLADAGFIKQYGDCLGDIAARDLICAQKFNGLTVLPPLLTDEMIAQYTSALLAGTITSGWTFGAGAALQIPFAMQMAYRFNGIGVTQNVLYENQKLIANQFNSAIGKIQDSLSSTASALGKLQDVVNQNAQALNTLVKQLSSNFGAISSVLNDILSRLDPPEAEVQIDRLITGRLQSLQTYVTQQLIRAAEIRASANLAATKMSECVLGQSKRVDFCGKGYHLMSFPQSAPHGVVFLHVTYVFAQEKNFTTAPAICHDGKAHFPREGVFVSNGTHWFVTQRNFYEPQIITTDNTFVSGNCDVVIGIVNNTVYDPLQLELDSGGGGSDIDPYKEFGSSYQLLNFLPLDFFPDLNALVDTATALYEEELTGREHCSPHHTAIRQALVCWDELTKLIAWMSSNITSEQVRTIIVNHVNDTWGLKVRQSLWFHLSCLTFGQHTVQEFLVSFGVWIRTPAPYRPPNAPILSTLPEHTVIC

SEQ ID NO: 10871 - protein, 1301 aa, Artificial Sequence
  SARS-CoV-2/India/1-31/2020__EPI_ISL_413523 spike protein (1-1147)(K986P_V987P_P1069F) WhcAg construct
MFVFLVLLPLVSSQCVNLTTRTQLPPAYTNSFTRGVYYPDKVFRSSVLHSTQDLFLPFFSNVTWFHAIHVSGTNGTKRFDNPVLPFNDGVYFASTEKSNIIRGWIFGTTLDSKTQSLLIVNNATNVVIKVCEFQFCNDPFLGVYYHKNNKSWMESEFRVYSSANNCTFEYVSQPFLMDLEGKQGNFKNLREFVFKNIDGYFKIYSKHTPINLVRDLPQGFSALEPLVDLPIGINITRFQTLLALHRSYLTPGDSSSGWTAGAAAYYVGYLQPRTFLLKYNENGTITDAVDCALDPLSETKCTLKSFTVEKGIYQTSNFRVQPTESIVRFPNITNLCPFGEVFNATRFASVYAWNRKRISNCVADYSVLYNSASFSTFKCYGVSPTKLNDLCFTNVYADSFVIRGDEVRQIAPGQTGKIADYNYKLPDDFTGCVIAWNSNNLDSKVGGNYNYLYRLFRKSNLKPFERDISTEIYQAGSTPCNGVEGFNCYFPLQSYGFQPTNGVGYQPYRVVVLSFELLHAPATVCGPKKSTNLVKNKCVNFNFNGLTGTGVLTESNKKFLPFQQFGRDIADTTDAVRDPQTLEILDITPCSFGGVSVITPGTNTSNQVAVLYQDVNCTEVPVAIHADQLTPTWRVYSTGSNVFQTRAGCLIGAEHVNNSYECDIPIGAGICASYQTQTNSPRRARSVASQSIIAYTMSLGAENSVAYSNNSIAIPTNFTISVTTEILPVSMTKTSVDCTMYICGDSTECSNLLLQYGSFCTQLNRALTGIAVEQDKNTQEVFAQVKQIYKTPPIKDFGGFNFSQILPDPSKPSKRSFIEDLLFNKVTLADAGFIKQYGDCLGDIAARDLICAQKFNGLTVLPPLLTDEMIAQYTSALLAGTITSGWTFGAGAALQIPFAMQMAYRFNGIGVTQNVLYENQKLIANQFNSVIGKIQDSLSSTASALGKLQDVVNQNAQALNTLVKQLSSNFGAISSVLNDILSRLDPPEAEVQIDRLITGRLQSLQTYVTQQLIRAAEIRASANLAATKMSECVLGQSKRVDFCGKGYHLMSFPQSAPHGVVFLHVTYVFAQEKNFTTAPAICHDGKAHFPREGVFVSNGTHWFVTQRNFYEPQIITTDNTFVSGNCDVVIGIVNNTVYDPLQPELDSGGGGSDIDPYKEFGSSYQLLNFLPLDFFPDLNALVDTATALYEEELTGREHCSPHHTAIRQALVCWDELTKLIAWMSSNITSEQVRTIIVNHVNDTWGLKVRQSLWFHLSCLTFGQHTVQEFLVSFGVWIRTPAPYRPPNAPILSTLPEHTVIC

SEQ ID NO: 10872 - protein, 1301 aa, Artificial Sequence
  SARS-CoV-2/Guangdong/GD2020087-P0008/2020__EPI_ISL_413863 spike protein (1-1147)(K986P_V987P_P1069F) WhcAg construct
MFVFLVLLPLVSSQCVNLTTRTQLPPAYTNSFTRGVYYPDKVFRSSVLHSTQDLFLPFFSNVTWFHAIHVSGTNGTKRFDNPVLPFNDGVYFASTEKSNIIRGWIFGTTLDSKTQSLLIVNNATNVVIKVCEFQFCNDPFLGVYYHKNNKSWMESEFRVYSSANNCTFEYVSQPFLMDLEGKQGNFKNLREFVFKNIDGYFKIYSKHTPINLVRDLPQGFSALEPLVDLPIGINITRFQTLLALHRSYLTPGDSSSGWTAGAAAYYVGYLQPRTFLLKYNENGTITDAVDCALDPLSETKCTLKSFTVEKGIYQTSNFRVQPTESIVRFPNITNLCPFGEVFNATRFASVYAWNRKRISNCVADYSVLYNSASFSTFKCYGVSPTKLNDLCFTNVYADSFVIRGDEVREIAPGQTGKIADYNYKLPDDFTGCVIAWNSNNLDSKVGGNYNYLYRLFRKSNLKPFERDISTEIYQAGSTPCNGVEGFNCYFPLQSYGFQPTNGVGYQPYRVVVLSFELLHAPATVCGPKKSTNLVKNKCVNFNFNGLTGTGVLTESNKKFLPFQQFGRDIADTTDAVRDPQTLEILDITPCSFGGVSVITPGTNTSNQVAVLYQDVNCTEVPVAIHADQLTPTWRVYSTGSNVFQTRAGCLIGAEHVNNSYECDIPIGAGICASYQTQTNSPRRARSVASQSIIAYTMSLGAENSVAYSNNSIAIPTNFTISVTTEILPVSMTKTSVDCTMYICGDSTECSNLLLQYGSFCTQLNRALTGIAVEQDKNTQEVFAQVKQIYKTPPIKDFGGFNFSQILPDPSKPSKRSFIEDLLFNKVTLADAGFIKQYGDCLGDIAARDLICAQKFNGLTVLPPLLTDEMIAQYTSALLAGTITSGWTFGAGAALQIPFAMQMAYRFNGIGVTQNVLYENQKLIANQFNSAIGKIQDSLSSTASALGKLQDVVNQNAQALNTLVKQLSSNFGAISSVLNDILSRLDPPEAEVQIDRLITGRLQSLQTYVTQQLIRAAEIRASANLAATKMSECVLGQSKRVDFCGKGYHLMSFPQSAPHGVVFLHVTYVFAQEKNFTTAPAICHDGKAHFPREGVFVSNGTHWFVTQRNFYEPQIITTDNTFVSGNCDVVIGIVNNTVYDPLQPELDSGGGGSDIDPYKEFGSSYQLLNFLPLDFFPDLNALVDTATALYEEELTGREHCSPHHTAIRQALVCWDELTKLIAWMSSNITSEQVRTIIVNHVNDTWGLKVRQSLWFHLSCLTFGQHTVQEFLVSFGVWIRTPAPYRPPNAPILSTLPEHTVIC

SEQ ID NO: 10873 - protein, 1301 aa, Artificial Sequence
  SARS-CoV-2/Sweden/01/2020__EPI_ISL_411951 spike protein (1-1147)(K986P_V987P_P1069F) WhcAg construct
MFVFLVLLPLVSSQCVNLTTRTQLPPAYTNSFTRGVYYPDKVFRSSVLHSTQDLFLPFFSNVTWFHAIHVSGTNGTKRFDNPVLPFNDGVYFASTEKSNIIRGWIFGTTLDSKTQSLLIVNNATNVVIKVCEFQFCNDPFLGVYYHKNNKSWMESEFRVYSSANNCTFEYVSQPFLMDLEGKQGNFKNLREFVFKNIDGYFKIYSKHTPINLVRDLPQGFSALEPLVDLPIGINITRFQTLLALHRSYLTPGDSSSGWTAGAAAYYVGYLQPRTFLLKYNENGTITDAVDCALDPLSETKCTLKSFTVEKGIYQTSNFRVQPTESIVRFPNITNLCPFGEVFNATRFASVYAWNRKRISNCVADYSVLYNSASFSTFKCYGVSPTKLNDLCFTNVYADSFVIRGDEVRQIAPGQTGKIADYNYKLPDDFTGCVIAWNSNNLDSKVGGNYNYLYRLFRKSNLKPFERDISTEIYQAGSTPCNGVEGFNCYFPLQSYGFQPTNGVGYQPYRVVVLSFELLHAPATVCGPKKSTNLVKNKCVNFNFNGLTGTGVLTESNKKFLPFQQFGRDIADTTDAVRDPQTLEILDITPCSFGGVSVITPGTNTSNQVAVLYQDVNCTEVPVAIHADQLTPTWRVYSTGSNVFQTRAGCLIGAEHVNNSYECDIPIGAGICASYQTQTNSPRRARSVASQSIIAYTMSLGAENSVAYSNNSIAIPTNFTISVTTEILPVSMTKTSVDCTMYICGDSTECSNLLLQYGSFCTQLNRALTGIAVEQDKNTQEVFAQVKQIYKTPPIKDCGGFNFSQILPDPSKPSKRSFIEDLLFNKVTLADAGFIKQYGDCLGDIAARDLICAQKFNGLTVLPPLLTDEMIAQYTSALLAGTITSGWTFGAGAALQIPFAMQMAYRFNGIGVTQNVLYENQKLIANQFNSAIGKIQDSLSSTASALGKLQDVVNQNAQALNTLVKQLSSNFGAISSVLNDILSRLDPPEAEVQIDRLITGRLQSLQTYVTQQLIRAAEIRASANLAATKMSECVLGQSKRVDFCGKGYHLMSFPQSAPHGVVFLHVTYVFAQEKNFTTAPAICHDGKAHFPREGVFVSNGTHWFVTQRNFYEPQIITTDNTFVSGNCDVVIGIVNNTVYDPLQPELDSGGGGSDIDPYKEFGSSYQLLNFLPLDFFPDLNALVDTATALYEEELTGREHCSPHHTAIRQALVCWDELTKLIAWMSSNITSEQVRTIIVNHVNDTWGLKVRQSLWFHLSCLTFGQHTVQEFLVSFGVWIRTPAPYRPPNAPILSTLPEHTVIC

SEQ ID NO: 10874 - protein, 1301 aa, Artificial Sequence
  SARS-CoV-2/Tianmen/HBCDC-HB-07/2020__EPI_ISL_412983 spike protein (1-1147)(K986P_V987P_P1069F) WhcAg construct
MFVFLVLLPLVSSQCVNLTTRTQLPPAYTNSFTRGVYYPDKVFRSSVLHSTQDLFLPFFSNVTWFHAIHVSGTNGTKRFDNPVLPFNDGVYFASTEKSNIIRGWIFGTTLDSKTQSLLIVNNATNVVIKVCEFQFCNDPFLGVYYHKNNKSWMESEFRVYSSANNCTFEYVSQPFLMDLEGKQGNFKNLREFVFKNIDGYFKIYSKHTPINLVRDLPQGFSALEPLVDLPIGINITRFQTLLALHRSYLTPGDSSSGWTAGAAAYYVGYLQPRTFLLKYNENGTITDAVDCALDPLSETKCTLKSFTVEKGIYQTSNFRVQPTESIVRFPNITNLCPFGEVFNATRFASVYAWNRKRISNCVADYSVLYNSASFSTFKCYGVSPTKLNDLCFTNVYADSFVIRGDEVRQIAPGQTGKIADYNYKLPDDFTGCVIAWNSNNLDSKVGGNYNYLYRLFRKSNLKPFERDISTEIYQAGSTPCNGVEGFNCYFPLQSYGFQPTNGVGYQPYRVVVLSFELLHAPATVCGPKKSTNLVKNKCVNFNFNGLTGTGVLTESNKKFLPFQQFGRDIADTTDAVRDPQTLEILDITPCSFGGVSVITPGTNTSNQVAVLYQDLNCTEVPVAIHADQLTPTWRVYSTGSNVFQTRAGCLIGAEHVNNSYECDIPIGAGICASYQTQTNSPRRARSVASQSIIAYTMSLGAENSVAYSNNSIAIPTNFTISVTTEILPVSMTKTSVDCTMYICGDSTECSNLLLQYGSFCTQLNRALTGIAVEQDKNTQEVFAQVKQIYKTPPIKDFGGFNFSQILPDPSKPSKRSFIEDLLFNKVTLADAGFIKQYGDCLGDIAARDLICAQKFNGLTVLPPLLTDEMIAQYTSALLAGTITSGWTFGAGAALQIPFAMQMAYRFNGIGVTQNVLYENQKLIANQFNSAIGKIQDSLSSTASALGKLQDVVNQNAQALNTLVKQLSSNFGAISSVLNDILSRLDPPEAEVQIDRLITGRLQSLQTYVTQQLIRAAEIRASANLAATKMSECVLGQSKRVDFCGKGYHLMSFPQSAPHGVVFLHVTYVFAQEKNFTTAPAICHDGKAHFPREGVFVSNGTHWFVTQRNFYEPQIITTDNTFVSGNCDVVIGIVNNTVYDPLQPELDSGGGGSDIDPYKEFGSSYQLLNFLPLDFFPDLNALVDTATALYEEELTGREHCSPHHTAIRQALVCWDELTKLIAWMSSNITSEQVRTIIVNHVNDTWGLKVRQSLWFHLSCLTFGQHTVQEFLVSFGVWIRTPAPYRPPNAPILSTLPEHTVIC

SEQ ID NO: 10875 - protein, 1301 aa, Artificial Sequence
  SARS-CoV-2/Hong Kong/case42_VM20002493/2020__EPI_ISL_414527 spike protein (1-1147)(K986P_V987P_P1069F) WhcAg construct
MFVFLVLLPLVSSQCVNLTTRTQLPPAYTNSFTRGVYYPDKVFRSSVLHSTQDLFLPFFSNVTWFHAIHVSGTNGTKRFDNPVLPFNDGVYFASTEKSNIIRGWIFGTTLDSKTQSLLIVNNATNVVIKVCEFQFCNDPFLGVYYHKNNKSWMESEFRVYSSANNCTFEYVSQPFLMDLEGKQGNFKNLREFVFKNIDGYFKIYSKHTPINLVRDLPQGFSALEPLVDLPIGINITRFQTLLALHRSYLTPGDSSSGWTAGAAAYYVGYLQPRTFLLKYNENGTITDAVDCALDPLSETKCTLKSFTVEKGIYQTSNFRVQPTESIVRFPNITNLCPFGEVFNATRFASVYAWNRKRISNCVADYSVLYNSASFSTFKCYGVSPTKLNDLCFTNVYADSFVIRGDEVRQIAPGQTGKIADYNYKLPDDFTGCVIAWNSNNLDSKVGGNYNYLYRLFRKSNLKPFERDISTEIYQAGSTPCNGVEGFNCYFPLQSYGFQPTNGVGYQPYRVVVLSFELLHAPATVCGPKKSTNLVKNKCVNFNFNGLTGTGVLTESNKKFLPFQQFGRDIADTTDAVRDPQTLEILDITPCSFGGVSVITPGTNTSNQVAVLYQDVNCTEVPVAIHADQLTPTWRVYSTGSNVFQTRAGCLIGAEHVNNSYECDIPIGAGICASYQTQTNSPRRARSVASQSIIAYTMSLGAENSVAYSNNSIAIPTNFAISVTTEILPVSMTKTSVDCTMYICGDSTECSNLLLQYGSFCTQLNRALTGIAVEQDKNTQEVFAQVKQIYKTPPIKDFGGFNFSQILPDPSKPSKRSFIEDLLFNKVTLADAGFIKQYGDCLGDIAARDLICAQKFNGLTVLPPLLTDEMIAQYTSALLAGTITSGWTFGAGAALQIPFAMQMAYRFNGIGVTQNVLYENQKLIANQFNSAIGKIQDSLSSTASALGKLQDVVNQNAQALNTLVKQLSSNFGAISSVLNDILSRLDPPEAEVQIDRLITGRLQSLQTYVTQQLIRAAEIRASANLAATKMSECVLGQSKRVDFCGKGYHLMSFPQSAPHGVVFLHVTYVFAQEKNFTTAPAICHDGKAHFPREGVFVSNGTHWFVTQRNFYEPQIITTDNTFVSGNCDVVIGIVNNTVYDPLQPELDSGGGGSDIDPYKEFGSSYQLLNFLPLDFFPDLNALVDTATALYEEELTGREHCSPHHTAIRQALVCWDELTKLIAWMSSNITSEQVRTIIVNHVNDTWGLKVRQSLWFHLSCLTFGQHTVQEFLVSFGVWIRTPAPYRPPNAPILSTLPEHTVIC

SEQ ID NO: 10876 - protein, 1301 aa, Artificial Sequence
  SARS-CoV-2/USA/CruiseA-23/2020__EPI_ISL_414482 spike protein (1-1147)(K986P_V987P_P1069F) WhcAg construct
MFVFLVLLPLVSSQCVNLTTRTQLPPAYTNSFTRGVYYPDKVFRSSVLHSTQDLFLPFFSNVTWFHAIHVSGTNGTKRFDNPVLPFNDGVYFASTEKSNIIRGWIFGTTLDSKTQSLLIVNNATNVVIKVCEFQFCNDPFLGVYYHKNNKSWMESEFRVYSSANNCTFEYVSQPFLMDLEVKQGNFKNLREFVFKNIDGYFKIYSKHTPINLVRDLPQGFSALEPLVDLPIGINITRFQTLLALHRSYLTPGDSSSGWTAGAAAYYVGYLQPRTFLLKYNENGTITDAVDCALDPLSETKCTLKSFTVEKGIYQTSNFRVQPTESIVRFPNITNLCPFGEVFNATRFASVYAWNRKRISNCVADYSVLYNSASFSTFKCYGVSPTKLNDLCFTNVYADSFVIRGDEVRQIAPGQTGKIADYNYKLPDDFTGCVIAWNSNNLDSKVGGNYNYLYRLFRKSNLKPFERDISTEIYQAGSTPCNGVEGFNCYFPLQSYGFQPTNGVGYQPYRVVVLSFELLHAPATVCGPKKSTNLVKNKCVNFNFNGLTGTGVLTESNKKFLPFQQFGRDIADTTDAVRDPQTLEILDITPCSFGGVSVITPGTNTSNQVAVLYQDVNCTEVPVAIHADQLTPTWRVYSTGSNVFQTRAGCLIGAEHVNNSYECDIPIGAGICASYQTQTNSPRRARSVASQSIIAYTMSLGAENSVAYSNNSIAIPTNFTISVTTEILPVSMTKTSVDCTMYICGDSTECSNLLLQYGSFCTQLNRALTGIAVEQDKNTQEVFAQVKQIYKTPPIKDFGGFNFSQILPDPSKPSKRSFIEDLLFNKVTLADAGFIKQYGDCLGDIAARDLICAQKFNGLTVLPPLLTDEMIAQYTSALLAGTITSGWTFGAGAALQIPFAMQMAYRFNGIGVTQNVLYENQKLIANQFNSAIGKIQDSLSSTASALGKLQDVVNQNAQALNTLVKQLSSNFGAISSVLNDILSRLDPPEAEVQIDRLITGRLQSLQTYVTQQLIRAAEIRASANLAATKMSECVLGQSKRVDFCGKGYHLMSFPQSAPHGVVFLHVTYVFAQEKNFTTAPAICHDGKAHFPREGVFVSNGTHWFVTQRNFYEPQIITTDNTFVSGNCDVVIGIVNNTVYDPLQPELDSGGGGSDIDPYKEFGSSYQLLNFLPLDFFPDLNALVDTATALYEEELTGREHCSPHHTAIRQALVCWDELTKLIAWMSSNITSEQVRTIIVNHVNDTWGLKVRQSLWFHLSCLTFGQHTVQEFLVSFGVWIRTPAPYRPPNAPILSTLPEHTVIC

SEQ ID NO: 10877 - protein, 1301 aa, Artificial Sequence
  SARS-CoV-2/Hong Kong/case85_VM20002868/2020__EPI_ISL_414519 spike protein (1-1147)(K986P_V987P_P1069F) WhcAg construct
MFVFLVLVPLVSSQCVNLTTRTQLPPAYTNSFTRGVYYPDKVFRSSVLHSTQDLFLPFFSNVTWFHAIHVSGTNGTKRFDNPVLPFNDGVYFASTEKSNIIRGWIFGTTLDSKTQSLLIVNNATNVVIKVCEFQFCNDPFLGVYYHKNNKSWMESEFRVYSSANNCTFEYVSQPFLMDLEGKQGNFKNLREFVFKNIDGYFKIYSKHTPINLVRDLPQGFSALEPLVDLPIGINITRFQTLLALHRSYLTPGDSSSGWTAGAAAYYVGYLQPRTFLLKYNENGTITDAVDCALDPLSETKCTLKSFTVEKGIYQTSNFRVQPTESIVRFPNITNLCPFGEVFNATRFASVYAWNRKRISNCVADYSVLYNSASFSTFKCYGVSPTKLNDLCFTNVYADSFVIRGDEVRQIAPGQTGKIADYNYKLPDDFTGCVIAWNSNNLDSKVGGNYNYLYRLFRKSNLKPFERDISTEIYQAGSTPCNGVEGFNCYFPLQSYGFQPTNGVGYQPYRVVVLSFELLHAPATVCGPKKSTNLVKNKCVNFNFNGLTGTGVLTESNKKFLPFQQFGRDIADTTDAVRDPQTLEILDITPCSFGGVSVITPGTNTSNQVAVLYQDVNCTEVPVAIHADQLTPTWRVYSTGSNVFQTRAGCLIGAEHVNNSYECDIPIGAGICASYQTQTNSPRRARSVASQSIIAYTMSLGAENSVAYSNNSIAIPTNFTISVTTEILPVSMTKTSVDCTMYICGDSTECSNLLLQYGSFCTQLNRALTGIAVEQDKNTQEVFAQVKQIYKTPPIKDFGGFNFSQILPDPSKPSKRSFIEDLLFNKVTLADAGFIKQYGDCLGDIAARDLICAQKFNGLTVLPPLLTDEMIAQYTSALLAGTITSGWTFGAGAALQIPFAMQMAYRFNGIGVTQNVLYENQKLIANQFNSAIGKIQDSLSSTASALGKLQDVVNQNAQALNTLVKQLSSNFGAISSVLNDILSRLDPPEAEVQIDRLITGRLQSLQTYVTQQLIRAAEIRASANLAATKMSECVLGQSKRVDFCGKGYHLMSFPQSAPHGVVFLHVTYVFAQEKNFTTAPAICHDGKAHFPREGVFVSNGTHWFVTQRNFYEPQIITTDNTFVSGNCDVVIGIVNNTVYDPLQPELDSGGGGSDIDPYKEFGSSYQLLNFLPLDFFPDLNALVDTATALYEEELTGREHCSPHHTAIRQALVCWDELTKLIAWMSSNITSEQVRTIIVNHVNDTWGLKVRQSLWFHLSCLTFGQHTVQEFLVSFGVWIRTPAPYRPPNAPILSTLPEHTVIC

SEQ ID NO: 10878 - protein, 1301 aa, Artificial Sequence; identical to SEQ ID NO: 10868
  SARS-CoV-2/England/200990660/2020__EPI_ISL_414523 spike protein (1-1147)(K986P_V987P_P1069F) WhcAg construct

SEQ ID NO: 10879 - protein, 1301 aa, Artificial Sequence
  SARS-CoV-2/Australia/NSW09/2020__EPI_ISL_413595 spike protein (1-1147)(K986P_V987P_P1069F) WhcAg construct
MFVFLVLLPLVSSQCVNLTTRTQLPPAYTNSFTRGVYYPDKVFRSSVLHSTQDLFLPFFSNVTWFHAIHVSGTNGTKRFDNPVLPFNDGVYFASTEKSNIIRGWIFGTTLDSKTQSLLIVNNATNVVIKVCEFQFCNDPFLGVYYHKNNKSWMESEFRVYSSANNCTFEYVSQPFLMDLEGKQGNFKNLREFVFKNIDGYFKIYSKHTPINLVRDLPQGFSALEPLVDLPIGINITRFQTLLALHRSYLTPGDSSSGWTAGAAAYYVGYLQPRTFLLKYNENGTITDAVDCALDPLSETKCTLKSFTVEKGIYQTSNFRVQPTESIVRFPNITNLCPFGEVFNATRFASVYAWNRKRISNCVADYSVLYNSASFSTFKCYGVSPTKLNDLCFTNVYADSFVIRGDEVRQIAPGQTGKIADYNYKLPDDFTGCVIAWNSNNLDSKVGGNYNYLYRLFRKSNLKPFERDISTEIYQAGSTPCNGVEGFNCYFPLQSYGFQPTNGVGYQPYRVVVLSFELLHAPATVCGPKKSTNLVKNKCVNFNFNGLTGTGVLTESNKKFLPFQQFGRDIADTTDAVRDPQTLEILDITPCSFGGVSVITPGTNTSNQVAVLYQDVNCTEVPVAIHADQLTPTWRVYSTGSNVFQTRAGCLIGAEHVNNSYECDIPIGAGICASYQTQTNSPRRARSVASQSIIAYTMSLGAENSVAYSNNSIAIPTNFTISVTTEILPVSMTKTSVDCTMYICGDSTECSNLLLQYGSFCTQLNRALTGIAVEQDKNTQEVFAQVKQIYKTPPIKDFGGFNFSQILPDPSKPSKRSFIEDLLFNKVTLADAGFIKQYGDCLGDIAARDLICAQKFNGLTVLPPLLTDEMIAQYTSALLAGTITSGWTFGAGAALQIPFAMQMAYRFNGIGVTQNVLYENQKLIANQFNSAIGKIQDSLSFTASALGKLQDVVNQNAQALNTLVKQLSSNFGAISSVLNDILSRLDPPEAEVQIDRLITGRLQSLQTYVTQQLIRAAEIRASANLAATKMSECVLGQSKRVDFCGKGYHLMSFPQSAPHGVVFLHVTYVFAQEKNFTTAPAICHDGKAHFPREGVFVSNGTHWFVTQRNFYEPQIITTDNTFVSGNCDVVIGIVNNTVYDPLQPELDSGGGGSDIDPYKEFGSSYQLLNFLPLDFFPDLNALVDTATALYEEELTGREHCSPHHTAIRQALVCWDELTKLIAWMSSNITSEQVRTIIVNHVNDTWGLKVRQSLWFHLSCLTFGQHTVQEFLVSFGVWIRTPAPYRPPNAPILSTLPEHTVIC

SEQ ID NO: 10880 - protein, 1301 aa, Artificial Sequence; identical to SEQ ID NO: 10860
  SARS-CoV-2/Australia/NSW10/2020__EPI_ISL_413596 spike protein (1-1147)(K986P_V987P_P1069F) WhcAg construct

SEQ ID NO: 10881 - protein, 1301 aa, Artificial Sequence
  SARS-CoV-2/Switzerland/1000477797/2020__EPI_ISL_413023 spike protein (1-1147)(K986P_V987P_P1069F) WhcAg construct
MFVFLVLLPLVSSQCVNLTTRTQLPPAYTNSFTRGVYYPDKVFRSSVLHSTQDLFLPFFSNVTWFHAIHVSGTNGTKRFDNPVLPFNDGVYFASTEKSNIIRGWIFGTTLDSKTQSLLIVNNATNVVIKVCEFQFCNDPFLGVYYHKNNKSWMESEFRVYSSANNCTFEYVSQPFLMDLEGKQGNFKNLREFVFKNIDGYFNIYSKHTPINLVRDLPQGFSALEPLVDLPIGINITRFQTLLALHRSYLTPGDSSSGWTAGAAAYYVGYLQPRTFLLKYNENGTITDAVDCALDPLSETKCTLKSFTVEKGIYQTSNFRVQPTESIVRFPNITNLCPFGEVFNATRFASVYAWNRKRISNCVADYSVLYNSASFSTFKCYGVSPTKLNDLCFTNVYADSFVIRGDEVRQIAPGQTGKIADYNYKLPDDFTGCVIAWNSNNLDSKVGGNYNYLYRLFRKSNLKPFERDISTEIYQAGSTPCNGVEGFNCYFPLQSYGFQPTNGVGYQPYRVVVLSFELLHAPATVCGPKKSTNLVKNKCVNFNFNGLTGTGVLTESNKKFLPFQQFGRDIADTTDAVRDPQTLEILDITPCSFGGVSVITPGTNTSNQVAVLYQGVNCTEVPVAIHADQLTPTWRVYSTGSNVFQTRAGCLIGAEHVNNSYECDIPIGAGICASYQTQTNSPRRARSVASQSIIAYTMSLGAENSVAYSNNSIAIPTNFTISVTTEILPVSMTKTSVDCTMYICGDSTECSNLLLQYGSFCTQLNRALTGIAVEQDKNTQEVFAQVKQIYKTPPIKDFGGFNFSQILPDPSKPSKRSFIEDLLFNKVTLADAGFIKQYGDCLGDIAARDLICAQKFNGLTVLPPLLTDEMIAQYTSALLAGTITSGWTFGAGAALQIPFAMQMAYRFNGIGVTQNVLYENQKLIANQFNSAIGKIQDSLSSTASALGKLQDVVNQNAQALNTLVKQLSSNFGAISSVLNDILSRLDPPEAEVQIDRLITGRLQSLQTYVTQQLIRAAEIRASANLAATKMSECVLGQSKRVDFCGKGYHLMSFPQSAPHGVVFLHVTYVFAQEKNFTTAPAICHDGKAHFPREGVFVSNGTHWFVTQRNFYEPQIITTDNTFVSGNCDVVIGIVNNTVYDPLQPELDSGGGGSDIDPYKEFGSSYQLLNFLPLDFFPDLNALVDTATALYEEELTGREHCSPHHTAIRQALVCWDELTKLIAWMSSNITSEQVRTIIVNHVNDTWGLKVRQSLWFHLSCLTFGQHTVQEFLVSFGVWIRTPAPYRPPNAPILSTLPEHTVIC

SEQ ID NO: 10882 - protein, 1301 aa, Artificial Sequence
  SARS-CoV-2/Belgium/BA-02291/2020__EPI_ISL_415159 spike protein (1-1147)(K986P_V987P_P1069F) WhcAg construct
MFVFLVLLPLVSSQCVNLTTRTQLPPAYTNSFTRGVYYPDKVFRSSVLHSTQDLFLPFFSNVTWFHAIHVSGTNGTKRFDNPVLPFNDGVYFASTEKSNIIRGWIFGTTLDSKTQSLLIVNNATNVVIKVCEFQFCNDPFLGVYYHKNNKSWMESEFRVYSSANNCTFEYVSQPFLMDLEGKQGNFKNLREFVFKNIDGYFKIYSKHTPINLVRDLPQGFSALEPLVDLPIGINITRFQTLLALHRSYLTPGDSSSGWTAGAAAYYVGYLQPRTFLLKYNENGTITDAVDCALDPLSETKCTLKSFTVEKGIYQTSNFRVQPTESIVRFPNITNLCPFGEVFNATRFASVYAWNRKRISNCVADYSVLYNSASFSTFKCYGVSPTKLNDLCFTNVYADSFVIRGDEVRQIAPGQTGKIADYNYKLPDDFTGCVIAWNSNNLDSKVGGNYNYLYRLFRRSNLKPFERDISTEIYQAGSTPCNGVEGFNCYFPLQSYGFQPTNGVGYQPYRVVVLSFELLPAPATVCGPKKSTNLVKNKCVNFNFNGLTGTGVLTESNKKFLPFQQFGRDIADTTDAVRDPQTLEILDITPCSFGGVSVITPGTNTSNQVAVLYQGVNCTEVPVAIHADQLTPTWRVYSTGSNVFQTRAGCLIGAEHVNNSYECDIPIGAGICASYQTQTNSPRRARSVASQSIIAYTMSLGAENSVAYSNNSIAIPTNFTISVTTEILPVSMTKTSVDCTMYICGDSTECSNLLLQYGSFCTQLNRALTGIAVEQDKNTQEVFAQVKQIYKTPPIKDFGGFNFSQILPDPSKPSKRSFIEDLLFNKVTLADAGFIKQYGDCLGDIAARDLICAQKFNGLTVLPPLLTDEMIAQYTSALLAGTITSGWTFGAGAALQIPFAMQMAYRFNGIGVTQNVLYENQKLIANQFNSAIGKIQDSLSSAAPALGKLQDVVNQNAQALNTLVKQLSSNFGAISSVLNDILSRLDPPEAEVQIDRLITGRLQSLQTYVTQQLIRAAEIRASANLAATKMSECVLGQSKRVDFCGKGYHLMSFPQSAPHGVVFLHVTYVFAQEKNFTTAPAICHDGKAHFPREGVFVSNGTHWFVTQRNFYEPQIITTDNTFVSGNCDVVIGIVNNTVYDPLQPELDSGGGGSDIDPYKEFGSSYQLLNFLPLDFFPDLNALVDTATALYEEELTGREHCSPHHTAIRQALVCWDELTKLIAWMSSNITSEQVRTIIVNHVNDTWGLKVRQSLWFHLSCLTFGQHTVQEFLVSFGVWIRTPAPYRPPNAPILSTLPEHTVIC

SEQ ID NO: 10883 - protein, 1301 aa, Artificial Sequence
  SARS-CoV-2/USA/WA8-UW5/2020__EPI_ISL_413486 spike protein (1-1147)(K986P_V987P_P1069F) WhcAg construct
MFVFLVLLPLVSSQCVNLTTRTQLPPAYTNSFTRGVYYPDKVFRSSVLHSTQDLFLPFFSNVTWFHAIHVSGTNGTKRFDNPVLPFNDGVYFASTEKSNIIRGWIFGTTLDSKTQSLLIVNNATNVVIKVCEFQFCNDPFLGVYYHKNNKSWMESEFRVYSSANNCTFEYVSQPFLMDLEGKQGNFKNLREFVFKNIDGYFKIYSKHTPINLVRDLPQGFSALEPLVDLPIGINITRFQTLLALHRSYLTPGDSSSGWTAGAAAYYVGYLQPRTFLLKYNENGTITDAVDCALDPLSETKCTLKSFTVEKGIYQTSNFRVQPTESIVRFPNITNLCPFGEVFNATRFASVYAWNRKRISNCVADYSVLYNSASFSTFKCYGVSPTKLNDLCFTNVYADSFVIRGDEVRQIAPGQTGKIADYNYKLPDDFTGCVIAWNSNNLDSKVGGNYNYLYRLFRKSNLKPFERDISTEIYQAGSTPCNGVEGFNCYFPLQSYGFQPTNGVGYQPYRVVVLSFELLHAPATVCGPKKSTNLVKNKCVNFNFNGLTGTGVLTESNKKFLPFQQFGRDIADTTDAVRDPQTLEILDITPCSFGGVSVITPGTNTSNQVAVLYQDVNCTEVPVAIHADQLTPTWRVYSTGSNVFQTRAGCLIGAEYVNNSYECDIPIGAGICASYQTQTNSPRRARSVASQSIIAYTMSLGAENSVAYSNNSIAIPTNFTISVTTEILPVSMTKTSVDCTMYICGDSTECSNLLLQYGSFCTQLNRALTGIAVEQDKNTQEVFAQVKQIYKTPPIKDFGGFNFSQILPDPSKPSKRSFIEDLLFNKVTLADAGFIKQYGDCLGDIAARDLICAQKFNGLTVLPPLLTDEMIAQYTSALLAGTITSGWTFGAGAALQIPFAMQMAYRFNGIGVTQNVLYENQKLIANQFNSAIGKIQDSLSSTASALGKLQDVVNQNAQALNTLVKQLSSNFGAISSVLNDILSRLDPPEAEVQIDRLITGRLQSLQTYVTQQLIRAAEIRASANLAATKMSECVLGQSKRVDFCGKGYHLMSFPQSAPHGVVFLHVTYVFAQEKNFTTAPAICHDGKAHFPREGVFVSNGTHWFVTQRNFYEPQIITTDNTFVSGNCDVVIGIVNNTVYDPLQPELDSGGGGSDIDPYKEFGSSYQLLNFLPLDFFPDLNALVDTATALYEEELTGREHCSPHHTAIRQALVCWDELTKLIAWMSSNITSEQVRTIIVNHVNDTWGLKVRQSLWFHLSCLTFGQHTVQEFLVSFGVWIRTPAPYRPPNAPILSTLPEHTVIC

SEQ ID NO: 10884 - protein, 1301 aa, Artificial Sequence
  SARS-CoV-2/England/20102000506/2020__EPI_ISL_415147 spike protein (1-1147)(K986P_V987P_P1069F) WhcAg construct
MFVFLVLLPLVSSQCVNLTTRTQLPPAYTNSFTRGVYYPDKVFRSSVLHSTQDLFLPFFSNVTWFHAIHVSGTNGTKRFDNPVLPFNDGVYFASTEKSNIIRGWIFGTTLDSKTQSLLIVNNATNVVIKVCEFQFCNDPFLGVYYHKNNKSWMESEFRVYSSANNCTFEYVSQPFLMDLEGKQGNFKNLREFVFKNIDGYFKIYSKHTPINLVRDLPQGFSALEPLVDLPIGINITRFQTLLALHRSYLTPGDSSSGWTAGAAAYYVGYLQPRTFLLKYNENGTITDAVDCALDPLSETKCTLKSFTVEKGIYQTSNFRVQPTESIVRFPNITNLCPFGEVFNATRFASVYAWNRKRISNCVADYSVLYNSASFSTFKCYGVSPTKLNDLCFTNVYADSFVIRGDEVRQIAPGQTGKIADYNYKLPDDFTGCVIAWNSNNLDSKVGGNYNYLYRLFRKSNLKPFERDISTEIYQAGSTPCNGVEGFNCYFPLQSYGFQPTNGVGYQPYRVVVLSFELLHAPATVCGPKKSTNLVKNKCVNFNFNGLTGTGVLTESNKKFLPFQQFGRDIADTTDAVRDPQTLEILDITPCSFGGVSVITPGTNTSNQVAVLYQGVNCTEVPVAIHADQLTPTWRVYSTGSNVFQTRAGCLIGAEHVNNSYECDIPIGAGICASYQTQTNSPRRARSVASQSIIAYTMSLGAENSVAYSNNSIAIPTNFTISVTTEILPVSMTKTSVDCTMYICGDSTECSNLLLQYGSFCTQLNRALTGIAVEQDKNTQEVFAQVKQIYKTPPIKDFGGFNFSQILPDPSKPSKRSFIEDLLFNKVTLADAGFIKQYGYCLGDIAARDLICAQKFNGLTVLPPLLTDEMIAQYTSALLAGTITSGWTFGAGAALQIPFAMQMAYRFNGIGVTQNVLYENQKLIANQFNSAIGKIQDSLSSTASALGKLQDVVNQNAQALNTLVKQLSSNFGAISSVLNDILSRLDPPEAEVQIDRLITGRLQSLQTYVTQQLIRAAEIRASANLAATKMSECVLGQSKRVDFCGKGYHLMSFPQSAPHGVVFLHVTYVFAQEKNFTTAPAICHDGKAHFPREGVFVSNGTHWFVTQRNFYEPQIITTDNTFVSGNCDVVIGIVNNTVYDPLQPELDSGGGGSDIDPYKEFGSSYQLLNFLPLDFFPDLNALVDTATALYEEELTGREHCSPHHTAIRQALVCWDELTKLIAWMSSNITSEQVRTIIVNHVNDTWGLKVRQSLWFHLSCLTFGQHTVQEFLVSFGVWIRTPAPYRPPNAPILSTLPEHTVIC

SEQ ID NO: 10885 - protein, 1301 aa, Artificial Sequence
  SARS-CoV-2/Belgium/VAG-03013/2020__EPI_ISL_415155 spike protein (1-1147)(K986P_V987P_P1069F) WhcAg construct
MFVFLVLLPLVSSQCVNLTTRTQLPPAYTNSFTRGVYYPDKVFRSSVLHSTQDLFLPFFSNVTWFHAIHVSGTNGTKRFDNPVLPFNDGVYFASTEKSNIIRGWIFGTTLDSKTQSLLIVNNATNVVIKVCEFQFCNDPFLGVYYHKNNKSWMESEFRVYSSANNCTFEYVSQPFLMDLEGKQGNFKNLREFVFKNIDGYFKIYSKHTPINLVRDLPQGFSALEPLVDLPIGINITRFQTLLALHRSYLTPGDSSSGWTAGAAAYYVGYLQPRTFLLKYNENGTITDAVDCALDPLSETKCTLKSFTVEKGIYQTSNFRVQPTESIVRFPNITNLCPFGEVFNATRFASVYAWNRKRISNCVADYSVLYNSASFSTFKCYGVSPTKLNDLCFTNVYADSFVIRGDEVRQIAPGQTGKIADYNYKLPDDFTGCVIAWNSNNLDSKVGGNYNYLYRLFRKSNLKPFERDISTEIYQAGSTPCNGVEGFNCYFPLQSYGFQPTNGVGYQPYRVVVLSFELLHAPATVCGPKKSTNLVKNKCVNFNFNGLTGTGVLTESNKKFLPFQQFGRDIADTTDAVRDPQTLEILDITPCSFGGVSVITPGTNTSNQVAVLYQGVNCTEVPVAIHADQLTPTWRVYSTGSNVFQTRAGCLIGAEHVNNSYECDIPIGAGICASYQTQTNSPRRARSVASQSIIAYTMSLGAENSVAYSNNSIAIPTNFTISVTTEILPVSMTKTSVDCTMYICGDSTECSNLLLQYGSFCTQLNRALTGIAVEQDKNTQEVFAQVKQIYKTPPIKDFGGFNFSQILPDPSKPSKRSFIEDLLFNKVTLADAGFIKQYGDCLGDIAARDLICAQKFNGLTVLPPLLTDEMIAQYTSALLAGTITSGWTFGAGAALQIPFAMQMAYRFNGIGVTQNVLYENQKLIANQFNSAIGKIQDSLSSTATALGKLQDVVNQNAQALNTLVKQLSSNFGAISSVLNDILSRLDPPEAEVQIDRLITGRLQSLQTYVTQQLIRAAEIRASANLAATKMSECVLGQSKRVDFCGKGYHLMSFPQSAPHGVVFLHVTYVFAQEKNFTTAPAICHDGKAHFPREGVFVSNGTHWFVTQRNFYEPQIITTDNTFVSGNCDVVIGIVNNTVYDPLQPELDSGGGGSDIDPYKEFGSSYQLLNFLPLDFFPDLNALVDTATALYEEELTGREHCSPHHTAIRQALVCWDELTKLIAWMSSNITSEQVRTIIVNHVNDTWGLKVRQSLWFHLSCLTFGQHTVQEFLVSFGVWIRTPAPYRPPNAPILSTLPEHTVIC

SEQ ID NO: 10886 - protein, 1301 aa, Artificial Sequence
  SARS-CoV-2/Belgium/BC-03016/2020__EPI_ISL_415157 spike protein (1-1147)(K986P_V987P_P1069F) WhcAg construct
MFVFLVLLPLVSSQCVNLTTRTQLPPAYTNSFTRGVYYPDKVFRSSVLHSTQDLFLPFFSNVTWFHAIHVSGTNGTKRFDNPVLPFNDGVYFASTEKSNIIRGWIFGTTLDSKTQSLLIVNNATNVVIKVCEFQFCNDPFLGVYYHKNNKSWMESEFRVYSSANNCTFEYVSQPFLMDLEGKQGNFKNLREFVFKNIDGYFKIYSKHTPINLVRDLPQGFSALEPLVDLPIGINITRFQTLLALHRSYLTPGDSSSGWTAGAAAYYVGYLQPRTFLLKYNENGTITDAVDCALDPLSETKCTLKSFTVEKGIYQTSNFRVQPTESIVRFPNITNLCPFGEVFNATRFASVYAWNRKRISNCVADYSVLYNSASFSTFKCYGVSPTKLNDLCFTNVYADSFVIRGDEVRQIAPGQTGKIADYNYKLPDDFTGCVIAWNSNNLDSKVGGNYNYLYRLFRKSNLKPFERDISTEIYQAGSTPCNGVEGFNCYFPLQSYGFQPTNGVGYQPYRVVVLSFELLHAPATVCGPKKSTNLVKNKCVNFNFNGLTGTGVLTESNKKFLPFQQFGRDIADTTDAVRDPQTLEILDITPCSFGGVSVITPGTNTSNQVAVLYQGVNCTEVPVAIHADQLTPTWRVYSTGSNVFQTRAGCLIGAEHVNNSYECDIPIGAGICASYQTQTNSPRRARSVASQSIIAYTMSLGAENSVAYSNNSIAIPTNFTISVTTEILPVSMTKTSVDCTMYICGDSTECSNLLLQYGSFCTQLNRALTGIAVEQDKNTQEVFAQVKQIYKTPPIKDFGGFNFSQILPDPSKPSKRSFIEDLLFNKVTLADAGFIKQYGDCLGDIAARDLICAQKFNGLTVLPPLLTDEMIAQYTSALLAGTITSGWTFGAGAALQIPFAMQMAYRFNGIGVTQNVLYENQKLIANQFNSAIGKIQDSLSSTAPALGKLQDVVNQNAQALNTLVKQLSSNFGAISSVLNDILSRLDPPEAEVQIDRLITGRLQSLQTYVTQQLIRAAEIRASANLAATKMSECVLGQSKRVDFCGKGYHLMSFPQSAPHGVVFLHVTYVFAQEKNFTTAPAICHDGKAHFPREGVFVSNGTHWFVTQRNFYEPQIITTDNTFVSGNCDVVIGIVNNTVYDPLQPELDSGGGGSDIDPYKEFGSSYQLLNFLPLDFFPDLNALVDTATALYEEELTGREHCSPHHTAIRQALVCWDELTKLIAWMSSNITSEQVRTIIVNHVNDTWGLKVRQSLWFHLSCLTFGQHTVQEFLVSFGVWIRTPAPYRPPNAPILSTLPEHTVIC

SEQ ID NO: 10887 - protein, 1301 aa, Artificial Sequence
  SARS-CoV-2/Germany/BavPat3/2020__EPI_ISL_414521 spike protein (1-1147)(K986P_V987P_P1069F) WhcAg construct
MFVFLVLLPLVSSQCVNLTTRTQLPPAYTNSFTRGVYYPDKVFRSSVLHSTQDLFLPFFSNVTWFHAIHVSGTNGTKRFDNPVLPFNDGVYFASTEKSNIIRGWIFGTTLDSKTQSLLIVNNATNVVIKVCEFQFCNDPFLGVYYHKNNKSWMESEFRVYSSANNCTFEYVSQPFLMDLEGKQGNFKNLREFVFKNIDGYFKIYSKHTPINLVRDLPQGFSALEPLVDLPIGINITRFQTLLALHRSYLTPGDSSSGWTAGAAAYYVGYLQPRTFLLKYNENGTITDAVDCALDPLSETKCTLKSFTVEKGIYQTSNFRVQPTESIVRFPNITNLCPFGEVFNATRFASVYAWNRKRISNCVADYSVLYNSASFSTFKCYGVSPTKLNDLCFTNVYADSFVIRGDEVRQIAPGQTGKIADYNYKLPDDFTGCVIAWNSNNLDSKVGGNYNYLYRLFRKSNLKPFERDISTEIYQAGSTPCNGVEGFNCYFPLQSYGFQPTNGVGYQPYRVVVLSFELLHAPATVCGPKKSTNLVKNKCVNFNFNGLTGTGVLTESNKKFLPFQQFGRDIADTTDAVRDPQTLEILDITPCSFGGVSVITPGTNTSNQVAVLYQDVNCTEVPVAIHADQLTPTWRVYSTGSNVFQTRAGCLIGAEHVNNSYECDIPIGAGICASYQTQTNSPRRARSVASQSIIAYTMSLGAENSVAYSNNSIAIPTNFTISVTTEILPVSMTKTSVDCTMYICGDSTECSNLLLQYGSFCTQLNRALTGIAVEQDKNTQQVFAQVKQIYKTPPIKDFGGFNFSQILPDPSKPSKRSFIEDLLFNKVTLADAGFIKQYGDCLGDIAARDLICAQKFNGLTVLPPLLTDEMIAQYTSALLAGTITSGWTFGAGAALQIPFAMQMAYRFNGIGVTQNVLYENQKLIANQFNSAIGKIQDSLSSTASALGKLQDVVNQNAQALNTLVKQLSSNFGAISSVLNDILSRLDPPEAEVQIDRLITGRLQSLQTYVTQQLIRAAEIRASANLAATKMSECVLGQSKRVDFCGKGYHLMSFPQSAPHGVVFLHVTYVFAQEKNFTTAPAICHDGKAHFPREGVFVSNGTHWFVTQRNFYEPQIITTDNTFVSGNCDVVIGIVNNTVYDPLQPELDSGGGGSDIDPYKEFGSSYQLLNFLPLDFFPDLNALVDTATALYEEELTGREHCSPHHTAIRQALVCWDELTKLIAWMSSNITSEQVRTIIVNHVNDTWGLKVRQSLWFHLSCLTFGQHTVQEFLVSFGVWIRTPAPYRPPNAPILSTLPEHTVIC

SEQ ID NO: 10888 - protein, 1301 aa, Artificial Sequence
  SARS-CoV-2/France/HF1805/2020__EPI_ISL_414628 spike protein (1-1147)(K986P_V987P_P1069F) WhcAg construct
MFVFLVLLPLVSSQCVNLTTRTQLPPAYTNSFTRGVYYPDKVFRSSVLHSTQDLFLPFFSNVTWFHAIHVSGTNGTKRFDNPVLPFNDGVYFASTEKSNIIRGWIFGTTLDSKTQSLLIVNNATNVVIKVCEFQFCNDPFLGVYYHKNNKSWMESEFRVYSSANNCTFEYVSQPFLMDLEGKQGNFKNLREFVFKNIDGYFKIYSKHTPINLVRDLPQGFSALEPLVDLPIGINITRFQTLLALHRSYLTPGDSSSGWTAGAAAYYVGYLQPRTFLLKYNENGTITDAVDCALDPLSETKCTLKSFTVEKGIYQTSNFRVQPTESIVRFPNITNLCPFGEVFNATRFASVYAWNRKRISNCVADYSVLYNSASFSTFKCYGVSPTKLNDLCFTNVYADSFVIRGDEVRQIAPGQTGKIADYNYKLPDDFTGCVIAWNSNNLDSKVGGNYNYLYRLFRKSNLKPFERDISTEIYQAGSTPCNGVEGFNCYFPLQSYGFQPTNGVGYQPYRVVVLSFELLHAPATVCGPKKSTNLVKNKCVNFNFNGLTGTGVLTESNKKFLPFQQFGRDIADTTDAVRDPQTLEILDITPCSFGGVSVITPGTNTSNQVAVLYQGVNCTEVPVAIHADQLTPTWRVYSTGSNVFQTRAGCLIGAEHVNNSYECDIPIGAGICASYQTQTNSPRRARSVASQSIIAYTMSLGAENSVAYSNNSIAIPTNFTISVTTEILPVSMTKTSVDCTMYICGDSTECSNLLLQYGSFCTQLNRALTGIAVEQDKNTQEVFAQVKQIYKTPPIKDFGGFNFSQILPDPSKPSKRSFIEDLLFNKVTLADAGFIKQYGDCLGDIAARDLICAQKFNGLTVLPPLLTDEMIAQYTSALLAGTITSGWTFGAGAALQIPFAMQMAYRFNGIGVTQNVLYENQKLIANQFNSAIGKIQDSLSSTASALGKLQDVVNQNAQALNTLVKQLSSNFGAISSVLNDILSRLDPPEAEVQIDRLITGRLQSLQTYVTQQLIRAAEIRASANLAATKMSECVLGQSKRVDFCGKGYHLMSFPQSAPHGVVFLHVTYVFAQEKNFTTAPAICHDGKAHFPREGVFVSNGTHWFVTQRNFYEPQIITTDNTFVSGNCDVVIGVVNNTVYDPLQPELDSGGGGSDIDPYKEFGSSYQLLNFLPLDFFPDLNALVDTATALYEEELTGREHCSPHHTAIRQALVCWDELTKLIAWMSSNITSEQVRTIIVNHVNDTWGLKVRQSLWFHLSCLTFGQHTVQEFLVSFGVWIRTPAPYRPPNAPILSTLPEHTVIC

SEQ ID NO: 10889 - protein, 1301 aa, Artificial Sequence
  SARS-CoV-2/Netherlands/ZuidHolland_9/2020__EPI_ISL_414445 spike protein (1-1147)(K986P_V987P_P1069F) WhcAg construct
MFVFLVLLPLVSSQCVNLTTRTQLPPAYTNSFTRGVYYPDKVFRSSVLHSTQDLFLPFFSNVTWFHAIHVSGTNGTKRFDNPVLPFNDGVYFASTEKSNIIRGWIFGTTLDSKTQSLLIVNNATNVVIKVCEFQFCNDPFLGVYYHKNNKSWMESEFRVYSSANNCTFEYVSQPFLMDLEGKQGNFKNLREFVFKNIDGYFKIYSKHTPINLVRDLPQGFSALEPLVDLPIGINITRFQTLLALHRSYLTPGDSSSGWTAGAAAYYVGYLQPRTFLLKYNENGTITDAVDCALDPLSETKCTLKSFTVEKGIYQTSNFRVQPTESIVRFPNITNLCPFGEVFNATRFASVYAWNRKRISNCVADYSVLYNSASFSTFKCYGVSPTKLNDLCFTNVYADSFVIRGDEVRQIAPGQTGKIADYNYKLPDDFTGCVIAWNSNNLDSKVGGNYNYLYRLFRKSNLKPFERDISTEIYQAGSTPCNGVEGFNCYFPLQSYGFQPTNGVGYQPYRVVVLSFELLHAPATVCGPKKSTNLVKNKCVNFNFNGLTGTGVLTESNKKFLPFQQFGRDIADTTDAVRDPQTLEILDITPCSFGGVSVITPGTNTSNQVAVLYQGVNCTEVPVAIHADQLTPTWRVYSTGSNVFQTRAGCLIGAEHVNNSYECDIPIGAGICASYQTQTNSPRRARSVASQSIIAYTMSLGAENSVAYSNNSIAIPTNFTISVTTEILPVSMTKTSVDCTMYICGDSTECSNLLLQYGSFCTQLNRALTGIAVEQDKNTQEVFAQVKQIYKTPPIKDFGGFNFSQILPDPSKPSKRSFIEDLLFNKVTLADAGFIKQYGDCLGDIAARDLICVQKFNGLTVLPPLLTDEMIAQYTSALLAGTITSGWTFGAGAALQIPFAMQMAYRFNGIGVTQNVLYENQKLIANQFNSAIGKIQDSLSSTASALGKLQDVVNQNAQALNTLVKQLSSNFGAISSVLNDILSRLDPPEAEVQIDRLITGRLQSLQTYVTQQLIRAAEIRASANLAATKMSECVLGQSKRVDFCGKGYHLMSFPQSAPHGVVFLHVTYVFAQEKNFTTAPAICHDGKAHFPREGVFVSNGTHWFVTQRNFYEPQIITTDNTFVSGNCDVVIGIVNNTVYDPLQPELDSGGGGSDIDPYKEFGSSYQLLNFLPLDFFPDLNALVDTATALYEEELTGREHCSPHHTAIRQALVCWDELTKLIAWMSSNITSEQVRTIIVNHVNDTWGLKVRQSLWFHLSCLTFGQHTVQEFLVSFGVWIRTPAPYRPPNAPILSTLPEHTVIC

SEQ ID NO: 10890 - protein, 1301 aa, Artificial Sequence
  SARS-CoV-2/Finland/FIN03032020A/2020__EPI_ISL_413602 spike protein (1-1147)(K986P_V987P_P1069F) WhcAg construct
MFVFLVLLPLVSSQCVNLTTRTQLPPAYTNSFTRGVYYPDKVFRSSVLHSTQDLFLPFFSNVTWFHAIHVSGTNGTKRFDNPVLPFNDGVYFASTEKSNIIRGWIFGTTLDSKTQSLLIVNNATNVVIKVCEFQFCNDPFLGVYYHKNNKSWMESEFRVYSSANNCTFEYVSQPFLMDLEGKQGNFKNLREFVFKNIDGYFKIYSKHTPINLVRDLPQGFSALEPLVDLPIGINITRFQTLLALHRSYLTPGDSSSGWTAGAAAYYVGYLQPRTFLLKYNENGTITDAVDCALDPLSETKCTLKSFTVEKGIYQTSNFRVQPTESIVRFPNITNLCPFGEVFNATRFASVYAWNRKRISNCVADYSVLYNSASFSTFKCYGVSPTKLNDLCFTNVYADSFVIRGDEVRQIAPGQTGKIADYNYKLPDDFTGCVISWNSNNLDSKVGGNYNYLYRLFRKSNLKPFERDISTEIYQAGSTPCNGVEGFNCYFPLQSYGFQPTNGVGYQPYRVVVLSFELLHAPATVCGPKKSTNLVKNKCVNFNFNGLTGTGVLTESNKKFLPFQQFGRDIADTTDAVRDPQTLEILDITPCSFGGVSVITPGTNTSNQVAVLYQGVNCTEVPVAIHADQLTPTWRVYSTGSNVFQTRAGCLIGAEHVNNSYECDIPIGAGICASYQTQTNSPRRARSVASQSIIAYTMSLGAENSVAYSNNSIAIPTNFTISVTTEILPVSMTKTSVDCTMYICGDSTECSNLLLQYGSFCTQLNRALTGIAVEQDKNTQEVFAQVKQIYKTPPIKDFGGFNFSQILPDPSKPSKRSFIEDLLFNKVTLADAGFIKQYGDCLGDIAARDLICAQKFNGLTVLPPLLTDEMIAQYTSALLAGTITSGWTFGAGAALQIPFAMQMAYRFNGIGVTQNVLYENQKLIANQFNSAIGKIQDSLSSTASALGKLQDVVNQNAQALNTLVKQLSSNFGAISSVLNDILSRLDPPEAEVQIDRLITGRLQSLQTYVTQQLIRAAEIRASANLAATKMSECVLGQSKRVDFCGKGYHLMSFPQSAPHGVVFLHVTYVFAQEKNFTTAPAICHDGKAHFPREGVFVSNGTHWFVTQRNFYEPQIITTDNTFVSGNCDVVIGIVNNTVYDPLQPELDSGGGGSDIDPYKEFGSSYQLLNFLPLDFFPDLNALVDTATALYEEELTGREHCSPHHTAIRQALVCWDELTKLIAWMSSNITSEQVRTIIVNHVNDTWGLKVRQSLWFHLSCLTFGQHTVQEFLVSFGVWIRTPAPYRPPNAPILSTLPEHTVIC

SEQ ID NO: 10891 - protein, 1301 aa, Artificial Sequence
  SARS-CoV-2/France/GE1977/2020__EPI_ISL_414632 spike protein (1-1147)(K986P_V987P_P1069F) WhcAg construct
MFVFLVLLPLVSSQCVNLTTRTQLPPAYTNSFTRGVYYPDKVFRSSVLHSTQDLFLPFFSNVTWFHAIHVSGTNGTKRFDNPVLPFNDGVYFASTEKSNIIRGWIFGTTLDSKTQSLLIVNNATNVVIKVCEFQFCNDPFLGVYYHKNNKSWMESEFRVYSSANNCTFEYVSQPFLMDLEGKQGNFKNLREFVFKNIDGYFKIYSKHTPINLVRDLPQGFSALEPLVDLPIGINITRFQTLLALHRSYLTPGDSSSGWTAGAAAYYVGYLQPRTFLLKYNENGTITDAVDCALDPLSETKCTLKSFTVEKGIYQTSNFRVQPTESIVRFPNITNLCPFGEVFNATRFASVYAWNRKRISNCVADYSVLYNSASFSTFKCYGVSPTKLNDLCFTNVYADSFVIRGDEVRQIAPGQTGKIADYNYKLPDDFTGCVIAWNSNNLDSKVGGNYNYLYRLFRKSNLKPFERDISTEIYQAGSTPCNGVEGFNCYFPLQSYGFQPTNGVGYQPYRVVVLSFELLHAPATVCGPKKSTNLVKNKCVNFNFNGLTGTGVLTESNKKFLPFQQFGRDIADTTDAVRDPQTLEILDITPCSFGGVSVITPGTNTSNQVAVLYQGVNCTEVPVAIHADQLTPTWRVYSTGSNVFQTRAGCLIGAEHVNNSYECDIPIGAGICASYQTQTNSPRRARSVASQSIIAYTMSLGAENSVAYSNNSIAIPTNFTISVTTEILPVSMTKTSVDCTMYICGDSTECSNLLLQYGSFCTQLNRALTGIAVEQDKNTQEVFAQVKQIYKTPPIKDFGGFNFSQILPDPSKPSKRSFIEDLLFNKVTLADAGFIKQYGDCLGDIAARDLICAQKFNGLTVLPPLLTDEMIAQYTSALLAGTITSGWTFGAGAALQIPFAMQMAYRFNGIGVTQNVLYENQKLIANQFNSAIGKIQDSLFSTASALGKLQDVVNQNAQALNTLVKQLSSNFGAISSVLNDILSRLDPPEAEVQIDRLITGRLQSLQTYVTQQLIRAAEIRASANLAATKMSECVLGQSKRVDFCGKGYHLMSFPQSAPHGVVFLHVTYVFAQEKNFTTAPAICHDGKAHFPREGVFVSNGTHWFVTQRNFYEPQIITTDNTFVSGNCDVVIGIVNNTVYDPLQPELDSGGGGSDIDPYKEFGSSYQLLNFLPLDFFPDLNALVDTATALYEEELTGREHCSPHHTAIRQALVCWDELTKLIAWMSSNITSEQVRTIIVNHVNDTWGLKVRQSLWFHLSCLTFGQHTVQEFLVSFGVWIRTPAPYRPPNAPILSTLPEHTVIC

SEQ ID NO: 10892 - protein, 1301 aa, Artificial Sequence
  SARS-CoV-2/Finland/FIN-313/2020__EPI_ISL_414641 spike protein (1-1147)(K986P_V987P_P1069F) WhcAg construct
MFVFLVLLPLVSSQCVNLTTRTQLPPAYTNSFTRGVYYPDKVFRSSVLHSTQDLFLPFFSNVTWFHAIHVSGTNGTKRFDNPVLPFNDGVYFASTEKSNIIRGWIFGTTLDSKTQSLLIVNNATNVVIKVCEFQFCNDPFLGVYYHKNNKSWMESEFRVYSSANNCTFEYVSQPFLMDLEGKQGNFKNLREFVFKNIDGYFKIYSKHTPINLVRDLPQGFSALEPLVDLPIGINITRFKTLLALHRSYLTPGDSSSGWTAGAAAYYVGYLQPRTFLLKYNENGTITDAVDCALDPLSETKCTLKSFTVEKGIYQTSNFRVQPTESIVRFPNITNLCPFGEVFNATRFASVYAWNRKRISNCVADYSVLYNSASFSTFKCYGVSPTKLNDLCFTNVYADSFVIRGDEVRQIAPGQTGKIADYNYKLPDDFTGCVIAWNSNNLDSKVGGNYNYLYRLFRKSNLKPFERDISTEIYQAGSTPCNGVEGFNCYFPLQSYGFQPTNGVGYQPYRVVVLSFELLHAPATVCGPKKSTNLVKNKCVNFNFNGLTGTGVLTESNKKFLPFQQFGRDIADTTDAVRDPQTLEILDITPCSFGGVSVITPGTNTSNQVAVLYQGVNCTEVPVAIHADQLTPTWRVYSTGSNVFQTRAGCLIGAEHVNNSYECDIPIGAGICASYQTQTNSPRRARSVASQSIIAYTMSLGAENSVAYSNNSIAIPTNFTISVTTEILPVSMTKTSVDCTMYICGDSTECSNLLLQYGSFCTQLNRALTGIAVEQDKNTQEVFAQVKQIYKTPPIKDFGGFNFSQILPDPSKPSKRSFIEDLLFNKVTLADAGFIKQYGDCLGDIAARDLICAQKFNGLTVLPPLLTDEMIAQYTSALLAGTITSGWTFGAGAALQIPFAMQMAYRFNGIGVTQNVLYENQKLIANQFNSAIGKIQDSLSSTASALGKLQDVVNQNAQALNTLVKQLSSNFGAISSVLNDILSRLDPPEAEVQIDRLITGRLQSLQTYVTQQLIRAAEIRASANLAATKMSECVLGQSKRVDFCGKGYHLMSFPQSAPHGVVFLHVTYVFAQEKNFTTAPAICHDGKAHFPREGVFVSNGTHWFVTQRNFYEPQIITTDNTFVSGNCDVVIGIVNNTVYDPLQPELDSGGGGSDIDPYKEFGSSYQLLNFLPLDFFPDLNALVDTATALYEEELTGREHCSPHHTAIRQALVCWDELTKLIAWMSSNITSEQVRTIIVNHVNDTWGLKVRQSLWFHLSCLTFGQHTVQEFLVSFGVWIRTPAPYRPPNAPILSTLPEHTVIC

SEQ ID NO: 10893 - protein, 1301 aa, Artificial Sequence
  SARS-CoV-2/Netherlands/ZuidHolland_2/2020__EPI_ISL_414556 spike protein (1-1147)(K986P_V987P_P1069F) WhcAg construct
MFVFLVLLPLVSSQCVNLTTRTQLPPAYTNSFTRGVYYPDKVFRSSVLHSTQDLFLPFFSNVTWFHAIHVSGTNGTKRFDNPVLPFNDGVYFASTEKSNIIRGWIFGTTLDSKTQSLLIVNNATNVVIKVCEFQFCNDPFLGVYYHKNNKSWMESEFRVYSSANNCTFEYVSQPFLMDLEGKQGNFKNLREFVFKNIDGYFKIYSKHTPINLVRDLPQGFSALEPLVDLPIGINITRFQTLLALHRSYLTPGDSSSGWTAGAAAYYVGYLQPRTFLLKYNENGTITDAVDCALDPLSETKCTLKSFTVEKGIYQTSNFRVQPTESIVRFPNITNLCPFGEVFNATRFASVYAWNRKRISNCVADYSVLYNSASFSTFKCYGVSPTKLNDLCFTNVYADSFVIRGDEVRQIAPGQTGKIADYNYKLPDDFTGCVIAWNSNNLDSKVGGNYNYLYRLFRKSNLKPFERDISTEIYQAGSTPCNGVEGFNCYFPLQSYGFQPTNGVGYQPYRVVVLSFELLHAPATVCGPKKSTNLVKNKCVNFNFNGLTGTGVLTESNKKFLPFQQFGRDIADTTDAVRDPQTLEILDITPCSFGGVSVITPGTNTSNQVAVLYQGVNCTEVPVAIHADQLTPTWRVYSTGSNVFQTRAGCLIGAEHVNNSYECDIPIGAGICASYQTQTNSPRRARSVASQSIIAYTMSLGAENSVAYSNNSIAIPTNFTISVTTEILPVSMTKTSVDCTMYICGDSTECSNLLLQYGSFCTQLNRALTGIALEQDKNTQEVFAQVKQIYKTPPIKDFGGFNFSQILPDPSKPSKRSFIEDLLFNKVTLADAGFIKQYGDCLGDIAARDLICAQKFNGLTVLPPLLTDEMIAQYTSALLAGTITSGWTFGAGAALQIPFAMQMAYRFNGIGVTQNVLYENQKLIANQFNSAIGKIQDSLSSTASALGKLQDVVNQNAQALNTLVKQLSSNFGAISSVLNDILSRLDPPEAEVQIDRLITGRLQSLQTYVTQQLIRAAEIRASANLAATKMSECVLGQSKRVDFCGKGYHLMSFPQSAPHGVVFLHVTYVFAQEKNFTTAPAICHDGKAHFPREGVFVSNGTHWFVTQRNFYEPQIITTDNTFVSGNCDVVIGIVNNTVYDPLQPELDSGGGGSDIDPYKEFGSSYQLLNFLPLDFFPDLNALVDTATALYEEELTGREHCSPHHTAIRQALVCWDELTKLIAWMSSNITSEQVRTIIVNHVNDTWGLKVRQSLWFHLSCLTFGQHTVQEFLVSFGVWIRTPAPYRPPNAPILSTLPEHTVIC

SEQ ID NO: 10894 - protein, 1301 aa, Artificial Sequence
  SARS-CoV-2/USA/WA-UW31/2020__EPI_ISL_414618 spike protein (1-1147)(K986P_V987P_P1069F) WhcAg construct
MFVFLVLLPLVSSQCVNLTTRTQLPPAYTNSFTRGVYYPDKVFRSSVLHSTQDLFLPFFSNVTWFHAIHVSGTNGTKRFDNPVLPFNDGVYFASTEKSNIIRGWIFGTTLDSKTQSLLIVNNATNVVIKVCEFQFCNDPFLGVYYHKNNKSWMESEFRVYSSANNCTFEYVSQPFLMDLEGKQGNFKNLREFVFKNIDGYFKIYSKHTPINLVRDLPQGFSALEPLVDLPIGINITRFQTLLALHRSYLTPGDSSSGWTAGAAAYYVGYLQPRTFLLKYNENGTITDAVDCALDPLSETKCTLKSFTVEKGIYQTSNFRVQPTESIVRFPNITNLCPFGEVFNATRFASVYAWNRKRISNCVADYSVLYNSASFSTFKCYGVSPTKLNDLCFTNVYADSFVIRGDEVRQIAPGQTGKIADYNYKLPDDFTGCVIAWNSNNLDSKVGGNYNYLYRLFRKSNLKPFERDISTEIYQAGSTPCNGAEGFNCYFPLQSYGFQPTNGVGYQPYRVVVLSFELLHAPATVCGPKKSTNLVKNKCVNFNFNGLTGTGVLTESNKKFLPFQQFGRDIADTTDAVRDPQTLEILDITPCSFGGVSVITPGTNTSNQVAVLYQDVNCTEVPVAIHADQLTPTWRVYSTGSNVFQTRAGCLIGAEHVNNSYECDIPIGAGICASYQTQTNSPRRARSVASQSIIAYTMSLGAENSVAYSNNSIAIPTNFTISVTTEILPVSMTKTSVDCTMYICGDSTECSNLLLQYGSFCTQLNRALTGIAVEQDKNTQEVFAQVKQIYKTPPIKDFGGFNFSQILPDPSKPSKRSFIEDLLFNKVTLADAGFIKQYGDCLGDIAARDLICAQKFNGLTVLPPLLTDEMIAQYTSALLAGTITSGWTFGAGAALQIPFAMQMAYRFNGIGVTQNVLYENQKLIANQFNSAIGKIQDSLSSTASALGKLQDVVNQNAQALNTLVKQLSSNFGAISSVLNDILSRLDPPEAEVQIDRLITGRLQSLQTYVTQQLIRAAEIRASANLAATKMSECVLGQSKRVDFCGKGYHLMSFPQSAPHGVVFLHVTYVFAQEKNFTTAPAICHDGKAHFPREGVFVSNGTHWFVTQRNFYEPQIITTDNTFVSGNCDVVIGIVNNTVYDPLQPELDSGGGGSDIDPYKEFGSSYQLLNFLPLDFFPDLNALVDTATALYEEELTGREHCSPHHTAIRQALVCWDELTKLIAWMSSNITSEQVRTIIVNHVNDTWGLKVRQSLWFHLSCLTFGQHTVQEFLVSFGVWIRTPAPYRPPNAPILSTLPEHTVIC

SEQ ID NO: 10895 - protein, 1301 aa, Artificial Sequence
  SARS-CoV-2/South Korea/SNU01/2020__EPI_ISL_411929 spike protein (1-1147)(K986P_V987P_P1069F) WhcAg construct
MFVFLVLLPLVSSQCVNLTTRTQLPPAYTNSFTRGVYYPDKVFRSSVLHSTQDLFLPFFSNVTWFHAIHVSGTNGTKRFDNPVLPFNDGVYFASTEKSNIIRGWIFGTTLDSKTQSLLIVNNATNVVIKVCEFQFCNDPFLGVYYHKNNKSWMESEFRVYSSANNCTFEYVSQPFLMDLEGKQGNFKNLREFVFKNIDGYFKIYSKHTPINLVRDLPQGFWALEPLVDLPIGINITRFQTLLALHRSYLTPGDSSSGWTAGAAAYYVGYLQPRTFLLKYNENGTITDAVDCALDPLSETKCTLKSFTVEKGIYQTSNFRVQPTESIVRFPNITNLCPFGEVFNATRFASVYAWNRKRISNCVADYSVLYNSASFSTFKCYGVSPTKLNDLCFTNVYADSFVIRGDEVRQIAPGQTGKIADYNYKLPDDFTGCVIAWNSNNLDSKVGGNYNYLYRLFRKSNLKPFERDISTEIYQAGSTPCNGVEGFNCYFPLQSYGFQPTNGVGYQPYRVVVLSFELLHAPATVCGPKKSTNLVKNKCVNFNFNGLTGTGVLTESNKKFLPFQQFGRDIADTTDAVRDPQTLEILDITPCSFGGVSVITPGTNTSNQVAVLYQDVNCTEVPVAIHADQLTPTWRVYSTGSNVFQTRAGCLIGAEHVNNSYECDIPIGAGICASYQTQTNSPRRARSVASQSIIAYTMSLGAENSVAYSNNSIAIPTNFTISVTTEILPVSMTKTSVDCTMYICGDSTECSNLLLQYGSFCTQLNRALTGIAVEQDKNTQEVFAQVKQIYKTPPIKDFGGFNFSQILPDPSKPSKRSFIEDLLFNKVTLADAGFIKQYGDCLGDIAARDLICAQKFNGLTVLPPLLTDEMIAQYTSALLAGTITSGWTFGAGAALQIPFAMQMAYRFNGIGVTQNVLYENQKLIANQFNSAIGKIQDSLSSTASALGKLQDVVNQNAQALNTLVKQLSSNFGAISSVLNDILSRLDPPEAEVQIDRLITGRLQSLQTYVTQQLIRAAEIRASANLAATKMSECVLGQSKRVDFCGKGYHLMSFPQSAPHGVVFLHVTYVFAQEKNFTTAPAICHDGKAHFPREGVFVSNGTHWFVTQRNFYEPQIITTDNTFVSGNCDVVIGIVNNTVYDPLQPELDSGGGGSDIDPYKEFGSSYQLLNFLPLDFFPDLNALVDTATALYEEELTGREHCSPHHTAIRQALVCWDELTKLIAWMSSNITSEQVRTIIVNHVNDTWGLKVRQSLWFHLSCLTFGQHTVQEFLVSFGVWIRTPAPYRPPNAPILSTLPEHTVIC

SEQ ID NO: 10896 - protein, 1301 aa, Artificial Sequence
  SARS-CoV-2/China/WF0004/2020__EPI_ISL_413694 spike protein (1-1147)(K986P_V987P_P1069F) WhcAg construct
MFVFLVLLPLVSSQCVNLTTRTQLPPAYTNSFTRGVYYPDKVFRSSVLHSTQDLFLPFFSNVTWFHAIHVSGTNGTKRFDNPVLPFNDGVYFASTEKSNIIRGWIFGTTLDSKTQSLLIVNNATNVVIKVCEFQFCNDPFLGVYYHKNNKSWTESEFRVYSSANNCTFEYVSQPFLMDLEGKQGNFKNLREFVFKNIDGYFKIYSKHTPINLVRDLPQGFSALEPLVDLPIGINITRFQTLLALHRSYLTPGDSSSGWTAGAAAYYVGYLQPRTFLLKYNENGTITDAVDCALDPLSETKCTLKSFTVEKGIYQTSNFRVQPTESIVRFPNITNLCPFGEVFNATRFASVYAWNRKRISNCVADYSVLYNSASFSTFKCYGVSPTKLNDLCFTNVYADSFVIRGDEVRQIAPGQTGKIADYNYKLPDDFTGCVIAWNSNNLDSKVGGNYNYLYRLFRKSNLKPFERDISTEIYQAGSTPCNGVEGFNCYFPLQSYGFQPTNGVGYQPYRVVVLSFELLHAPATVCGPKKSTNLVKNKCVNFNFNGLTGTGVLTESNKKFLPFQQFGRDIADTTDAVRDPQTLEILDITPCSFGGVSVITPGTNTSNQVAVLYQDVNCTEVPVAIHADQLTPTWRVYSTGSNVFQTRAGCLIGAEHVNNSYECDIPIGAGICASYQTQTNSPRRARSVASQSIIAYTMSLGAENSVAYSNNSIAIPTNFTISVTTEILPVSMTKTSVDCTMYICGDSTECSNLLLQYGSFCTQLNRALTGIAVEQDKNTQEVFAQVKQIYKTPPIKDFGGFNFSQILPDPSKPSKRSFIEDLLFNKVTLADAGFIKQYGDCLGDIAARDLICAQKFNGLTVLPPLLTDEMIAQYTSALLAGTITSGWTFGAGAALQIPFAMQMAYRFNGIGVTQNVLYENQKLIANQFNSAIGKIQDSLSSTASALGKLQDVVNQNAQALNTLVKQLSSNFGAISSVLNDILSRLDPPEAEVQIDRLITGRLQSLQTYVTQQLIRAAEIRASANLAATKMSECVLGQSKRFDFCGKGYHLMSFPQSAPHGVVFLHVTYVFAQEKNFTTAPAICHDGKAHFPREGVFVSNGTHWFVTQRNFYEPQIITTDNTFVSGNCDVVIGIVNNTVYDPLQPELDSGGGGSDIDPYKEFGSSYQLLNFLPLDFFPDLNALVDTATALYEEELTGREHCSPHHTAIRQALVCWDELTKLIAWMSSNITSEQVRTIIVNHVNDTWGLKVRQSLWFHLSCLTFGQHTVQEFLVSFGVWIRTPAPYRPPNAPILSTLPEHTVIC

SEQ ID NO: 10897 - protein, 1301 aa, Artificial Sequence
  SARS-CoV-2/China/WF0028/2020__EPI_ISL_413791 spike protein (1-1147)(K986P_V987P_P1069F) WhcAg construct
MFVFLVLLPLVSSQCVNLTTRTQLPPAYTNSFTRGVYYPDKVFRSSVLHSTQDLFLPFFSNVTWFHAIHVSGTNGTKRFDNPVLPFNDGVYFASTEKSNIIRGWIFGTTLDSKTQSLLIVNNATNVVIKVCEFQFCNDPFLGVYYHKNNKSWMESEFRVYSSANNCTFEYVSQPFLMDLEGKQGNFKNLREFVFKNIDGYFKIYSKHTPINLVRDLPQGFSALEPLVDLPIGINITRFQTLLALHRSYLTPGDSSSGWTAGAAAYYVGYLQPRTFLLKYNENGTITDAVDCALDPLSETKCTLKSFTVEKGIYQTSNFRVQPTESIVRFPNITNLCPFGEVFNATRFASVYAWNRKRISNCVADYSVLYNSASFSTFKCYGVSPTKLNDLCFTNVYADSFVIRGDEVRQIAPGQTGKIADYNYKLPDDFTGCVIAWNSNNLDSKVGGNYNYLYRLFRKSNLKPFERDISTEIYQAGSTPCNGVEGFNCYFPLQSYGFQPTNGVGYQPYRVVVLSFELLHAPATVCGPKKSTNLVKNKCVNFNFNGLTGTGVLTESNKKFLPFQQFGRDIADTTDAVRDPQTLEILDITPCSFGGVSVITPGTNTSNQVAVLYQDVNCTEVPVAIHADQLTPTWRVYSTGSNVFQTRAGCLIGAEHVNNSYECDIPIGAGICASYQTQTNSPRRARSVASQSIIAYTMSLGAENSVAYSNNSIAIPTNFTISVTTEILPVSMTKTSVDCTMYICGDSTECSNLLLQYGSFCTQLNRALTGIAVEQDKNTQEVFAQVKQIYKTPPIKDFGGFNFSQILPDPSKPSKRSFIEDLLFNKVTLADAGFIKQYGDCLGDIAARDLICAQKFNGLTVLPPLLTDEMIAQYTSALLAGTITSGWTFGAGAALQIPFAMQMAYRFNGIGVTQNVLYENQKLIANQFNSAIGKIQDSLSSTASALGKLQDVVNQNAQALNTLVKQLSSNFGAISSVLNDILSRLDPPEAEVQIDRLITGRLQSLQTYVTQQLIRAAEIRASANLAATKMSECVLGQSKRVDFCGKGYHLMSFPQSAPHGVVFLHVTYVFAQEKNFTTAPAICHDGKAHFPREGVFVSNGTHWFVTQRNFYEPQIITTDNTFVSGNCDVVIGIVNNTVYDPLQPELESGGGGSDIDPYKEFGSSYQLLNFLPLDFFPDLNALVDTATALYEEELTGREHCSPHHTAIRQALVCWDELTKLIAWMSSNITSEQVRTIIVNHVNDTWGLKVRQSLWFHLSCLTFGQHTVQEFLVSFGVWIRTPAPYRPPNAPILSTLPEHTVIC

SEQ ID NO: 10898 - protein, 1301 aa, Artificial Sequence
  SARS-CoV-2/2019-nCoV/USA-CruiseA-18/2020__MT159716.1 spike protein (1-1147)(K986P_V987P_P1069F) WhcAg construct
MFVFLVLLPLVSSQCVNLTTRTQLPPAYTNSFTRGVYYPDKVFRSSVLHSTQDLFLPFFSNVTWFHAIHVSGTNGTKRFDNPVLPFNDGVYFASTEKSNIIRGWIFGTTLDSKTQSLLIVNNATNVVIKVCEFQFCNDPFLGVYYHKNNKSWMESELRVYSSANNCTFEYVSQPFLMDLEGKQGNFKNLREFVFKNIDGYFKIYSKHTPINLVRDLPQGFSALEPLVDLPIGINITRFQTLLALHRSYLTPGDSSSGWTAGAAAYYVGYLQPRTFLLKYNENGTITDAVDCALDPLSETKCTLKSFTVEKGIYQTSNFRVQPTESIVRFPNITNLCPFGEVFNATRFASVYAWNRKRISNCVADYSVLYNSASFSTFKCYGVSPTKLNDLCFTNVYADSFVIRGDEVRQIAPGQTGKIADYNYKLPDDFTGCVIAWNSNNLDSKVGGNYNYLYRLFRKSNLKPFERDISTEIYQAGSTPCNGVEGFNCYFPLQSYGFQPTNGVGYQPYRVVVLSFELLHAPATVCGPKKSTNLVKNKCVNFNFNGLTGTGVLTESNKKFLPFQQFGRDIADTTDAVRDPQTLEILDITPCSFGGVSVITPGTNTSNQVAVLYQDVNCTEVPVAIHADQLTPTWRVYSTGSNVFQTRAGCLIGAEHVNNSYECDIPIGAGICASYQTQTNSPRRARSVASQSIIAYTMSLGAENSVAYSNNSIAIPTNFTISVTTEILPVSMTKTSVDCTMYICGDSTECSNLLLQYGSFCTQLNRALTGIAVEQDKNTQEVFAQVKQIYKTPPIKDFGGFNFSQILPDPSKPSKRSFIEDLLFNKVTLADAGFIKQYGDCLGDIAARDLICAQKFNGLTVLPPLLTDEMIAQYTSALLAGTITSGWTFGAGAALQIPFAMQMAYRFNGIGVTQNVLYENQKLIANQFNSAIGKIQDSLSSTASALGKLQDVVNQNAQALNTLVKQLSSNFGAISSVLNDILSRLDPPEAEVQIDRLITGRLQSLQTYVTQQLIRAAEIRASANLAATKMSECVLGQSKRVDFCGKGYHLMSFPQSAPHGVVFLHVTYVFAQEKNFTTAPAICHDGKAHFPREGVFVSNGTHWFVTQRNFYEPQIITTDNTFVSGNCDVVIGIVNNTVYDPLQPELDSGGGGSDIDPYKEFGSSYQLLNFLPLDFFPDLNALVDTATALYEEELTGREHCSPHHTAIRQALVCWDELTKLIAWMSSNITSEQVRTIIVNHVNDTWGLKVRQSLWFHLSCLTFGQHTVQEFLVSFGVWIRTPAPYRPPNAPILSTLPEHTVIC

SEQ ID NO: 10899 - protein, 1301 aa, Artificial Sequence
  SARS-CoV-2/SARS-CoV-2/Yunnan-01/human/2020/CHN__MT049951.1 spike protein (1-1147)(K986P_V987P_P1069F) WhcAg construct
MFVFLVLLPLVSSQCVNLTTRTQLPPANTNSFTRGVYYPDKVFRSSVLHSTQDLFLPFFSNVTWFHAIHVSGTNGTKRFDNPVLPFNDGVYFASTEKSNIIRGWIFGTTLDSKTQSLLIVNNATNVVIKVCEFQFCNDPFLGVYYHKNNKSWMESEFRVYSSANNCTFEYVSQPFLMDLEGKQGNFKNLREFVFKNIDGYFKIYSKHTPINLVRDLPQGFSALEPLVDLPIGINITRFQTLLALHRSYLTPGDSSSGWTAGAAAYYVGYLQPRTFLLKYNENGTITDAVDCALDPLSETKCTLKSFTVEKGIYQTSNFRVQPTESIVRFPNITNLCPFGEVFNATRFASVYAWNRKRISNCVADYSVLYNSASFSTFKCYGVSPTKLNDLCFTNVYADSFVIRGDEVRQIAPGQTGKIADYNYKLPDDFTGCVIAWNSNNLDSKVGGNYNYLYRLFRKSNLKPFERDISTEIYQAGSTPCNGVEGFNCYFPLQSYGFQPTNGVGYQPYRVVVLSFELLHAPATVCGPKKSTNLVKNKCVNFNFNGLTGTGVLTESNKKFLPFQQFGRDIADTTDAVRDPQTLEILDITPCSFGGVSVITPGTNTSNQVAVLYQDVNCTEVPVAIHADQLTPTWRVYSTGSNVFQTRAGCLIGAEHVNNSYECDIPIGAGICASYQTQTNSPRRARSVASQSIIAYTMSLGAENSVAYSNNSIAIPTNFTISVTTEILPVSMTKTSVDCTMYICGDSTECSNLLLQYGSFCTQLNRALTGIAVEQDKNTQEVFAQVKQIYKTPPIKDFGGFNFSQILPDPSKPSKRSFIEDLLFNKVTLADAGFIKQYGDCLGDIAARDLICAQKFNGLTVLPPLLTDEMIAQYTSALLAGTITSGWTFGAGAALQIPFAMQMAYRFNGIGVTQNVLYENQKLIANQFNSAIGKIQDSLSSTASALGKLQDVVNQNAQALNTLVKQLSSNFGAISSVLNDILSRLDPPEAEVQIDRLITGRLQSLQTYVTQQLIRAAEIRASANLAATKMSECVLGQSKRVDFCGKGYHLMSFPQSAPHGVVFLHVTYVFAQEKNFTTAPAICHDGKAHFPREGVFVSNGTHWFVTQRNFYEPQIITTDNTFVSGNCDVVIGIVNNTVYDPLQPELDSGGGGSDIDPYKEFGSSYQLLNFLPLDFFPDLNALVDTATALYEEELTGREHCSPHHTAIRQALVCWDELTKLIAWMSSNITSEQVRTIIVNHVNDTWGLKVRQSLWFHLSCLTFGQHTVQEFLVSFGVWIRTPAPYRPPNAPILSTLPEHTVIC

SEQ ID NO: 10900 - protein, 1301 aa, Artificial Sequence
  SARS-CoV-2/USA/WA-UW292/2020__EPI_ISL_418077 spike protein (1-1147)(K986P_V987P_P1069F) WhcAg construct
MFVFLVLLPLVSSQCVNLTTRTQLPPAYTNSFTRGVYYPDKVFRSSVLHSTQDLFLPFFSNVTWFHAIHVSGTNGTKRFDNPVLPFNDGVYFASTEKSNIIRGWIFGTTLDSKTQSLLIVNNATNVVIKVCEFQFCNDPFLGVYYHKNNKSWMESEFRVYSSANNCTFEYVSQPFLMDLEGKQGNFKNLREFVFKNIDGYFKIYSKHTPINLVRDLPQGFSALEPLVDLPIGINITRFQTLLALHRSYLTPGDSSSGWTAGAAAYYVGYLQPRTFLLKYNENGTITDAVDCALDPLSETKCTLKSFTVEKGIYQTSNFRVQPTESIVRFPNITNLCPFGEVFNATRFASVYAWNRKRISNCVADYSVLYNSASFSTFKCYGVSPTKLNDLCFTNVYADSFVIRGDEVRQIAPGQTGKIADYNYKLPDDFTGCVIAWNSNNLDSKVGGNYNYLYRLFRKSNLKPFERDISTEIYQASSTPCNGVEGFNCYFPLQSYGFQPTNGVGYQPYRVVVLSFELLHAPATVCGPKKSTNLVKNKCVNFNFNGLTGTGVLTESNKKFLPFQQFGRDIADTTDAVRDPQTLEILDITPCSFGGVSVITPGTNTSNQVAVLYQDVNCTEVPVAIHADQLTPTWRVYSTGSNVFQTRAGCLIGAEHVNNSYECDIPIGAGICASYQTQTNSPRRARSVASQSIIAYTMSLGAENSVAYSNNSIAIPTNFTISVTTEILPVSMTKTSVDCTMYICGDSTECSNLLLQYGSFCTQLNRALTGIAVEQDKNTQEVFAQVKQIYKTPPIKDFGGFNFSQILPDPSKPSKRSFIEDLLFNKVTLADAGFIKQYGDCLGDIAARDLICAQKFNGLTVLPPLLTDEMIAQYTSALLAGTITSGWTFGAGAALQIPFAMQMAYRFNGIGVTQNVLYENQKLIANQFNSAIGKIQDSLSSTASALGKLQDVVNQNAQALNTLVKQLSSNFGAISSVLNDILSRLDPPEAEVQIDRLITGRLQSLQTYVTQQLIRAAEIRASANLAATKMSECVLGQSKRVDFCGKGYHLMSFPQSAPHGVVFLHVTYVFAQEKNFTTAPAICHDGKAHFPREGVFVSNGTHWFVTQRNFYEPQIITTDNTFVSGNCDVVIGIVNNTVYDPLQPELDSGGGGSDIDPYKEFGSSYQLLNFLPLDFFPDLNALVDTATALYEEELTGREHCSPHHTAIRQALVCWDELTKLIAWMSSNITSEQVRTIIVNHVNDTWGLKVRQSLWFHLSCLTFGQHTVQEFLVSFGVWIRTPAPYRPPNAPILSTLPEHTVIC

SEQ ID NO: 10901 - protein, 1301 aa, Artificial Sequence
  SARS-CoV-2/Iceland/192/2020__EPI_ISL_417819 spike protein (1-1147)(K986P_V987P_P1069F) WhcAg construct
MFVFFVLLPLVSSQCVNLTTRTQLPPAYTNSFTRGVYYPDKVFRSSVLHSTQDLFLPFFSNVTWFHAIHVSGTNGTKRFDNPVLPFNDGVYFASTEKSNIIRGWIFGTTLDSKTQSLLIVNNATNVVIKVCEFQFCNDPFLGVYYHKNNKSWMESEFRVYSSANNCTFEYVSQPFLMDLEGKQGNFKNLREFVFKNIDGYFKIYSKHTPINLVRDLPQGFSALEPLVDLPIGINITRFQTLLALHRSYLTPGDSSSGWTAGAAAYYVGYLQPRTFLLKYNENGTITDAVDCALDPLSETKCTLKSFTVEKGIYQTSNFRVQPTESIVRFPNITNLCPFGEVFNATRFASVYAWNRKRISNCVADYSVLYNSASFSTFKCYGVSPTKLNDLCFTNVYADSFVIRGDEVRQIAPGQTGKIADYNYKLPDDFTGCVIAWNSNNLDSKVGGNYNYLYRLFRKSNLKPFERDISTEIYQAGSTPCNGVEGFNCYFPLQSYGFQPTNGVGYQPYRVVVLSFELLHAPATVCGPKKSTNLVKNKCVNFNFNGLTGTGVLTESNKKFLPFQQFGRDIADTTDAVRDPQTLEILDITPCSFGGVSVITPGTNTSNQVAVLYQGVNCTEVPVAIHADQLTPTWRVYSTGSNVFQTRAGCLIGAEHVNNSYECDIPIGAGICASYQTQTNSPRRARSVASQSIIAYTMSLGAENSVAYSNNSIAIPTNFTISVTTEILPVSMTKTSVDCTMYICGDSTECSNLLLQYGSFCTQLNRALTGIAVEQDKNTQEVFAQVKQIYKTPPIKDFGGFNFSQILPDPSKPSKRSFIEDLLFNKVTLADAGFIKQYGDCLGDIAARDLICAQKFNGLTVLPPLLTDEMIAQYTSALLAGTITSGWTFGAGAALQIPFAMQMAYRFNGIGVTQNVLYENQKLIANQFNSAIGKIQDSLSSTASALGKLQDVVNQNAQALNTLVKQLSSNFGAISSVLNDILSRLDPPEAEVQIDRLITGRLQSLQTYVTQQLIRAAEIRASANLAATKMSECVLGQSKRVDFCGKGYHLMSFPQSAPHGVVFLHVTYVFAQEKNFTTAPAICHDGKAHFPREGVFVSNGTHWFVTQRNFYEPQIITTDNTFVSGNCDVVIGIVNNTVYDPLQPELDSGGGGSDIDPYKEFGSSYQLLNFLPLDFFPDLNALVDTATALYEEELTGREHCSPHHTAIRQALVCWDELTKLIAWMSSNITSEQVRTIIVNHVNDTWGLKVRQSLWFHLSCLTFGQHTVQEFLVSFGVWIRTPAPYRPPNAPILSTLPEHTVIC

SEQ ID NO: 10902 - protein, 1301 aa, Artificial Sequence
  SARS-CoV-2/Belgium/ULG-6939/2020__EPI_ISL_417020 spike protein (1-1147)(K986P_V987P_P1069F) WhcAg construct
MFVFLVLLPLVSSQCVNLTTRTQLPPAYTNSFTRGVYYPDKVFRSSVLHSTQDLFLPFFSNVTWFHAIHVSGTNGTKRFDNPVLPFNDGVYFASTEKSNIIRGWIFGTTLDSKTQSLLIVNNATNVVIKVCEFQFCNDPFLGVYYHKNNKSWMESEFRVYSSANNCTFEYVSQPFLMDLEGKQGNFKNLREFVFKNIDGYFKIYSKHTPINLVRDLPQGFSALEPLVDLPIGINITRFQTLLALHRSYLTPGDSSSGWTAGAAAYYVGYLQPRTFLLKYNENGTITDAVDCALDPLSETKCTLKSFTVEKGIYQTSNFRVQPTESIVRFPNITNLCPFGEVFNATRFASVYAWNRKRISNCVADYSVLYNSASFSTFKCYGVSPTKLNDLCFTNVYADSFVIRGDEVRQIAPGQTGKIADYNYKLPDDFTGCVIAWNSNNLDSKVGGNYNYLYRLFRKSNLKPFERDISTEIYQAGSTPCNGVEGFNCYFPLQSYGFQPTNGVGYQPYRVVVLSFELLHAPATVCGPKKSTNLVKNKCVNFNFNGLTGTGVLTESNKKFLPFQQFGRDIADTTDAVRDPQTLEILDITPCSFGGVSVITPGTNTSNQVAVLYQGVNCTEVPVAIHADQLTPTWRVYSTGSNVFQTRAGCLIGAEHVNNSYECDIPIGAGICASYQTQTNSPRRARSVASQSIIAYTMSLGAENSVVYSNNSIAIPTNFTISVTTEILPVSMTKTSVDCTMYICGDSTECSNLLLQYGSFCTQLNRALTGIAVEQDKNTQEVFAQVKQIYKTPPIKDFGGFNFSQILPDPSKPSKRSFIEDLLFNKVTLADAGFIKQYGDCLGDIAARDLICAQKFNGLTVLPPLLTDEMIAQYTSALLAGTITSGWTFGAGAALQIPFAMQMAYRFNGIGVTQNVLYENQKLIANQFNSAIGKIQDSLSSTASALGKLQDVVNQNAQALNTLVKQLSSNFGAISSVLNDILSRLDPPEAEVQIDRLITGRLQSLQTYVTQQLIRAAEIRASANLAATKMSECVLGQSKRVDFCGKGYHLMSFPQSAPHGVVFLHVTYVFAQEKNFTTAPAICHDGKAHFPREGVFVSNGTHWFVTQRNFYEPQIITTDNTFVSGNCDVVIGIVNNTVYDPLQPELDSGGGGSDIDPYKEFGSSYQLLNFLPLDFFPDLNALVDTATALYEEELTGREHCSPHHTAIRQALVCWDELTKLIAWMSSNITSEQVRTIIVNHVNDTWGLKVRQSLWFHLSCLTFGQHTVQEFLVSFGVWIRTPAPYRPPNAPILSTLPEHTVIC

SEQ ID NO: 10903 - protein, 1301 aa, Artificial Sequence
  SARS-CoV-2/France/HF2496/2020__EPI_ISL_418231 spike protein (1-1147)(K986P_V987P_P1069F) WhcAg construct
MFVFLVLLPLVSSQCVNLTTRTQLPPAYTNSFTRGVYYPDKVFRSSVLHSTQDLFLPFFSNVTWFHAIHVSGTNGTKRFDNPVLPFNDGVYFASTEKSNIIRGWIFGTTLDSKTQSLLIVNNATNVVIKVCEFQFCNDPFLGVYYHKNNKSWMESEFRVYSSANNCTFEYVSQPFLMDLEGKQGNFKNLREFVFKNIDGYFKIYSKHTPINLVRDLPQGFSALEPLVDLPIGINITRFQTLLALHRSYLTPGDSSSGWTAGAAAYYVGYLQPRTFLLKYNENGTITDAVDCALDPLSETKCTLKSFTVEKGIYQTSNFRVQPTESIVRFPNITNLCPFGEVFNATRFASVYAWNRKRISNCVADYSVLYNSASFSTFKCYGVSPTKLNDLCFTNVYADSFVIRGDEVRQIAPGQTGKIADYNYKLPDDFTGCVIAWNSNNLDSKVGGNYNYLYRLFRKSNLKPFERDISTEIYQAGSTPCNGVEGFNCYFPLQSYGFQPTNGVGYQPYRVVVLSFELLHAPATVCGPKKSTNLVKNKCVNFNFNGLTGTGVLTESNKKFLPFQQFGRDIADTTDAVRDPQTLEILDITPCSFGGVSVITPGTNTSNQVAVLYQGVNCTEVPVAIHADQLTPTWRVYSTGSNVFQTRAGCLIGAEHVNNSYECDIPIGAGICASYQTQTNSPRRARSVASQSIIAYTMSLGAENSVAYSNNSIAIPTNFTISVTTEILPVSMTKTSVDCTMYICGDSTECSNLLLQYGSFCTQLNRALTGIAVEQDKNTQEVFAQVKQIYKTPPIKDFGGFNFSQILPDPSKPSKRSFIEDLLFNKVTLADAGFIKQYGDCLGDIVARDLICAQKFNGLTVLPPLLTDEMIAQYTSALLAGTITSGWTFGAGAALQIPFAMQMAYRFNGIGVTQNVLYENQKLIANQFNSAIGKIQDSLSSTASALGKLQDVVNQNAQALNTLVKQLSSNFGAISSVLNDILSRLDPPEAEVQIDRLITGRLQSLQTYVTQQLIRAAEIRASANLAATKMSECVLGQSKRVDFCGKGYHLMSFPQSAPHGVVFLHVTYVFAQEKNFTTAPAICHDGKAHFPREGVFVSNGTHWFVTQRNFYEPQIITTDNTFVSGNCDVVIGIVNNTVYDPLQPELDSGGGGSDIDPYKEFGSSYQLLNFLPLDFFPDLNALVDTATALYEEELTGREHCSPHHTAIRQALVCWDELTKLIAWMSSNITSEQVRTIIVNHVNDTWGLKVRQSLWFHLSCLTFGQHTVQEFLVSFGVWIRTPAPYRPPNAPILSTLPEHTVIC

SEQ ID NO: 10904 - protein, 1301 aa, Artificial Sequence
  SARS-CoV-2/USA/WA-UW291/2020__EPI_ISL_418076 spike protein (1-1147)(K986P_V987P_P1069F) WhcAg construct
MFVFLVLLPLVSSQCVNLTTRTQLPPAYTNSFTRGVYYPDKVFRSSVLHSTQDLFLPFFSNVTWFHAIHVSGTNGTKRFDNPVLPFNDGVYFASTEKSNIIRGWIFGTTLDSKTQSLLIVNNATNVVIKVCEFQFCNDPFLGVYYHKNNKSWMESEFRVYSSANNCTFEYVSQPFLMDLEGKQGNFKNLREFVFKNIDGYFKIYSKHTPINLVRDLPQGFSALEPLVDLPIGINITRFQTLLALHRSYLTPGDSSSGWTAGAAAYYVGYLQPRTFLLKYNENGTITDAVDCALDPLSETKCTLKSFTVEKGIYQTSNFRVQPTESIVRFPNITNLCPFGEVFNATRFASVYAWNRKRISNCVADYSVLYNSASFSTFKCYGVSPTKLNDLCFTNVYADSFVIRGDEVRQIAPGQTGKIADYNYKLPDDFTGCVIAWNSNNLDSKVGGNYNYLYRLFRKSNLKPFERDISTEIYQAGSTPCNGVEGFNCYFPLQSYGFQPTNGVGYQPYRVVVLSFELLHAPATVCGPKKSTNLVKNKCVNFNFNGLTGTGVLTESNKKFLPFQQFGRDIADTTDAVRDPQTLEILDITPCSFGGVSVITPGTNTSNQVAVLYQGVNCTEVPVAIHADQLTPTWRVYSTGSNVFQTRAGCLIGAEHVNNSYECDIPIGAGICASYQTQTNSPRRARSVASQSIIAYTMSLGAENSVAYSNNSIAIPTNFTISVTTEILPVSMTKTSVDCTMYICGDSTECSNLLLQYGSFCTQLNRALTGIAVEQDKNTQEVFAQVKQIYKTPPIKDFGGFNFSQILPDPSKPSKRSFIEDLLFNKVTLADAGFIKQYGDCLGDIAARDLICAQKFNGLTVLPPLLTDEMIAQYTSALLAGTITSGWTFGAGAALQIPFAMQMAYRFNGIGVTQNVLYENQKLIANQFNSAIGKIQYSLSSTASALGKLQDVVNQNAQALNTLVKQLSSNFGAISSVLNDILSRLDPPEAEVQIDRLITGRLQSLQTYVTQQLIRAAEIRASANLAATKMSECVLGQSKRVDFCGKGYHLMSFPQSAPHGVVFLHVTYVFAQEKNFTTAPAICHDGKAHFPREGVFVSNGTHWFVTQRNFYEPQIITTDNTFVSGNCDVVIGIVNNTVYDPLQPELDSGGGGSDIDPYKEFGSSYQLLNFLPLDFFPDLNALVDTATALYEEELTGREHCSPHHTAIRQALVCWDELTKLIAWMSSNITSEQVRTIIVNHVNDTWGLKVRQSLWFHLSCLTFGQHTVQEFLVSFGVWIRTPAPYRPPNAPILSTLPEHTVIC

SEQ ID NO: 10905 - protein, 1301 aa, Artificial Sequence; identical to SEQ ID NO: 10868
  SARS-CoV-2/Portugal/PT0034/2020__EPI_ISL_418019 spike protein (1-1147)(K986P_V987P_P1069F) WhcAg construct

SEQ ID NO: 10906 - protein, 1301 aa, Artificial Sequence; identical to SEQ ID NO: 10860
  SARS-CoV-2/Iceland/202/2020__EPI_ISL_417750 spike protein (1-1147)(K986P_V987P_P1069F) WhcAg construct

SEQ ID NO: 10907 - protein, 1301 aa, Artificial Sequence
  SARS-CoV-2/USA/WA-UW261/2020__EPI_ISL_418046 spike protein (1-1147)(K986P_V987P_P1069F) WhcAg construct
MFVFLVLLPLVSSQCVNLTTRTQLPPAYTNSFTRGVYYPDKVFRSSVLHSTQDLFLPFFSNVTWFHAIHVSGTNGTKRFDNPVLPFNDGVYFASTEKSNIIRGWIFGTTLDSKTQSLLIVNNATNVVIKVCEFQFCNDPFLGVYYHKNNKSWMESEFRVYSSANNCTFEYVSQPFLMDLEGKQGNFKNLREFVFKNIDGYFKIYSKHTPINLVRDLPQGFSALEPLVDLPIGINITRFQTLLALHRSYLTPGDSSSGWTAGAAAYYVGYLQPRTFLLKYNENGTITDAVDCALDPLSETKCTLKSFTVEKGIYQTSNFRVQPTESIVRFPNITNLCPFGEVFNATRFTSVYAWNRKRISNCVADYSVLYNSASFSTFKCYGVSPTKLNDLCFTNVYADSFVIRGDEVRQIAPGQTGKIADYNYKLPDDFTGCVIAWNSNNLDSKVGGNYNYLYRLFRKSNLKPFERDISTEIYQAGSTPCNGVEGFNCYFPLQSYGFQPTNGVGYQPYRVVVLSFELLHAPATVCGPKKSTNLVKNKCVNFNFNGLTGTGVLTESNKKFLPFQQFGRDIADTTDAVRDPQTLEILDITPCSFGGVSVITPGTNTSNQVAVLYQDVNCTEVPVAIHADQLTPTWRVYSTGSNVFQTRAGCLIGAEHVNNSYECDIPIGAGICASYQTQTNSPRRARSVASQSIIAYTMSLGAENSVAYSNNSIAIPTNFTISVTTEILPVSMTKTSVDCTMYICGDSTECSNLLLQYGSFCTQLNRALTGIAVEQDKNTQEVFAQVKQIYKTPPIKDFGGFNFSQILPDPSKPSKRSFIEDLLFNKVTLADAGFIKQYGDCLGDIAARDLICAQKFNGLTVLPPLLTDEMIAQYTSALLAGTITSGWTFGAGAALQIPFAMQMAYRFNGIGVTQNVLYENQKLIANQFNSAIGKIQDSLSSTASALGKLQDVVNQNAQALNTLVKQLSSNFGAISSVLNDILSRLDPPEAEVQIDRLITGRLQSLQTYVTQQLIRAAEIRASANLAATKMSECVLGQSKRVDFCGKGYHLMSFPQSAPHGVVFLHVTYVFAQEKNFTTAPAICHDGKAHFPREGVFVSNGTHWFVTQRNFYEPQIITTDNTFVSGNCDVVIGIVNNTVYDPLQPELDSGGGGSDIDPYKEFGSSYQLLNFLPLDFFPDLNALVDTATALYEEELTGREHCSPHHTAIRQALVCWDELTKLIAWMSSNITSEQVRTIIVNHVNDTWGLKVRQSLWFHLSCLTFGQHTVQEFLVSFGVWIRTPAPYRPPNAPILSTLPEHTVIC

SEQ ID NO: 10908 - protein, 1301 aa, Artificial Sequence
  SARS-CoV-2/Portugal/PT0035/2020__EPI_ISL_418020 spike protein (1-1147)(K986P_V987P_P1069F) WhcAg construct
MFVFLVLLPLVSSQCVNLTTRTQLPPAYTNSFTRGVYYPDKVFRSSVLHSTQDLFLPFFSNVTWFHAIHVSGTNGTKRFDNPVLPFNDGVYFASTEKSNIIRGWIFGTTLDSKTQSLLIVNNATNVVIKVCEFQFCNDPFLGVYYHKNNKSWMESEFRVYSSANNCTFEYVSQPFLMDLEGKQGNFKNLREFVFKNIDGYFKIYSKHTPINLVRDLPQGFSALEPLVDLPIGINITRFQTLLALHRSYLTPGDSSSGWTAGAAAYYVGYLQPRTFLLKYNENGTITDAVDCALDPLSETKCTLKSFTVEKGIYQTSNFRVQPTESIVRFPNITNLCPFGEVFNATRFASVYAWNRKRISNCVADYSVLYNSASFSTFKCYGVSPTKLNDLCFTNVYADSFVIRGDEVRQIAPGQTGKIADYNYKLPDDFTGCVIAWNSNNLDSKVGGNYNYLYRLFRKSNLKPFERDISTEIYQAGSTPCNGVEGFNCYFPLQSYGFQPTNGVGYQPYRVVVLSFELLHAPATVCGPKKSTNLVKNKCVNFNFNGLTGTGVLTESNKKFLPFQQFGRDIADTTDAVRDPQTLEILDITPCSFGGVSVITPGTNTSNQVAVLYQDVNCTEVPVAIHADQLTPTWRVYSTGSNVFQTRAGCLIGAEHVNNSYECDIPIGAGICASYQTQTNSPRRARSVASQSIIAYTMSLGAENSVAYSNNSIAIPTNFTISVTTEILPVSMTKTSVDCTMYICGDSTECSNLLLQYGSFCTQLNRALTGIAVEQDKNTQEVFAQVKQIYKTPPIKDFGGFNFSQILPDPSKPSKRSFIEDLLFNKVTLADAGFIKQYGDCLGDISARDLICAQKFNGLTVLPPLLTDEMIAQYTSALLAGTITSGWTFGAGAALQIPFAMQMAYRFNGIGVTQNVLYENQKLIANQFNSAIGKIQDSLSSTASALGKLQDVVNQNAQALNTLVKQLSSNFGAISSVLNDILSRLDPPEAEVQIDRLITGRLQSLQTYVTQQLIRAAEIRASANLAATKMSECVLGQSKRVDFCGKGYHLMSFPQSAPHGVVFLHVTYVFAQEKNFTTAPAICHDGKAHFPREGVFVSNGTHWFVTQRNFYEPQIITTDNTFVSGNCDVVIGIVNNTVYDPLQPELDSGGGGSDIDPYKEFGSSYQLLNFLPLDFFPDLNALVDTATALYEEELTGREHCSPHHTAIRQALVCWDELTKLIAWMSSNITSEQVRTIIVNHVNDTWGLKVRQSLWFHLSCLTFGQHTVQEFLVSFGVWIRTPAPYRPPNAPILSTLPEHTVIC

SEQ ID NO: 10909 - protein, 1301 aa, Artificial Sequence
  SARS-CoV-2/USA/NY-NYUMC7/2020__EPI_ISL_418192 spike protein (1-1147)(K986P_V987P_P1069F) WhcAg construct
MFVFLVLLPLVSSQCVNLTTRTQLPPAYTNSFTRGVYYPDKVFRSSVLHSTQDLFLPFFSNVTWFHAIHVSGTNGTKRFDNPVLPFNDGVYFASTEKSNIIRGWIFGTTLDSKTQSLLIVNNATNVVIKVCEFQFCNDPFLGVYHHKNNKSWMESEFRVYSSANNCTFEYVSQPFLMDLEGKQGNFKNLREFVFKNIDGYFKIYSKHTPINLVRDLPQGFSALEPLVDLPIGINITRFQTLLALHRSYLTPGDSSSGWTAGAAAYYVGYLQPRTFLLKYNENGTITDAVDCALDPLSETKCTLKSFTVEKGIYQTSNFRVQPTESIVRFPNITNLCPFGEVFNATRFASVYAWNRKRISNCVADYSVLYNSASFSTFKCYGVSPTKLNDLCFTNVYADSFVIRGDEVRQIAPGQTGKIADYNYKLPDDFTGCVIAWNSNNLDSKVGGNYNYLYRLFRKSNLKPFERDISTEIYQAGSTPCNGVEGFNCYFPLQSYGFQPTNGVGYQPYRVVVLSFELLHAPATVCGPKKSTNLVKNKCVNFNFNGLTGTGVLTESNKKFLPFQQFGRDIADTTDAVRDPQTLEILDITPCSFGGVSVITPGTNTSNQVAVLYQGVNCTEVPVAIHADQLTPTWRVYSTGSNVFQTRAGCLIGAEHVNNSYECDIPIGAGICASYQTQTNSPRRARSVASQSIIAYTMSLGAENSVAYSNNSIAIPTNFTISVTTEILPVSMTKTSVDCTMYICGDSTECSNLLLQYGSFCTQLNRALTGIAVEQDKNTQEVFAQVKQIYKTPPIKDFGGFNFSQILPDPSKPSKRSFIEDLLFNKVTLADAGFIKQYGDCLGDIAARDLICAQKFNGLTVLPPLLTDEMIAQYTSALLAGTITSGWTFGAGAALQIPFAMQMAYRFNGIGVTQNVLYENQKLIANQFNSAIGKIQDSLSSTASALGKLQDVVNQNAQALNTLVKQLSSNFGAISSVLNDILSRLDPPEAEVQIDRLITGRLQSLQTYVTQQLIRAAEIRASANLAATKMSECVLGQSKRVDFCGKGYHLMSFPQSAPHGVVFLHVTYVFAQEKNFTTAPAICHDGKAHFPREGVFVSNGTHWFVTQRNFYEPQIITTDNTFVSGNCDVVIGIVNNTVYDPLQPELDSGGGGSDIDPYKEFGSSYQLLNFLPLDFFPDLNALVDTATALYEEELTGREHCSPHHTAIRQALVCWDELTKLIAWMSSNITSEQVRTIIVNHVNDTWGLKVRQSLWFHLSCLTFGQHTVQEFLVSFGVWIRTPAPYRPPNAPILSTLPEHTVIC

SEQ ID NO: 10910 - protein, 1301 aa, Artificial Sequence
  SARS-CoV-2/Iceland/189/2020__EPI_ISL_417709 spike protein (1-1147)(K986P_V987P_P1069F) WhcAg construct
MFVFLVLLPLVSSQCVNLTTRTQLPPAYTNSFTRGVYYPDKVFRSSVLHSTQDLFLPFFSNVTWFHAIHVSGTNGTKRFDNPVLPFNDGVYFASTEKSNIIRGWIFGTTLDSKTQSLLIVNNATNVVIKVCEFQFCNDPFLGVYYHKNNKSWMESEFRVYSSANNCTFEYVSQPFLMDLEGKQGNFKNLREFVFKNIDGYFKIYSKHTPINLVRDLPQGFSALEPLVDLPIGINITRFQTLLALHRSYLTPGDSSSGWTAGAAAYYVGYLQPRTFLLKYNENGTITDAVDCALDPLSETKCTLKSFTVEKGIYQTSNFRVQPTESIVRFPNITNLCPFGEVFNATRFASVYAWNRKRISNCVADYSVLYNSASFSTFKCYGVSPTKLNDLCFTNVYADSFVIRGDEVRQIAPGQTGKIADYNYKLPDDFTGCVIAWNSNNLDSKVGGNYNYLYRLFRKSNLKPFERDISTEIYQAGSTPCNGVEGFNCYFPLQSYGFQPTNGVGYQPYRVVVLSFELLHAPATVCGPKKSTNLVKNKCVNFNFNGLTGTGVLTESNKKFLPFQQFGRDIADTTDAVRDPQTLEILDITPCSFGGVSVITPGTNTSNQVAVLYQGVNCTEVPVAIHADQLTPTWRVYSTGSNVFQTRAGCLIGAEHVNNSYECDIPIGAGICASYQTQTNSPRRARSVASQSIIAYTMSLGAENSVAYSNNSIAIPTNFTISVTTEILPVSMTKTSVDCTMYICGDSTECSNLLLQYGSFCTQLNRALTGIAVEQDKNTQEVFAQVKQIYKTPPIKDFGGFNFSQILPDPSKPSKRSFIEDLLFNKVTLADAGFTKQYGDCLGDIAARDLICAQKFNGLTVLPPLLTDEMIAQYTSALLAGTITSGWTFGAGAALQIPFAMQMAYRFNGIGVTQNVLYENQKLIANQFNSAIGKIQDSLSSTASALGKLQDVVNQNAQALNTLVKQLSSNFGAISSVLNDILSRLDPPEAEVQIDRLITGRLQSLQTYVTQQLIRAAEIRASANLAATKMSECVLGQSKRVDFCGKGYHLMSFPQSAPHGVVFLHVTYVFAQEKNFTTAPAICHDGKAHFPREGVFVSNGTHWFVTQRNFYEPQIITTDNTFVSGNCDVVIGIVNNTVYDPLQPELDSGGGGSDIDPYKEFGSSYQLLNFLPLDFFPDLNALVDTATALYEEELTGREHCSPHHTAIRQALVCWDELTKLIAWMSSNITSEQVRTIIVNHVNDTWGLKVRQSLWFHLSCLTFGQHTVQEFLVSFGVWIRTPAPYRPPNAPILSTLPEHTVIC

SEQ ID NO: 10911 - protein, 1301 aa, Artificial Sequence
  SARS-CoV-2/Australia/NSW56/2020__EPI_ISL_417408 spike protein (1-1147)(K986P_V987P_P1069F) WhcAg construct
MFVFLVLLPLVSSQCVNLTTRTQLPPAYTNSFTRGVYYPDKVFRSSVLHSTQDLFLPFFSNVTWFHAIHVSGTNGTKRFDNPVLPFNDGVYFASTEKSNIIRGWIFGTTLDSKTQSLLIVNNATNVVIKVCEFQFCNDPFLGVYYHKNNKSWMESEFRVYSSANNCTFEYVSQPFLMDLEGKQGNFKNLREFVFKNIDGYFKIYSKHTPINLVRDLPQGFSALEPLVDLPIGINITRFQTLLALHRSYLTPGDSSSGWTAGAAAYYVGYLQPRTFLLKYNENGTITDAVDCALDPLSETKCTLKSFTVEKGIYQTSNFRVQPTESIVRFPNITNLCPFGEVFNATRFASVYAWNRKRISNCVADYSVLYNSASFSTFKCYGVSPTKLNDLCFTNVYADSFVIRGDEVRQIAPGQTGKIADYNYKLPDDFTGCVIAWNSNNLDSKVGGNYNYLYRLFRKSNLKPFERDISTEIYQAGSTPCNGVEGFNCYFPLQSYGFQPTNGVGYQPYRVVVLSFELLHAPATVCGPKKSTNLVKNKCVNFNFNGLTGTGVLTESNKKFLPFQQFGRDIADTTDAVRDPQTLEILDITPCSFGGVSVITPGTNTSNQVAVLYQDVNCTEVPVAIHADQLTPTWRVYSTGSNVFQTRAGCLIGAEHVNNSYECDIPIGAGICASYQTQTNSPRRARSVASQSIIAYTMSLGAENSVAYSNNSIAIPTNFTISVTTEILPVSMTKTSVDCTMYICGDSTECSNLLLQYGSFCTQLNRALTGIAVEQDKNTQEVFAQVKQIYKTPPIKDFGGFNFSQILPDSSKPSKRSFIEDLLFNKVTLADAGFIKQYGDCLGDIAARDLICAQKFNGLTVLPPLLTDEMIAQYTSALLAGTITSGWTFGAGAALQIPFAMQMAYRFNGIGVTQNVLYENQKLIANQFNSAIGKIQDSLSSTASALGKLQDVVNQNAQALNTLVKQLSSNFGAISSVLNDILSRLDPPEAEVQIDRLITGRLQSLQTYVTQQLIRAAEIRASANLAATKMSECVLGQSKRVDFCGKGYHLMSFPQSAPHGVVFLHVTYVFAQEKNFTTAPAICHDGKAHFPREGVFVSNGTHWFVTQRNFYEPQIITTDNTFVSGNCDVVIGIVNNTVYDPLQPELDSGGGGSDIDPYKEFGSSYQLLNFLPLDFFPDLNALVDTATALYEEELTGREHCSPHHTAIRQALVCWDELTKLIAWMSSNITSEQVRTIIVNHVNDTWGLKVRQSLWFHLSCLTFGQHTVQEFLVSFGVWIRTPAPYRPPNAPILSTLPEHTVIC

SEQ ID NO: 10912 - protein, 1301 aa, Artificial Sequence
  SARS-CoV-2/Iceland/280/2020__EPI_ISL_417608 spike protein (1-1147)(K986P_V987P_P1069F) WhcAg construct
MFVFLVLLPLVSSQCVNLTTRTQLPPAYTNSFTRGVYYPDKVFRSSVLHSTQDLFLPFFSNVTWFHAIHVSGTNGTKRFDNPVLPFNDGVYFASTEKSNIIRGWIFGTTLDSKTQSLLIVNNATNVVIKVCEFQFCNDPFLGVYYHKNNKSWMESEFRVYSSANNCTFEYVSQPFLMDLEGKQGNFKNLREFVFKNIDGYFKIYSKHTPINLVRDLPQGFSALEPLVDLPIGINITRFQTLLALHRSYLTPGDSSSGWTAGAAAYYVGYLQPRTFLLKYNENGTITDAVDCALDPLSETKCTLKSFTVEKGIYQTSNFRVQPTESIVRFPNITNLCPFGEVFNATRFASVYAWNRKRISNCVADYSVLYNSASFSTFKCYGVSPTKLNDLCFTNVYADSFVIRGDEVRQIAPGQTGKIADYNYKLPDDFTGCVIAWNSNNLDSKVGGNYNYLYRLFRKSNLKPFERDISTEIYQAGSTPCNGVEGFNCYFPLQSYGFQPTNGVGYQPYRVVVLSFELLHAPATVCGPKKSTNLVKNKCVNFNFNGLTGTGVLTESNKKFLPFQQFGRDIADTTDAVRDPQTLEILDITPCSFGGVSVITPGTNTSNQVAVLYQGVNCTEVPVAIHADQLTPTWRVYSTGSNVFQTRAGCLIGAEHVNNSYECDIPIGAGICASYHTQTNSPRRARSVASQSIIAYTMSLGAENSVAYSNNSIAIPTNFTISVTTEILPVSMTKTSVDCTMYICGDSTECSNLLLQYGSFCTQLNRALTGIAVEQDKNTQEVFAQVKQIYKTPPIKDFGGFNFSQILPDPSKPSKRSFIEDLLFNKVTLADAGFIKQYGDCLGDIAARDLICAQKFNGLTVLPPLLTDEMIAQYTSALLAGTITSGWTFGAGAALQIPFAMQMAYRFNGIGVTQNVLYENQKLIANQFNSAIGKIQDSLSSTASALGKLQDVVNQNAQALNTLVKQLSSNFGAISSVLNDILSRLDPPEAEVQIDRLITGRLQSLQTYVTQQLIRAAEIRASANLAATKMSECVLGQSKRVDFCGKGYHLMSFPQSAPHGVVFLHVTYVFAQEKNFTTAPAICHDGKAHFPREGVFVSNGTHWFVTQRNFYEPQIITTDNTFVSGNCDVVIGIVNNTVYDPLQPELDSGGGGSDIDPYKEFGSSYQLLNFLPLDFFPDLNALVDTATALYEEELTGREHCSPHHTAIRQALVCWDELTKLIAWMSSNITSEQVRTIIVNHVNDTWGLKVRQSLWFHLSCLTFGQHTVQEFLVSFGVWIRTPAPYRPPNAPILSTLPEHTVIC

SEQ ID NO: 10913 - protein, 1301 aa, Artificial Sequence; identical to SEQ ID NO: 10868
  SARS-CoV-2/Iceland/247/2020__EPI_ISL_417575 spike protein (1-1147)(K986P_V987P_P1069F) WhcAg construct

SEQ ID NO: 10914 - protein, 1301 aa, Artificial Sequence
  SARS-CoV-2/Iceland/238/2020__EPI_ISL_417566 spike protein (1-1147)(K986P_V987P_P1069F) WhcAg construct
MFVFLVLLPLVSSQCVNLTTRTQLPPAYTNSFTRGVYYPDKVFRSSVLHSTQDLFLPFFSNVTWFHAIHVSGTNGTKRFDNPVLPFNDGVYFASTEKSNIIRGWIFGTTLDSKTQSLLIVNNATNVVIKVCEFQFCNDPFLGVYYHKNNKSWMESEFRVYSSANNCTFEYVSQPFLMDLEGKQGNFKNLREFVFKNIDGYFKIYSKHTPINLVRDLPQGFSALEPLVDLPIGINITRFQTLLALHRSYLTPGDSSSGWTAGAAAYYVGYLQPRTFLLKYNENGTITDAVDCALDPLSETKCTLKSFTVEKGIYQTSNFRVQPTESIVRFPNITNLCPFGEVFNATRFASVYAWNRKRISNCVADYSVLYNSASFSTFKCYGVSPTKLNDLCFTNVYADSFVIRGDEVRQIAPGQTGKIADYNYKLPDDFTGCVIAWNSNNLDSKVGGNYNYLYRLFRKSNLKPFERDISTEIYQAGSTPCNGVEGFNCYFPLQSYGFQPTNGVGYQPYRVVVLSFELLHAPATVCGPKKSTNLVKNKCVNFNFNGLTGTGVLTESNKKFLPFQQFGRDIADTTDAVRDPQTLEILDITPCSFGGVSVITPGTNTSNQVAVLYQGVNCTEVPVAIHADQLTPTWRVYSTGSNVFQTRAGCLIGAEHVNNSYECDIPIGAGICASYQTQTNSPRRARSVASQSIIAYTMSLGAENSVAYSNNSIAIPTNFTISVTTEILPVSMTKTSVDCTMYICGDSTECSNLLLQYGSFCTQLNRALTGIAVEQDKNTQEVFAQVKQIYKTPPIKDFGGFNFSQILPDPSKPSKRSFIEDLLFNKVTLADVGFIKQYGDCLGDIAARDLICAQKFNGLTVLPPLLTDEMIAQYTSALLAGTITSGWTFGAGAALQIPFAMQMAYRFNGIGVTQNVLYENQKLIANQFNSAIGKIQDSLSSTASALGKLQDVVNQNAQALNTLVKQLSSNFGAISSVLNDILSRLDPPEAEVQIDRLITGRLQSLQTYVTQQLIRAAEIRASANLAATKMSECVLGQSKRVDFCGKGYHLMSFPQSAPHGVVFLHVTYVFAQEKNFTTAPAICHDGKAHFPREGVFVSNGTHWFVTQRNFYEPQIITTDNTFVSGNCDVVIGIVNNTVYDPLQPELDSGGGGSDIDPYKEFGSSYQLLNFLPLDFFPDLNALVDTATALYEEELTGREHCSPHHTAIRQALVCWDELTKLIAWMSSNITSEQVRTIIVNHVNDTWGLKVRQSLWFHLSCLTFGQHTVQEFLVSFGVWIRTPAPYRPPNAPILSTLPEHTVIC

SEQ ID NO: 10915 - protein, 1301 aa, Artificial Sequence
  SARS-CoV-2/Greece/16/2020__EPI_ISL_418265 spike protein (1-1147)(K986P_V987P_P1069F) WhcAg construct
MFVFLVLLPLVSSQCVNLTTRTQLPPAYTNSFTRGVYYPDKVFRSSVLHSTQDLFLPFFSNVTWFHAIHVSGTNGTKRFDNPVLPFNDGVYFASTEKSNIIRGWIFGTTLDSKTQSLLIVNNATNVVIKVCEFQFCNDPFLGVYYHKNNKSWMESEFRVYSSANNCTFEYVSQPFLMDLEGKQGNFKNLREFVFKNVDGYFKIYSKHTPINLVRDLPQGFSALEPLVDLPIGINITRFQTLLALHRSYLTPGDSSSGWTAGAAAYYVGYLQPRTFLLKYNENGTITDAVDCALDPLSETKCTLKSFTVEKGIYQTSNFRVQPTESIVRFPNITNLCPFGEVFNATRFASVYAWNRKRISNCVADYSVLYNSASFSTFKCYGVSPTKLNDLCFTNVYADSFVIRGDEVRQIAPGQTGKIADYNYKLPDDFTGCVIAWNSNNLDSKVGGNYNYLYRLFRKSNLKPFERDISTEIYQAGSTPCNGVEGFNCYFPLQSYGFQPTNGVGYQPYRVVVLSFELLHAPATVCGPKKSTNLVKNKCVNFNFNGLTGTGVLTESNKKFLPFQQFGRDIADTTDAVRDPQTLEILDITPCSFGGVSVITPGTNTSNQVAVLYQDVNCTEVPVAIHADQLTPTWRVYSTGSNVFQTRAGCLIGAEHVNNSYECDIPIGAGICASYQTQTNSPRRARSVASQSIIAYTMSLGAENSVAYSNNSIAIPTNFTISVTTEILPVSMTKTSVDCTMYICGDSTECSNLLLQYGSFCTQLNRALTGIAVEQDKNTQEVFAQVKQIYKTPPIKDFGGFNFSQILPDPSKPSKRSFIEDLLFNKVTLADAGFIKQYGDCLGDIAARDLICAQKFNGLTVLPPLLTDEMIAQYTSALLAGTITSGWTFGAGAALQIPFAMQMAYRFNGIGVTQNVLYENQKLIANQFNSAIGKIQDSLSSTASALGKLQDVVNQNAQALNTLVKQLSSNFGAISSVLNDILSRLDPPEAEVQIDRLITGRLQSLQTYVTQQLIRAAEIRASANLAATKMSECVLGQSKRVDFCGKGYHLMSFPQSAPHGVVFLHVTYVFAQEKNFTTAPAICHDGKAHFPREGVFVSNGTHWFVTQRNFYEPQIITTDNTFVSGNCDVVIGIVNNTVYDPLQPELDSGGGGSDIDPYKEFGSSYQLLNFLPLDFFPDLNALVDTATALYEEELTGREHCSPHHTAIRQALVCWDELTKLIAWMSSNITSEQVRTIIVNHVNDTWGLKVRQSLWFHLSCLTFGQHTVQEFLVSFGVWIRTPAPYRPPNAPILSTLPEHTVIC

SEQ ID NO: 10916 - protein, 1301 aa, Artificial Sequence
  SARS-CoV-2/Iceland/319/2020__EPI_ISL_417648 spike protein (1-1147)(K986P_V987P_P1069F) WhcAg construct
MFVFLVLLPLVSSQCVNLTTRTQLPPAYTNSFTRGVYYPDKVFRSSVLHSTQDLFLPFFSNVTWFHAIHVSGTNGTKRFDNPVLPFNDGVYFASTEKSNIIRGWIFGTTLDSKTQSLLIVNNATNVVIKVCEFQFCNDPFLGVYYHKNNKSWMESEFRVYSSANNCTFEYVSQPFLIDLEGKQGNFKNLREFVFKNIDGYFKIYSKHTPINLVRDLPQGFSALEPLVDLPIGINITRFQTLLALHRSYLTPGDSSSGWTAGAAAYYVGYLQPRTFLLKYNENGTITDAVDCALDPLSETKCTLKSFTVEKGIYQTSNFRVQPTESIVRFPNITNLCPFGEVFNATRFASVYAWNRKRISNCVADYSVLYNSASFSTFKCYGVSPTKLNDLCFTNVYADSFVIRGDEVRQIAPGQTGKIADYNYKLPDDFTGCVIAWNSNNLDSKVGGNYNYLYRLFRKSNLKPFERDISTEIYQAGSTPCNGVEGFNCYFPLQSYGFQPTNGVGYQPYRVVVLSFELLHAPATVCGPKKSTNLVKNKCVNFNFNGLTGTGVLTESNKKFLPFQQFGRDIADTTDAVRDPQTLEILDITPCSFGGVSVITPGTNTSNQVAVLYQGVNCTEVPVAIHADQLTPTWRVYSTGSNVFQTRAGCLIGAEHVNNSYECDIPIGAGICASYQTQTNSPRRARSVASQSIIAYTMSLGAENSVAYSNNSIAIPTNFTISVTTEILPVSMTKTSVDCTMYICGDSTECSNLLLQYGSFCTQLNRALTGIAVEQDKNTQEVFAQVKQIYKTPPIKDFGGFNFSQILPDPSKPSKRSFIEDLLFNKVTLADAGFIKQYGDCLGDIAARDLICAQKFNGLTVLPPLLTDEMIAQYTSALLAGTITSGWTFGAGAALQIPFAMQMAYRFNGIGVTQNVLYENQKLIANQFNSAIGKIQDSLSSTASALGKLQDVVNQNAQALNTLVKQLSSNFGAISSVLNDILSRLDPPEAEVQIDRLITGRLQSLQTYVTQQLIRAAEIRASANLAATKMSECVLGQSKRVDFCGKGYHLMSFPQSAPHGVVFLHVTYVFAQEKNFTTAPAICHDGKAHFPREGVFVSNGTHWFVTQRNFYEPQIITTDNTFVSGNCDVVIGIVNNTVYDPLQPELDSGGGGSDIDPYKEFGSSYQLLNFLPLDFFPDLNALVDTATALYEEELTGREHCSPHHTAIRQALVCWDELTKLIAWMSSNITSEQVRTIIVNHVNDTWGLKVRQSLWFHLSCLTFGQHTVQEFLVSFGVWIRTPAPYRPPNAPILSTLPEHTVIC

SEQ ID NO: 10917 - protein, 1301 aa, Artificial Sequence
  SARS-CoV-2/Congo/94/2020__EPI_ISL_417947 spike protein (1-1147)(K986P_V987P_P1069F) WhcAg construct
MFVFLVLLPLVSSQCVNLTTRTQLPPAYTNSFTRGVYYPDKVFRSSVLHSTQDLFLPFFSNVTWFHAIHVSGTNGTKRFDNPVLPFNDGVYFASTEKSNIIRGWIFGTTLDSKTQSLLIVNNATNVVIKVCEFQFCNDPFLGVYYHKNNKSWMESEFRVYSSANNCTFEYVSQPFLMDLEGKQGNFKNLREFVFKNIDGYFKIYSKHTPINLVRDLPQGFSALEPLVDLPIGINITRFQTLLALHRSYLTPGDSSSGWTAGAAAYYVGYLQPRTFLLKYNENGTITDAVDCALDPLSETKCTLKSFTVEKGIYQTSNFRVQPTESIVRFPNITNLCPFGEVFNATRFASVYAWNRKRISNCVADYSVLYNSASFSTFKCYGVSPTKLNDLCFTNVYADSFVIRGDEVRQIAPGQTGKIADYNYKLPDDFTGCVIAWNSNNLDSKVGGNYNYLYRLFRKSNLKPFERDISTEIYQAGSTPCNGVEGFNCYFPLQSYGFQPTNGVGYQPYRVVVLSFELLHAPATVCGPKKSTNLVKNKCVNFNFNGLTGTGVLTESNKKFLPFQQFGRDIADTTDAVRDPQTLEILDITPCSFGGVSVITPGTNTSNQVAVLYQGVNCTEVPVAIHADQLTPTWRVYSTGSNVFQTRAGCLIGAEHVNNSYECDIPIGAGICASYQTQTNSPRRARSVASQSIIAYTMSLGAENSVAYSNNSIAIPTNFTISVTTEILPVSMTKTSVDCTMYICGDSTECSNLLLQYGSFCTQLNRALTGIAVEQDKNTQEVFAQVKQIYKTPPIKDFGGFNFSQILPDPSKPSKRSFIEDILFNKVTLADAGFIKQYGDCLGDIAARDLICAQKFNGLTVLPPLLTDEMIAQYTSALLAGTITSGWTFGAGAALQIPFAMQMAYRFNGIGVTQNVLYENQKLIANQFNSAIGKIQDSLSSTASALGKLQDVVNQNAQALNTLVKQLSSNFGAISSVLNDILSRLDPPEAEVQIDRLITGRLQSLQTYVTQQLIRAAEIRASANLAATKMSECVLGQSKRVDFCGKGYHLMSFPQSAPHGVVFLHVTYVFAQEKNFTTAPAICHDGKAHFPREGVFVSNGTHWFVTQRNFYEPQIITTDNTFVSGNCDVVIGIVNNTVYDPLQPELDSGGGGSDIDPYKEFGSSYQLLNFLPLDFFPDLNALVDTATALYEEELTGREHCSPHHTAIRQALVCWDELTKLIAWMSSNITSEQVRTIIVNHVNDTWGLKVRQSLWFHLSCLTFGQHTVQEFLVSFGVWIRTPAPYRPPNAPILSTLPEHTVIC

SEQ ID NO: 10918 - protein, 1301 aa, Artificial Sequence
  SARS-CoV-2/Congo/158/2020__EPI_ISL_417950 spike protein (1-1147)(K986P_V987P_P1069F) WhcAg construct
MFVFLVLLPLVSSQCVNLTTRTQLPPAYTNSFTRGVYYPDKVFRSSVLHSTQDLFLPFFSNVTWFHAIHVSGTNGTKRFDNPVLPFNDGVYFASTEKSNIIRGWIFGTTLDSKTQSLLIVNNATNVVIKVCEFQFCNDPFLGVYYHKNNKSWMESEFRVYSSANNCTFEYVSQPFLMDLEGKQGNFKNLREFVFKNIDGYFKIYSKHTPINLVRDLPQGFSALEPLVDLPIGINITRFQTLLALHRSYLTPGDSSSGWTAGAAAYYVGYLQPRTFLLKYNENGTITDAVDCALDPLSETKCTLKSFTVEKGIYQTSNFRVQPTESIVRFPNITNLCPFGEVFNATRFASVYAWNRKRISNCVADYSVLYNSASFSTFKCYGVSPTKLNDLCFTNVYADSFVIRGDEVRQIAPGQTGKIADYNYKLPDDFTGCVIAWNSNNLDSKVGGNYNYLYRLFRKSNLKPFERDISTEIYQAGSTPCNGVEGFNCYFPLQSYGFQPTNGVGYQPYRVVVLSFELLHAPATVCGPKKSTNLVKNKCVNFNFNGLTGTGVLTESNKKFLPFQQFGRDIADTTDAVRDPQTLEILDITPCSFGGVSVITPGTNTSNQVAVLYQDVNCTEVPVAIHADQLTPTWRVYSTGSNVFQTRAGCLIGAEHVNNSYECDIPIGAGICASYQTQTNSPRRARSVASQSIIAYTMSLGAENSVAYSNNSIAIPTNFTISVTTEILPVSMTKTSVDCTMYICGDSTECSNLLLQYGSFCTQLNRALTGIAVEQDKNTQEVFAQVKQIYKTPPIKDFGGFNFSQILPDPSKPSKRSFIEDLLFNKVTLADAGFIKQYGDCLGDIAARDLICAQKFNGLTVLPPLLTDEMIAQYTSALLAGTITSGWTFGAGAALQIPFAMQMAYRFNGIGVTQNVLYENQKLIANQFNSAIGKIQDSLSSTASALGKLQDVVNQNAQALNTLVKQLSSNFGAISSVLNDILSRLDPPEAEVQIDRLITGRLQSLQTYVTQQLIRAAEIRASANLAATKMSECVLGQSKRVDFCGKGYHLMSFPQSAPHGVVFLHVTYVFAQEKNFTTAPAICHDGKAHFPREGVFVSNGTHWFVTQRNFYEPQIITTDNTFLSGNCDVVIGIVNNTVYDPLQPELDSGGGGSDIDPYKEFGSSYQLLNFLPLDFFPDLNALVDTATALYEEELTGREHCSPHHTAIRQALVCWDELTKLIAWMSSNITSEQVRTIIVNHVNDTWGLKVRQSLWFHLSCLTFGQHTVQEFLVSFGVWIRTPAPYRPPNAPILSTLPEHTVIC

SEQ ID NO: 10919 - protein, 1301 aa, Artificial Sequence
  SARS-CoV-2/USA/UT-00034/2020__EPI_ISL_417977 spike protein (1-1147)(K986P_V987P_P1069F) WhcAg construct
MFVFLVLLPLVSSQCVNLTTRTQLPPAYTNSFTRGVYYPDKVFRSSVLHSTQDLFLPFFSNVTWFHAIHVSGTNGTKRFDNPVLPFNDGVYFASTEKSNIIRGWIFGTTLDSKTQSLLIVNNATNVVIKVCEFQFCNDPFLGVYYYKNNKSWMESEFRVYSSANNCTFEYVSQPFLMDLEGKQGNFKNLREFVFKNIDGYFKIYSKHTPINLVRDLPQGFSALEPLVDLPIGINITRFQTLLALHRSYLTPGDSSSGWTAGAAAYYVGYLQPRTFLLKYNENGTITDAVDCALDPLSETKCTLKSFTVEKGIYQTSNFRVQPTESIVRFPNITNLCPFGEVFNATRFASVYAWNRKRISNCVADYSVLYNSASFSTFKCYGVSPTKLNDLCFTNVYADSFVIRGDEVRQIAPGQTGKIADYNYKLPDDFTGCVIAWNSNNLDSKVGGNYNYLYRLFRKSNLKPFERDISTEIYQAGSTPCNGVEGFNCYFPLQSYGFQPTNGVGYQPYRVVVLSFELLHAPATVCGPKKSTNLVKNKCVNFNFNGLTGTGVLTESNKKFLPFQQFGRDIADTTDAVRDPQTLEILDITPCSFGGVSVITPGTNTSNQVAVLYQGVNCTEVPVAIHADQLTPTWRVYSTGSNVFQTRAGCLIGAEHVNNSYECDIPIGAGICASYQTQTNSPRRARSVASQSIIAYTMSLGAENSVAYSNNSIAIPTNFTISVTTEILPVSMTKTSVDCTMYICGDSTECSNLLLQYGSFCTQLNRALTGIAVEQDKNTQEVFAQVKQIYKTPPIKDFGGFNFSQILPDPSKPSKRSFIEDLLFNKVTLADAGFIKQYGDCLGDIAARDLICAQKFNGLTVLPPLLTDEMIAQYTSALLAGTITSGWTFGAGAALQIPFAMQMAYRFNGIGVTQNVLYENQKLIANQFNSAIGKIQDSLSSTASALGKLQDVVNQNAQALNTLVKQLSSNFGAISSVLNDILSRLDPPEAEVQIDRLITGRLQSLQTYVTQQLIRAAEIRASANLAATKMSECVLGQSKRVDFCGKGYHLMSFPQSAPHGVVFLHVTYVFAQEKNFTTAPAICHDGKAHFPREGVFVSNGTHWFVTQRNFYEPQIITTDNTFVSGNCDVVIGIVNNTVYDPLQPELDSGGGGSDIDPYKEFGSSYQLLNFLPLDFFPDLNALVDTATALYEEELTGREHCSPHHTAIRQALVCWDELTKLIAWMSSNITSEQVRTIIVNHVNDTWGLKVRQSLWFHLSCLTFGQHTVQEFLVSFGVWIRTPAPYRPPNAPILSTLPEHTVIC

SEQ ID NO: 10920 - protein, 1301 aa, Artificial Sequence
  SARS-CoV-2/USA/UT-00033/2020__EPI_ISL_417976 spike protein (1-1147)(K986P_V987P_P1069F) WhcAg construct
MFVFLVLLPLVSSQCVNLTTRTQLPPAYTNSFTRGVYYPDKVFRSSVLHSTQDLFLPFFSNVTWFHAIHVSGTNGTKRFDNPVLPFNDGVYFASTEKSNIIRGWIFGTTLDSKTQSLLIVNNATNVVIKVCEFQFCNDPFLGVYYHKNNKSWMESEFRVYSSANNCTFEYVSQPFLMDLEGKQGNFKNLREFVFKNIDGYFKIYSKHTPINLVRDLPQGFSALEPLVDLPIGINITRFQTLLALHRSYLTPGDSSSGLTAGAAAYYVGYLQPRTFLLKYNENGTITDAVDCALDPLSETKCTLKSFTVEKGIYQTSNFRVQPTESIVRFPNITNLCPFGEVFNATRFASVYAWNRKRISNCVADYSVLYNSASFSTFKCYGVSPTKLNDLCFTNVYADSFVIRGDEVRQIAPGQTGKIADYNYKLPDDFTGCVIAWNSNNLDSKVGGNYNYLYRLFRKSNLKPFERDISTEIYQAGSTPCNGVEGFNCYFPLQSYGFQPTNGVGYQPYRVVVLSFELLHAPATVCGPKKSTNLVKNKCVNFNFNGLTGTGVLTESNKKFLPFQQFGRDIADTTDAVRDPQTLEILDITPCSFGGVSVITPGTNTSNQVAVLYQGVNCTEVPVAIHADQLTPTWRVYSTGSNVFQTRAGCLIGAEHVNNSYECDIPIGAGICASYQTQTNSPRRARSVASQSIIAYTMSLGAENSVAYSNNSIAIPTNFTISVTTEILPVSMTKTSVDCTMYICGDSTECSNLLLQYGSFCTQLNRALTGIAVEQDKNTQEVFAQVKQIYKTPPIKDFGGFNFSQILPDPSKPSKRSFIEDLLFNKVTLADAGFIKQYGDCLGDIAARDLICAQKFNGLTVLPPLLTDEMIAQYTSALLAGTITSGWTFGAGAALQIPFAMQMAYRFNGIGVTQNVLYENQKLIANQFNSAIGKIQDSLSSTASALGKLQDVVNQNAQALNTLVKQLSSNFGAISSVLNDILSRLDPPEAEVQIDRLITGRLQSLQTYVTQQLIRAAEIRASANLAATKMSECVLGQSKRVDFCGKGYHLMSFPQSAPHGVVFLHVTYVFAQEKNFTTAPAICHDGKAHFPREGVFVSNGTHWFVTQRNFYEPQIITTDNTFVSGNCDVVIGIVNNTVYDPLQPELDSGGGGSDIDPYKEFGSSYQLLNFLPLDFFPDLNALVDTATALYEEELTGREHCSPHHTAIRQALVCWDELTKLIAWMSSNITSEQVRTIIVNHVNDTWGLKVRQSLWFHLSCLTFGQHTVQEFLVSFGVWIRTPAPYRPPNAPILSTLPEHTVIC

SEQ ID NO: 10921 - protein, 1301 aa, Artificial Sequence
  SARS-CoV-2/USA/WI-13/2020__EPI_ISL_417516 spike protein (1-1147)(K986P_V987P_P1069F) WhcAg construct
MFVFLVLLPLVSSQCVNLTTRTQLPPAYTNSFTRGVYYPDKVFRSSVLHSTQDLFLPFFSNVTWFHAIHVSGTNGTKRFDNPVLPFNDGVYFASTEKSNIIRGWIFGTTLDSKTQSLLIVNNATNVVIKVCEFQFCNDPFLGVYYHKNNKSWMESEFRVYSSANNCTFEYVSQPFLMDLEGKQGNFKNLREFVFKNIDGYFKIYSKHTPINLVRDLPQGFSALEPLVDLPIGINITRFQTLLALHRSYLTPGDSSSGWTAGAAAYYVGYLQPRTFLLKYNENGTITDAVDCALDPLSETKCTLKSFTVEKGIYQTSNFRVLPTESIVRFPNITNLCPFGEVFNATRFASVYAWNRKRISNCVADYSVLYNSASFSTFKCYGVSPTKLNDLCFTNVYADSFVIRGDEVRQIAPGQTGKIADYNYKLPDDFTGCVIAWNSNNLDSKVGGNYNYLYRLFRKSNLKPFERDISTEIYQAGSTPCNGVEGFNCYFPLQSYGFQPTNGVGYQPYRVVVLSFELLHAPATVCGPKKSTNLVKNKCVNFNFNGLTGTGVLTESNKKFLPFQQFGRDIADTTDAVRDPQTLEILDITPCSFGGVSVITPGTNTSNQVAVLYQGVNCTEVPVAIHADQLTPTWRVYSTGSNVFQTRAGCLIGAEHVNNSYECDIPIGAGICASYQTQTNSPRRARSVASQSIIAYTMSLGAENSVAYSNNSIAIPTNFTISVTTEILPVSMTKTSVDCTMYICGDSTECSNLLLQYGSFCTQLNRALTGIAVEQDKNTQEVFAQVKQIYKTPPIKDFGGFNFSQILPDPSKPSKRSFIEDLLFNKVTLADAGFIKQYGDCLGDIAARDLICAQKFNGLTVLPPLLTDEMIAQYTSALLAGTITSGWTFGAGAALQIPFAMQMAYRFNGIGVTQNVLYENQKLIANQFNSAIGKIQDSLSSTASALGKLQDVVNQNAQALNTLVKQLSSNFGAISSVLNDILSRLDPPEAEVQIDRLITGRLQSLQTYVTQQLIRAAEIRASANLAATKMSECVLGQSKRVDFCGKGYHLMSFPQSAPHGVVFLHVTYVFAQEKNFTTAPAICHDGKAHFPREGVFVSNGTHWFVTQRNFYEPQIITTDNTFVSGNCDVVIGIVNNTVYDPLQPELDSGGGGSDIDPYKEFGSSYQLLNFLPLDFFPDLNALVDTATALYEEELTGREHCSPHHTAIRQALVCWDELTKLIAWMSSNITSEQVRTIIVNHVNDTWGLKVRQSLWFHLSCLTFGQHTVQEFLVSFGVWIRTPAPYRPPNAPILSTLPEHTVIC

SEQ ID NO: 10922 - protein, 1300 aa, Artificial Sequence
  SARS-CoV-2/India/1-27/2020__EPI_ISL_413522 spike protein (1-1146)(K985P_V986P_P1068F) WhcAg construct
MFVFLVLLPLVSSQCVNLTTRTQLPPAYTNSFTRGVYYPDKVFRSSVLHSTQDLFLPFFSNVTWFHAIHVSGTNGTKRFDNPVLPFNDGVYFASTEKSNIIRGWIFGTTLDSKTQSLLIVNNATNVVIKVCEFQFCNDPFLGVYHKNNKSWMESEFRVYSSANNCTFEYVSQPFLMDLEGKQGNFKNLREFVFKNIDGYFKIYSKHTPINLVRDLPQGFSALEPLVDLPIGINITRFQTLLALHRSYLTPGDSSSGWTAGAAAYYVGYLQPRTFLLKYNENGTITDAVDCALDPLSETKCTLKSFTVEKGIYQTSNFRVQPTESIVRFPNITNLCPFGEVFNATRFASVYAWNRKRISNCVADYSVLYNSASFSTFKCYGVSPTKLNDLCFTNVYADSFVIRGDEVIQIAPGQTGKIADYNYKLPDDFTGCVIAWNSNNLDSKVGGNYNYLYRLFRKSNLKPFERDISTEIYQAGSTPCNGVEGFNCYFPLQSYGFQPTNGVGYQPYRVVVLSFELLHAPATVCGPKKSTNLVKNKCVNFNFNGLTGTGVLTESNKKFLPFQQFGRDIADTTDAVRDPQTLEILDITPCSFGGVSVITPGTNTSNQVAVLYQDVNCTEVPVAIHADQLTPTWRVYSTGSNVFQTRAGCLIGAEHVNNSYECDIPIGAGICASYQTQTNSPRRARSVASQSIIAYTMSLGAENSVAYSNNSIAIPTNFTISVTTEILPVSMTKTSVDCTMYICGDSTECSNLLLQYGSFCTQLNRALTGIAVEQDKNTQEVFAQVKQIYKTPPIKDFGGFNFSQILPDPSKPSKRSFIEDLLFNKVTLADAGFIKQYGDCLGDIAARDLICAQKFNGLTVLPPLLTDEMIAQYTSALLAGTITSGWTFGAGAALQIPFAMQMAYRFNGIGVTQNVLYENQKLIANQFNSAIGKIQDSLSSTASALGKLQDVVNQNAQALNTLVKQLSSNFGAISSVLNDILSRLDPPEAEVQIDRLITGRLQSLQTYVTQQLIRAAEIRASANLAATKMSECVLGQSKRVDFCGKGYHLMSFPQSAPHGVVFLHVTYVFAQEKNFTTAPAICHDGKAHFPREGVFVSNGTHWFVTQRNFYEPQIITTDNTFVSGNCDVVIGIVNNTVYDPLQPELDSGGGGSDIDPYKEFGSSYQLLNFLPLDFFPDLNALVDTATALYEEELTGREHCSPHHTAIRQALVCWDELTKLIAWMSSNITSEQVRTIIVNHVNDTWGLKVRQSLWFHLSCLTFGQHTVQEFLVSFGVWIRTPAPYRPPNAPILSTLPEHTVIC

SEQ ID NO: 10923 - protein, 1295 aa, Artificial Sequence
  SARS-CoV-2/pangolin/Guangxi/P4L/2017__EPI_ISL_410538 spike protein (1-1141)(K980P_V981P_P1063F) WhcAg construct
MFVFLFVLPLVSSQCVNLTTRTGIPPGYTNSSTRGVYYPDKVFRSSILHLTQDLFLPFFSNVTWFNTINYQGGFKKFDNPVLPFNDGVYFASTEKSNIIRGWIFGTTLDARTQSLLIVNNATNVVIKVCEFQFCTDPFLGVYYHNNNKTWVENEFRVYSSANNCTFEYISQPFLMDLEGKQGNFKNLREFVFKNVDGYFKIYSKHTPIDLVRDLPRGFAALEPLVDLPIGINITRFQTLLALHRSYLTPGNLESGWTTGAAAYYVGYLQQRTFLLSYNQNGTITDAVDCSLDPLSETKCTLKSLTVEKGIYQTSNFRVQPTISIVRFPNITNLCPFGEVFNASKFASVYAWNRKRISNCVADYSVLYNSTSFSTFKCYGVSPTKLNDLCFTNVYADSFVVKGDEVRQIAPGQTGVIADYNYKLPDDFTGCVIAWNSVKQDALTGGNYGYLYRLFRKSKLKPFERDISTEIYQAGSTPCNGQVGLNCYYPLERYGFHPTTGVNYQPFRVVVLSFELLNGPATVCGPKLSTTLVKDKCVNFNFNGLTGTGVLTTSKKQFLPFQQFGRDISDTTDAVRDPQTLEILDITPCSFGGVSVITPGTNTSNQVAVLYQDVNCTEVPMAIHAEQLTPAWRVYSAGANVFQTRAGCLVGAEHVNNSYECDIPVGAGICASYHSMSSLRSVNQRSIIAYTMSLGAENSVAYSNNSIAIPTNFTISVTTEILPVSMTKTSVDCTMYICGDSIECSNLLLQYGSFCTQLNRALTGIAVEQDKNTQEVFAQVKQIYKTPPIKDFGGFNFSQILPDPSKPSKRSFIEDLLFNKVTLADAGFIKQYGDCLGDIAARDLICAQKFNGLTVLPPLLTDEMIAQYTSALLAGTITSGWTFGAGAALQIPFAMQMAYRFNGIGVTQNVLYENQKLIANQFNSAIGKIQDSLSSTASALGKLQDVVNQNAQALNTLVKQLSSNFGAISSVLNDILSRLDPPEAEVQIDRLITGRLQSLQTYVTQQLIRAAEIRASANLAATKMSECVLGQSKRVDFCGKGYHLMSFPQSAPHGVVFLHVTYVFAQEKNFTTAPAICHEGKAHFPREGVFVSNGTHWFITQRNFYEPQIITTDNTFVSGSCDVVIGIVNNTVYDPLQPELDSGGGGSDIDPYKEFGSSYQLLNFLPLDFFPDLNALVDTATALYEEELTGREHCSPHHTAIRQALVCWDELTKLIAWMSSNITSEQVRTIIVNHVNDTWGLKVRQSLWFHLSCLTFGQHTVQEFLVSFGVWIRTPAPYRPPNAPILSTLPEHTVIC

SEQ ID NO: 10924 - protein, 1295 aa, Artificial Sequence
  SARS-CoV-2/pangolin/Guangxi/P5L/2017__EPI_ISL_410540 spike protein (1-1141)(K980P_V981P_P1063F) WhcAg construct
MFVFLFVLPLVSSQCVNLTTRTGIPPGYTNSSTRGVYYPDKVFRSSILHLTQDLFLPFFSNVTWFNTINYQGGFKKFDNPVLPFNDGVYFASTEKSNIIRGWIFGTTLDARTQSLLIVNNATNVVIKVCEFQFCTDPFLGVYYHNNNKTWVENEFRVYSSANNCTFEYISQPFLMDLEGKQGNFKNLREFVFKNVDGYFKIYSKHTPIDLVRDLPRGFAALEPLVDLPIGINITRFQTLLALHRSYLTPGKLESGWTTGAAAYYVGYLQQRTFLLSYNQNGTITDAVDCSLDPLSETKCTLKSLTVEKGIYQTSNFRVQPTISIVRFPNITNLCPFGEVFNASKFASVYAWNRKRISNCVADYSVLYNSTSFSTFKCYGVSPTKLNDLCFTNVYADSFVVKGDEVRQIAPGQTGVIADYNYKLPDDFTGCVIAWNSVKQDALTGGNYGYLYRLFRKSKLKPFERDISTEIYQAGSTPCNGQVGLNCYYPLERYGFHPTTGVNYQPFRVVVLSFELLNGPATVCGPKLSTTLVKDKCVNFNFNGLTGTGVLTTSKKQFLPFQQFGRDISDTTDAVRDPQTLEILDITPCSFGGVSVITPGTNTSNQVAVLYQDVNCTEVPMAIHAEQLTPAWRVYSAGANVFQTRAGCLVGAEHVNNSYECDIPVGAGICASYHSMSSFRSVNQRSIIAYTMSLGAENSVAYSNNSIAIPTNFTISVTTEILPVSMTKTSVDCTMYICGDSIECSNLLLQYGSFCTQLNRALTGIAVEQDKNTQEVFAQVKQIYKTPPIKDFGGFNFSQILPDPSKPSKRSFIEDLLFNKVTLADAGFIKQYGDCLGDIAARDLICAQKFNGLTVLPPLLTDEMIAQYTSALLAGTITSGWTFGAGAALQIPFAMQMAYRFNGIGVTQNVLYENQKLIANQFNSAIGKIQDSLSSTASALGKLQDVVNQNAQALNTLVKQLSSNFGAISSVLNDILSRLDPPEAEVQIDRLITGRLQSLQTYVTQQLIRAAEIRASANLAATKMSECVLGQSKRVDFCGKGYHLMSFPQSAPHGVVFLHVTYVFAQEKNFTTAPAICHEGKAHFPREGVFVSNGTHWFITQRNFYEPQIITTDNTFVSGSCDVVIGIVNNTVYDPLQPELDSGGGGSDIDPYKEFGSSYQLLNFLPLDFFPDLNALVDTATALYEEELTGREHCSPHHTAIRQALVCWDELTKLIAWMSSNITSEQVRTIIVNHVNDTWGLKVRQSLWFHLSCLTFGQHTVQEFLVSFGVWIRTPAPYRPPNAPILSTLPEHTVIC

SEQ ID NO: 10925 - protein, 1295 aa, Artificial Sequence
  SARS-CoV-2/pangolin/Guangxi/P5E/2017__EPI_ISL_410541 spike protein (1-1141)(K980P_V981P_P1063F) WhcAg construct
MFVFLFVLPLVSSQCVNLTTRTGIPPGYTNSSTRGVYYPDKVFRSSILHLTQDLFLPFFSNVTWFNTITYQGGSKKFDNPVLPFNDGVYFASTEKSNIIRGWIFGTTLDARTQSLLIVNNATNVVIKVCEFQFCTDPFLGVYYHNNNKTWVENEFRVYSSANNCTFEYISQPFLMDLEGKQGNFKNLREFVFKNVDGYFKIYSKHTPIDLVRDLPRGFAALEPLVDLPIGINITRFQTLLALHRSYLTPGKLESGWTTGAAAYYVGYLQQRTFLLSYNQNGTITDAVDCSLDPLSETKCTLKSLTVEKGIYQTSNFRVQPTISIVRFPNITNLCPFGEVFNASKFASVYAWNRKRISNCVADYSVLYNSTSFSTFKCYGVSPTKLNDLCFTNVYADSFVVKGDEVRQIAPGQTGVIADYNYKLPDDFTGCVIAWNSVKQDALTGDNYGYLYRLFRKSKLKPFERDISTEIYQAGSTPCNGQVGLNCYYPLERYGFHPTTGVNYQPFRVVVLSFELLNGPATVCGPKLSTTLVKDKCVNFNFNGLTGTGVLTTSKKQFLPFQQFGRDISDTTDAVRDPQTLEILDITPCSFGGVSVITPGTNTSNQVAVLYQDVNCTEVPMAIHAEQLTPAWRVYSAGANVFQTRAGCLVGAEHVNNSYECDIPVGAGICASYHSMSSFRSVNQRSIIAYTMSLGAENSVAYSNNSIAIPTNFTISVTTEILPVSMTKTSVDCTMYICGDSIECSNLLLQYGSFCTQLNRALTGIAVEQDKNTQEVFAQVKQIYKTPPIKDFGGFNFSQILPDPSKPSKRSFIEDLLFNKVTLADAGFIKQYGDCLGDIAARDLICAQKFNGLTVLPPLLTDEMIAQYTSALLAGTITSGWTFGAGAALQIPFAMQMAYRFNGIGVTQNVLYENQKLIANQFNSAIGKIQDSLSSTASALGKLQDVVNQNAQALNTLVKQLSSNFGAISSVLNDILSRLDPPEAEVQIDRLITGRLQSLQTYVTQQLIRAAEIRASANLAATKMSECVLGQSKRVDFCGKGYHLMSFPQSAPHGVVFLHVTYVFAQEKNFTTAPAICHEGKAHFPREGVFVSNGTHWFITQRNFYEPQIITTDNTFVSGSCDVVIGIVNNTVYDPLQPELDSGGGGSDIDPYKEFGSSYQLLNFLPLDFFPDLNALVDTATALYEEELTGREHCSPHHTAIRQALVCWDELTKLIAWMSSNITSEQVRTIIVNHVNDTWGLKVRQSLWFHLSCLTFGQHTVQEFLVSFGVWIRTPAPYRPPNAPILSTLPEHTVIC

SEQ ID NO: 10926 - protein, 1293 aa, Artificial Sequence
  SARS-CoV-2/pangolin/Guangxi/P1E/2017__EPI_ISL_410539 spike protein (1-1139)(K978P_V979P_P1061F) WhcAg construct
MFVFLFVLPLVSSQCVNLTTRTGIQPGYTNSSTRGVYYPDKVFRSSILHLTQDLFLPFFSNVTWFNTINYQGGFKKFDNPVLPFNDGVYFASTEKSNIIRGWIFGTTLDARTQSLLIVNNATNVVIKVCEFQFCTDPFLGVYYHNNNKTWVENEFRVYSSANNCTFEYISQPFLMDLEGKQGNFKNLREFVFKNVDGYFKIYSKHTPIDLVRDLPRGFAALEPLVDLPIGINITRFQTLLALHRSYLTPGKLESGWTTGAAAYYVGYLQQRTFLLSYNQNGTITDAVDCSLDPLSETKCTLKSLTVEKGIYQTSNFRVQPTISIVRFPNITNLCPFGEVFNASKFASVYAWNRKRISNCVADYSVLYNSTSFSTFKCYGVSPTKLNDLCFTNVYADSFVVKGDEVRQIAPGQTGVIADYNYKLPDDFTGCVIAWNSVKQDALTGGNYLYRLFRKSKLKPFERDISTEIYQAGSTPCNGQVGLNCYYPLERYGFHPTTGVNYQPFRVVVLSFELLNGPATVCGPKLSTTLVKDKCVNFNFNGLTGTGVLTTSKKQFLPFQQFGRDISDTTDAVRDPQTLEILDITPCSFGGVSVITPGTNTSNQVAVLYQDVNCTEVPMAIHAEQLTPAWRVYSAGANVFQTRAGCLVGAEHVNNSYECDIPVGAGICASYHSMSSLRSVNQRSIIAYTMSLGAENSVAYSNNSIAIPTNFTISVTTEILPVSMTKTSVDCTMYICGDSIECSNLLLQYGSFCTQLNRALTGIAVEQDKNTQEVFAQVKQIYKTPPIKDFGGFNFSQILPDPSKPSKRSFIEDLLFNKVTLADAGFIKQYGDCLGDIAARDLICAQKFNGLTVLPPLLTDEMIAQYTSALLAGTITSGWTFGAGAALQIPFAMQMAYRFNGIGVTQNVLYENQKLIANQFNSAIGKIQDSLSSTASALGKLQDVVNQNAQALNTLVKQLSSNFGAISSVLNDILSRLDPPEAEVQIDRLITGRLQSLQTYVTQQLIRAAEIRASANLAATKMSECVLGQSKRVDFCGKGYHLMSFPQSAPHGVVFLHVTYVFAQEKNFTTAPAICHEGKAHFPREGVFVSNGTHWFITQRNFYEPQIITTDNTFVSGSCDVVIGIVNNTVYDPLQPELDSGGGGSDIDPYKEFGSSYQLLNFLPLDFFPDLNALVDTATALYEEELTGREHCSPHHTAIRQALVCWDELTKLIAWMSSNITSEQVRTIIVNHVNDTWGLKVRQSLWFHLSCLTFGQHTVQEFLVSFGVWIRTPAPYRPPNAPILSTLPEHTVIC

SEQ ID NO: 10927 - protein, 1301 aa, Artificial Sequence
  SARS-CoV-2/Wuhan/WIV05/2019__EPI_ISL_402128 spike protein (1-1147)(K986P_V987P_ H1048Q_H1064N_ H1083N_H1101N) WhcAg construct
MFVFLVLLPLVSSQCVNLTTRTQLPPAYTNSFTRGVYYPDKVFRSSVLHSTQDLFLPFFSNVTWFHAIHVSGTNGTKRFDNPVLPFNDGVYFASTEKSNIIRGWIFGTTLDSKTQSLLIVNNATNVVIKVCEFQFCNDPFLGVYYHKNNKSWMESEFRVYSSANNCTFEYVSQPFLMDLEGKQGNFKNLREFVFKNIDGYFKIYSKHTPINLVRDLPQGFSALEPLVDLPIGINITRFQTLLALHRSYLTPGDSSSGWTAGAAAYYVGYLQPRTFLLKYNENGTITDAVDCALDPLSETKCTLKSFTVEKGIYQTSNFRVQPTESIVRFPNITNLCPFGEVFNATRFASVYAWNRKRISNCVADYSVLYNSASFSTFKCYGVSPTKLNDLCFTNVYADSFVIRGDEVRQIAPGQTGKIADYNYKLPDDFTGCVIAWNSNNLDSKVGGNYNYLYRLFRKSNLKPFERDISTEIYQAGSTPCNGVEGFNCYFPLQSYGFQPTNGVGYQPYRVVVLSFELLHAPATVCGPKKSTNLVKNKCVNFNFNGLTGTGVLTESNKKFLPFQQFGRDIADTTDAVRDPQTLEILDITPCSFGGVSVITPGTNTSNQVAVLYQDVNCTEVPVAIHADQLTPTWRVYSTGSNVFQTRAGCLIGAEHVNNSYECDIPIGAGICASYQTQTNSPRRARSVASQSIIAYTMSLGAENSVAYSNNSIAIPTNFTISVTTEILPVSMTKTSVDCTMYICGDSTECSNLLLQYGSFCTQLNRALTGIAVEQDKNTQEVFAQVKQIYKTPPIKDFGGFNFSQILPDPSKPSKRSFIEDLLFNKVTLADAGFIKQYGDCLGDIAARDLICAQKFNGLTVLPPLLTDEMIAQYTSALLAGTITSGWTFGAGAALQIPFAMQMAYRFNGIGVTQNVLYENQKLIANQFNSAIGKIQDSLSSTASALGKLQDVVNQNAQALNTLVKQLSSNFGAISSVLNDILSRLDPPEAEVQIDRLITGRLQSLQTYVTQQLIRAAEIRASANLAATKMSECVLGQSKRVDFCGKGYQLMSFPQSAPHGVVFLNVTYVPAQEKNFTTAPAICNDGKAHFPREGVFVSNGTNWFVTQRNFYEPQIITTDNTFVSGNCDVVIGIVNNTVYDPLQPELDSGGGGSDIDPYKEFGSSYQLLNFLPLDFFPDLNALVDTATALYEEELTGREHCSPHHTAIRQALVCWDELTKLIAWMSSNITSEQVRTIIVNHVNDTWGLKVRQSLWFHLSCLTFGQHTVQEFLVSFGVWIRTPAPYRPPNAPILSTLPEHTVIC

SEQ ID NO: 10928 - protein, 1297 aa, Artificial Sequence
  SARS-CoV-2/bat/Yunnan/RaTG13/2013__EPI_ISL_402131 spike protein (1-1143)(K982P_V983P_ H1044Q_H1060N_ H1079N_H1097N) WhcAg construct
MFVFLVLLPLVSSQCVNLTTRTQLPPAYTNSSTRGVYYPDKVFRSSVLHLTQDLFLPFFSNVTWFHAIHVSGTNGIKRFDNPVLPFNDGVYFASTEKSNIIRGWIFGTTLDSKTQSLLIVNNATNVVIKVCEFQFCNDPFLGVYYHKNNKSWMESEFRVYSSANNCTFEYVSQPFLMDLEGKQGNFKNLREFVFKNIDGYFKIYSKHTPINLVRDLPPGFSALEPLVDLPIGINITRFQTLLALHRSYLTPGDSSSGWTAGAAAYYVGYLQPRTFLLKYNENGTITDAVDCALDPLSETKCTLKSFTVEKGIYQTSNFRVQPTDSIVRFPNITNLCPFGEVFNATTFASVYAWNRKRISNCVADYSVLYNSTSFSTFKCYGVSPTKLNDLCFTNVYADSFVITGDEVRQIAPGQTGKIADYNYKLPDDFTGCVIAWNSKHIDAKEGGNFNYLYRLFRKANLKPFERDISTEIYQAGSKPCNGQTGLNCYYPLYRYGFYPTDGVGHQPYRVVVLSFELLNAPATVCGPKKSTNLVKNKCVNFNFNGLTGTGVLTESNKKFLPFQQFGRDIADTTDAVRDPQTLEILDITPCSFGGVSVITPGTNASNQVAVLYQDVNCTEVPVAIHADQLTPTWRVYSTGSNVFQTRAGCLIGAEHVNNSYECDIPIGAGICASYQTQTNSRSVASQSIIAYTMSLGAENSVAYSNNSIAIPTNFTISVTTEILPVSMTKTSVDCTMYICGDSTECSNLLLQYGSFCTQLNRALTGIAVEQDKNTQEVFAQVKQIYKTPPIKDFGGFNFSQILPDPSKPSKRSFIEDLLFNKVTLADAGFIKQYGDCLGDIAARDLICAQKFNGLTVLPPLLTDEMIAQYTSALLAGTITSGWTFGAGAALQIPFAMQMAYRFNGIGVTQNVLYENQKLIANQFNSAIGKIQDSLSSTASALGKLQDVVNQNAQALNTLVKQLSSNFGAISSVLNDILSRLDPPEAEVQIDRLITGRLQSLQTYVTQQLIRAAEIRASANLAATKMSECVLGQSKRVDFCGKGYQLMSFPQSAPHGVVFLNVTYVPAQEKNFTTAPAICNDGKAHFPREGVFVSNGTNWFVTQRNFYEPQIITTDNTFVSGSCDVVIGIVNNTVYDPLQPELDSGGGGSDIDPYKEFGSSYQLLNFLPLDFFPDLNALVDTATALYEEELTGREHCSPHHTAIRQALVCWDELTKLIAWMSSNITSEQVRTIIVNHVNDTWGLKVRQSLWFHLSCLTFGQHTVQEFLVSFGVWIRTPAPYRPPNAPILSTLPEHTVIC

SEQ ID NO: 10929 - protein, 1301 aa, Artificial Sequence
  SARS-CoV-2/Wuhan/HBCDC-HB-01/2019__EPI_ISL_402132 spike protein (1-1147)(K986P_V987P_ H1048Q_H1064N_ H1083N_H1101N) WhcAg construct
MFVFLVLLPLVSSQCVNLTTRTQLPPAYTNSITRGVYYPDKVFRSSVLHSTQDLFLPFFSNVTWFHAIHVSGTNGTKRFDNPVLPFNDGVYFASTEKSNIIRGWIFGTTLDSKTQSLLIVNNATNVVIKVCEFQFCNDPFLGVYYHKNNKSWMESEFRVYSSANNCTFEYVSQPFLMDLEGKQGNFKNLREFVFKNIDGYFKIYSKHTPINLVRDLPQGFSALEPLVDLPIGINITRFQTLLALHRSYLTPGDSSSGWTAGAAAYYVGYLQPRTFLLKYNENGTITDAVDCALDPLSETKCTLKSFTVEKGIYQTSNFRVQPTESIVRFPNITNLCPFGEVFNATRFASVYAWNRKRISNCVADYSVLYNSASFSTFKCYGVSPTKLNDLCFTNVYADSFVIRGDEVRQIAPGQTGKIADYNYKLPDDFTGCVIAWNSNNLDSKVGGNYNYLYRLFRKSNLKPFERDISTEIYQAGSTPCNGVEGFNCYFPLQSYGFQPTNGVGYQPYRVVVLSFELLHAPATVCGPKKSTNLVKNKCVNFNFNGLTGTGVLTESNKKFLPFQQFGRDIADTTDAVRDPQTLEILDITPCSFGGVSVITPGTNTSNQVAVLYQDVNCTEVPVAIHADQLTPTWRVYSTGSNVFQTRAGCLIGAEHVNNSYECDIPIGAGICASYQTQTNSPRRARSVASQSIIAYTMSLGAENSVAYSNNSIAIPTNFTISVTTEILPVSMTKTSVDCTMYICGDSTECSNLLLQYGSFCTQLNRALTGIAVEQDKNTQEVFAQVKQIYKTPPIKDFGGFNFSQILPDPSKPSKRSFIEDLLFNKVTLADAGFIKQYGDCLGDIAARDLICAQKFNGLTVLPPLLTDEMIAQYTSALLAGTITSGWTFGAGAALQIPFAMQMAYRFNGIGVTQNVLYENQKLIANQFNSAIGKIQDSLSSTASALGKLQDVVNQNAQALNTLVKQLSSNFGAISSVLNDILSRLDPPEAEVQIDRLITGRLQSLQTYVTQQLIRAAEIRASANLAATKMSECVLGQSKRVDFCGKGYQLMSFPQSAPHGVVFLNVTYVPAQEKNFTTAPAICNDGKAHFPREGVFVSNGTNWFVTQRNFYEPQIITTDNTFVSGNCDVVIGIVNNTVYDPLQPELDSGGGGSDIDPYKEFGSSYQLLNFLPLDFFPDLNALVDTATALYEEELTGREHCSPHHTAIRQALVCWDELTKLIAWMSSNITSEQVRTIIVNHVNDTWGLKVRQSLWFHLSCLTFGQHTVQEFLVSFGVWIRTPAPYRPPNAPILSTLPEHTVIC

SEQ ID NO: 10930 - protein, 1301 aa, Artificial Sequence
  SARS-CoV-2/Guangdong/20SF028/2020__EPI_ISL_403936 spike protein (1-1147)(K986P_V987P_ H1048Q_H1064N_ H1083N_H1101N) WhcAg construct
MFVFLVLLPLVSSQCVNLTTRTQLPPAYTNSFTRGVYYPDKVFRSSVLYSTQDLFLPFFSNVTWFHAIHVSGTNGTKRFDNPVLPFNDGVYFASTEKSNIIRGWIFGTTLDSKTQSLLIVNNATNVVIKVCEFQFCNDPFLGVYYHKNNKSWMESEFRVYSSANNCTFEYVSQPFLMDLEGKQGNFKNLREFVFKNIDGYFKIYSKHTPINLVRDLPQGFSALEPLVDLPIGINITRFQTLLALHRSYLTPGDSSSGWTAGAAAYYVGYLQPRTFLLKYNENGTITDAVDCALDPLSETKCTLKSFTVEKGIYQTSNFRVQPTESIVRFPNITNLCPFGEVFNATRFASVYAWNRKRISNCVADYSVLYNSASFSTFKCYGVSPTKLNDLCFTNVYADSFVIRGDEVRQIAPGQTGKIADYNYKLPDDFTGCVIAWNSNNLDSKVGGNYNYLYRLFRKSNLKPFERDISTEIYQAGSTPCNGVEGFNCYFPLQSYGFQPTNGVGYQPYRVVVLSFELLHAPATVCGPKKSTNLVKNKCVNFNFNGLTGTGVLTESNKKFLPFQQFGRDIADTTDAVRDPQTLEILDITPCSFGGVSVITPGTNTSNQVAVLYQDVNCTEVPVAIHADQLTPTWRVYSTGSNVFQTRAGCLIGAEHVNNSYECDIPIGAGICASYQTQTNSPRRARSVASQSIIAYTMSLGAENSVAYSNNSIAIPTNFTISVTTEILPVSMTKTSVDCTMYICGDSTECSNLLLQYGSFCTQLNRALTGIAVEQDKNTQEVFAQVKQIYKTPPIKDFGGFNFSQILPDPSKPSKRSFIEDLLFNKVTLADAGFIKQYGDCLGDIAARDLICAQKFNGLTVLPPLLTDEMIAQYTSALLAGTITSGWTFGAGAALQIPFAMQMAYRFNGIGVTQNVLYENQKLIANQFNSAIGKIQDSLSSTASALGKLQDVVNQNAQALNTLVKQLSSNFGAISSVLNDILSRLDPPEAEVQIDRLITGRLQSLQTYVTQQLIRAAEIRASANLAATKMSECVLGQSKRVDFCGKGYQLMSFPQSAPHGVVFLNVTYVPAQEKNFTTAPAICNDGKAHFPREGVFVSNGTNWFVTQRNFYEPQIITTDNTFVSGNCDVVIGIVNNTVYDPLQPELDSGGGGSDIDPYKEFGSSYQLLNFLPLDFFPDLNALVDTATALYEEELTGREHCSPHHTAIRQALVCWDELTKLIAWMSSNITSEQVRTIIVNHVNDTWGLKVRQSLWFHLSCLTFGQHTVQEFLVSFGVWIRTPAPYRPPNAPILSTLPEHTVIC

SEQ ID NO: 10931 - protein, 1301 aa, Artificial Sequence
  SARS-CoV-2/Shenzhen/SZTH-001/2020__EPI_ISL_406592 spike protein (1-1147)(K986P_V987P_ H1048Q_H1064N_ H1083N_H1101N) WhcAg construct
MFVFLVLLPLVSSQCVNLTTRTQLPPAYTNSFTRGVYYPDKVFRSSVLHSTQDLFLPFFSNVTWFHAIHVSGTNGTKRFDNPVLPFNDGVYFASTEKSNIIRGWIFGTTLDSKTQSLLIVNNATNVVIKVCEFQFCNDPFLGVYYHKNNKSWMESEFRVYSSANNCTFEYVSQPFLMDLEGKQGNFKNLREFVFKNIDGYFKIYSKHTPINLVRDLPQGFSALEPLVDLPIGINITRFQTLLALHRSYLTPGDSSSGWTAGAAAYYVGYLQPRTFLLKYNENGTITDAVDCALDPLSETKCTLKSFTVEKGIYQTSNFRVQPTESIVRFPNITNLCPFGEVFNATRFASVYAWNRKRISNCVADYSVLYNSASFSTFKCYGVSPTKLNDLCFTNVYADSFVIRGDEVRQIAPGQTGKIADYNYKLPDDFTGCVIAWNSNNLDSKVGGNYNYLYRLFRKSNLKPFERDISTEIYQAGSTPCNGVEGFNCYFPLQSYGFQPTNGVGYQPYRVVVLSFELLHAPATVCGPKKSTNLVKNKCVNFNFNGLTGTGVLTESNKKFLPFQQFGRDIADTTDAVRDPQTLEILDITPCSFGGVSVITPGTNTSNQVAVLYQDVNCTEVPVAIHADQLTPTWRVYSTGSNVFQTRAGCLIGAEHVNNSYECDIPIGAGICASYQTQTNSPRRARSVASQSIIAYTMSLGAENSVAYSNNSIAIPTNFTISVTTEILPVSMTKTSVDCTMYICGDSTECSNLLLQYGSFCTQLNRALTGIAVEQDKNTQEVFAQVKQIYKTPPIKDFGGFNFSQILPDPSKPSKRSFIEDLLFNKVTLADAGFIKQYGDCLGDIAARDLICAQKFNGLTVLPPLLTDEMIAQYTSALLAGTITSGWTFGAGAALQIPFAMQMAYRFNGIGVTQNVLYENQKLIANQFNSAIGKIQDSLSSTASALGKLQDVVNQNAQALNTLVKQLSSNFGAISSVLNDILSRLDPPEAEVQIDRLITGRLQSLQTYVTQQLIRAAEIRASANLAATKMSECVLGQSKRVDFCGKGYQLMSFPQSAPHGVVFLNVTYVPAQEKNFTTAPAICNDGKAHFPREGVFVSNGTNWFVTQRNFYEPQIITTDNTFVSGNCDVLIGIVNNTVYDPLQPELDSGGGGSDIDPYKEFGSSYQLLNFLPLDFFPDLNALVDTATALYEEELTGREHCSPHHTAIRQALVCWDELTKLIAWMSSNITSEQVRTIIVNHVNDTWGLKVRQSLWFHLSCLTFGQHTVQEFLVSFGVWIRTPAPYRPPNAPILSTLPEHTVIC

SEQ ID NO: 10932 - protein, 1301 aa, Artificial Sequence
  SARS-CoV-2/Shenzhen/SZTH-004/2020__EPI_ISL_406595 spike protein (1-1147)(K986P_V987P_ H1048Q_H1064N_ H1083N_H1101N) WhcAg construct
MFVFLVLLPLVSSQCVNLTTRTQLPPAYTNSFTRGVYYPDKVFRSSVLHSTQDLFLPFFSNVTWFHAIHVSGTNGTKRFDNPVLPFNDGVYFASTEKSNIIRGWIFGTTLDSKTQSLLIVNNATNVVIKVCEFQFCNDPFLGVYYHKNNKSWMESEFRVYSSANNCTFEYVSQPFLMDLEGKQGNFKNLREFVFKNIDGYFKIYSKHTPINLVRDLPQGFSALEPLVDLPIGINITRFQTLLALHRSYLTPGDSSSGWTAGAAAYYVGYLQPRTFLLKYNENGTITDAVDCALDPLSETKCTLKSFTVEKGIYQTSNFRVQPTESIVRFPNITNLCPFGEVFNATRFASVYAWDRKRISNCVAYYSVLYNSASFSTFKCYGVSPTKLNDLCFTNVYADSFVIRGDEVRQIAPGQTGKIADYNYKLPDDFTGCVIAWNSNNLDSKVGGNYNYLYRLFRKSNLKPFERDISTEIYQAGSTPCNGVEGFNCYFPLQSYGFQPTNGVGYQPYRVVVLSFELLHAPATVCGPKKSTNLVKNKCVNFNFNGLTGTGVLTESNKKFLPFQQFGRDIADTTDAVRDPQTLEILDITPCSFGGVSVITPGTNTSNQVAVLYQDVNCTEVPVAIHADQLTPTWRVYSTGSNVFQTRAGCLIGAEHVNNSYECDIPIGAGICASYQTQTNSPRRARSVASQSIIAYTMSLGAENSVAYSNNSIAIPTNFTISVTTEILPVSMTKTSVDCTMYICGDSTECSNLLLQYGSFCTQLNRALTGIAVEQDKNTQEVFAQVKQIYKTPPIKDFGGFNFSQILPDPSKPSKRSFIEDLLFNKVTLADAGFIKQYGDCLGDIAARDLICAQKFNGLTVLPPLLTDEMIAQYTSALLAGTITSGWTFGAGAALQIPFAMQMAYRFNGIGVTQNVLYENQKLIANQFNSAIGKIQDSLSSTASALGKLQDVVNQNAQALNTLVKQLSSNFGAISSVLNDILSRLDPPEAEVQIDRLITGRLQSLQTYVTQQLIRAAEIRASANLAATKMSECVLGQSKRVDFCGKGYQLMSFPQSAPHGVVFLNVTYVPAQEKNFTTAPAICNDGKAHFPREGVFVSNGTNWFVTQRNFYEPQIITTDNTFVSGNCDVVIGIVNNTVYDPLQPELDSGGGGSDIDPYKEFGSSYQLLNFLPLDFFPDLNALVDTATALYEEELTGREHCSPHHTAIRQALVCWDELTKLIAWMSSNITSEQVRTIIVNHVNDTWGLKVRQSLWFHLSCLTFGQHTVQEFLVSFGVWIRTPAPYRPPNAPILSTLPEHTVIC

SEQ ID NO: 10933 - protein, 1301 aa, Artificial Sequence
  SARS-CoV-2/France/IDF0372/2020__EPI_ISL_406596 spike protein (1-1147)(K986P_V987P_ H1048Q_H1064N_ H1083N_H1101N) WhcAg construct
MFVFLVLLPLVSSQCVNLTTRTQLPPAYTNSFTRGVYYPDKVFRSSVLHSTQDLFLPFFSNVTWFHAIHVSGTNGTKRFDNPVLPFNDGVYFASTEKSNIIRGWIFGTTLDSKTQSLLIVNNATNVVIKVCEFQFCNDPFLGVYYHKNNKSWMESEFRVYSSANNCTFEYVSQPFLMDLEGKQGNFKNLREFVFKNIDGYFKIYSKHTPINLVRDLPQGFSALEPLVDLPIGINITRFQTLLALHRSYLTPGDSSSGWTAGAAAYYVGYLQPRTFLLKYNENGTITDAVDCALDPLSETKCTLKSFTVEKGIYQTSNFRVQPTESIVRFPNITNLCPFGEVFNATRFASVYAWNRKRISNCVADYSFLYNSASFSTFKCYGVSPTKLNDLCFTNVYADSFVIRGDEVRQIAPGQTGKIADYNYKLPDDFTGCVIAWNSNNLDSKVGGNYNYLYRLFRKSNLKPFERDISTEIYQAGSTPCNGVEGFNCYFPLQSYGFQPTNGVGYQPYRVVVLSFELLHAPATVCGPKKSTNLVKNKCVNFNFNGLTGTGVLTESNKKFLPFQQFGRDIADTTDAVRDPQTLEILDITPCSFGGVSVITPGTNTSNQVAVLYQDVNCTEVPVAIHADQLTPTWRVYSTGSNVFQTRAGCLIGAEHVNNSYECDIPIGAGICASYQTQTNSPRRARSVASQSIIAYTMSLGAENSVAYSNNSIAIPTNFTISVTTEILPVSMTKTSVDCTMYICGDSTECSNLLLQYGSFCTQLNRALTGIAVEQDKNTQEVFAQVKQIYKTPPIKDFGGFNFSQILPDPSKPSKRSFIEDLLFNKVTLADAGFIKQYGDCLGDIAARDLICAQKFNGLTVLPPLLTDEMIAQYTSALLAGTITSGWTFGAGAALQIPFAMQMAYRFNGIGVTQNVLYENQKLIANQFNSAIGKIQDSLSSTASALGKLQDVVNQNAQALNTLVKQLSSNFGAISSVLNDILSRLDPPEAEVQIDRLITGRLQSLQTYVTQQLIRAAEIRASANLAATKMSECVLGQSKRVDFCGKGYQLMSFPQSAPHGVVFLNVTYVPAQEKNFTTAPAICNDGKAHFPREGVFVSNGTNWFVTQRNFYEPQIITTDNTFVSGNCDVVIGIVNNTVYDPLQPELDSGGGGSDIDPYKEFGSSYQLLNFLPLDFFPDLNALVDTATALYEEELTGREHCSPHHTAIRQALVCWDELTKLIAWMSSNITSEQVRTIIVNHVNDTWGLKVRQSLWFHLSCLTFGQHTVQEFLVSFGVWIRTPAPYRPPNAPILSTLPEHTVIC

SEQ ID NO: 10934 - protein, 1301 aa, Artificial Sequence
  SARS-CoV-2/Australia/VIC01/2020__EPI_ISL_406844 spike protein (1-1147)(K986P_V987P_ H1048Q_H1064N_ H1083N_H1101N) WhcAg construct
MFVFLVLLPLVSSQCVNLTTRTQLPPAYTNSFTRGVYYPDKVFRSSVLHSTQDLFLPFFSNVTWFHAIHVSGTNGTKRFDNPVLPFNDGVYFASTEKSNIIRGWIFGTTLDSKTQSLLIVNNATNVVIKVCEFQFCNDPFLGVYYHKNNKSWMESEFRVYSSANNCTFEYVSQPFLMDLEGKQGNFKNLREFVFKNIDGYFKIYSKHTPINLVRDLPQGFSALEPLVDLPIGINITRFQTLLALHRRYLTPGDSSSGWTAGAAAYYVGYLQPRTFLLKYNENGTITDAVDCALDPLSETKCTLKSFTVEKGIYQTSNFRVQPTESIVRFPNITNLCPFGEVFNATRFASVYAWNRKRISNCVADYSVLYNSASFSTFKCYGVSPTKLNDLCFTNVYADSFVIRGDEVRQIAPGQTGKIADYNYKLPDDFTGCVIAWNSNNLDSKVGGNYNYLYRLFRKSNLKPFERDISTEIYQAGSTPCNGVEGFNCYFPLQSYGFQPTNGVGYQPYRVVVLSFELLHAPATVCGPKKSTNLVKNKCVNFNFNGLTGTGVLTESNKKFLPFQQFGRDIADTTDAVRDPQTLEILDITPCSFGGVSVITPGTNTSNQVAVLYQDVNCTEVPVAIHADQLTPTWRVYSTGSNVFQTRAGCLIGAEHVNNSYECDIPIGAGICASYQTQTNSPRRARSVASQSIIAYTMSLGAENSVAYSNNSIAIPTNFTISVTTEILPVSMTKTSVDCTMYICGDSTECSNLLLQYGSFCTQLNRALTGIAVEQDKNTQEVFAQVKQIYKTPPIKDFGGFNFSQILPDPSKPSKRSFIEDLLFNKVTLADAGFIKQYGDCLGDIAARDLICAQKFNGLTVLPPLLTDEMIAQYTSALLAGTITSGWTFGAGAALQIPFAMQMAYRFNGIGVTQNVLYENQKLIANQFNSAIGKIQDSLSSTASALGKLQDVVNQNAQALNTLVKQLSSNFGAISSVLNDILSRLDPPEAEVQIDRLITGRLQSLQTYVTQQLIRAAEIRASANLAATKMSECVLGQSKRVDFCGKGYQLMSFPQSAPHGVVFLNVTYVPAQEKNFTTAPAICNDGKAHFPREGVFVSNGTNWFVTQRNFYEPQIITTDNTFVSGNCDVVIGIVNNTVYDPLQPELDSGGGGSDIDPYKEFGSSYQLLNFLPLDFFPDLNALVDTATALYEEELTGREHCSPHHTAIRQALVCWDELTKLIAWMSSNITSEQVRTIIVNHVNDTWGLKVRQSLWFHLSCLTFGQHTVQEFLVSFGVWIRTPAPYRPPNAPILSTLPEHTVIC

SEQ ID NO: 10935 - protein, 1301 aa, Artificial Sequence
  SARS-CoV-2/Germany/BavPat1/2020__EPI_ISL_406862 spike protein (1-1147)(K986P_V987P_ H1048Q_H1064N_ H1083N_H1101N) WhcAg construct
MFVFLVLLPLVSSQCVNLTTRTQLPPAYTNSFTRGVYYPDKVFRSSVLHSTQDLFLPFFSNVTWFHAIHVSGTNGTKRFDNPVLPFNDGVYFASTEKSNIIRGWIFGTTLDSKTQSLLIVNNATNVVIKVCEFQFCNDPFLGVYYHKNNKSWMESEFRVYSSANNCTFEYVSQPFLMDLEGKQGNFKNLREFVFKNIDGYFKIYSKHTPINLVRDLPQGFSALEPLVDLPIGINITRFQTLLALHRSYLTPGDSSSGWTAGAAAYYVGYLQPRTFLLKYNENGTITDAVDCALDPLSETKCTLKSFTVEKGIYQTSNFRVQPTESIVRFPNITNLCPFGEVFNATRFASVYAWNRKRISNCVADYSVLYNSASFSTFKCYGVSPTKLNDLCFTNVYADSFVIRGDEVRQIAPGQTGKIADYNYKLPDDFTGCVIAWNSNNLDSKVGGNYNYLYRLFRKSNLKPFERDISTEIYQAGSTPCNGVEGFNCYFPLQSYGFQPTNGVGYQPYRVVVLSFELLHAPATVCGPKKSTNLVKNKCVNFNFNGLTGTGVLTESNKKFLPFQQFGRDIADTTDAVRDPQTLEILDITPCSFGGVSVITPGTNTSNQVAVLYQGVNCTEVPVAIHADQLTPTWRVYSTGSNVFQTRAGCLIGAEHVNNSYECDIPIGAGICASYQTQTNSPRRARSVASQSIIAYTMSLGAENSVAYSNNSIAIPTNFTISVTTEILPVSMTKTSVDCTMYICGDSTECSNLLLQYGSFCTQLNRALTGIAVEQDKNTQEVFAQVKQIYKTPPIKDFGGFNFSQILPDPSKPSKRSFIEDLLFNKVTLADAGFIKQYGDCLGDIAARDLICAQKFNGLTVLPPLLTDEMIAQYTSALLAGTITSGWTFGAGAALQIPFAMQMAYRFNGIGVTQNVLYENQKLIANQFNSAIGKIQDSLSSTASALGKLQDVVNQNAQALNTLVKQLSSNFGAISSVLNDILSRLDPPEAEVQIDRLITGRLQSLQTYVTQQLIRAAEIRASANLAATKMSECVLGQSKRVDFCGKGYQLMSFPQSAPHGVVFLNVTYVPAQEKNFTTAPAICNDGKAHFPREGVFVSNGTNWFVTQRNFYEPQIITTDNTFVSGNCDVVIGIVNNTVYDPLQPELDSGGGGSDIDPYKEFGSSYQLLNFLPLDFFPDLNALVDTATALYEEELTGREHCSPHHTAIRQALVCWDELTKLIAWMSSNITSEQVRTIIVNHVNDTWGLKVRQSLWFHLSCLTFGQHTVQEFLVSFGVWIRTPAPYRPPNAPILSTLPEHTVIC

SEQ ID NO: 10936 - protein, 1301 aa, Artificial Sequence
  SARS-CoV-2/Wuhan/HBCDC-HB-02/2020__EPI_ISL_412978 spike protein (1-1147)(K986P_V987P_ H1048Q_H1064N_ H1083N_H1101N) WhcAg construct
MFVFLVLLPLVSSQCVNLTTRTQLPPAYTNSFTRGVYYPDKVFRSSVLHSTQDLFLPFFSNVTWFHAIHVSGTNGTKRFDNPVLPFNDGVYFASTEKSNIIRGWIFGTTLDSKTQSLLIVNNATNVVIKVCEFQFCNDPFLGVYYHKNNKSWMESEFRVYSSANNCTFEYVSQPFLMDLEGKQGNFKNLREFVFKNIDGYFKIYSKHTPINLVRDLPQGFSALEPLVDLPIGINITRFQTLLALHRSYLTPGDSSSGWTAGAAAYYVGYLQPRTFLLKYNENGTITDAVDCALDPLSETKCTLKSFTVEKGIYQTSNFRVQPTESIVRFPNITNLCPFGEVFNATRFASVYAWNRKRISNCVADYSVLYNSASFSTFKCYGVSPTKLNDLCFTNVYADSFVIRGDEVRQIAPGQTGKIADYNYKLPDDFTGCVIAWNSNNLDSKVGGNYNYLYRLFRKSNLKPFERDISTEIYQAGSTPCNGVEGFNCYFPLQSYGFQPTNGVGYQPYRVVVLSFELLHAPATVCGPKKSTNLVKNKCVNFNFNGLTGTGVLTESNKKFLPFQQFGRDIADTTDAVRDPQTLEILDITPCSFGGVSVITPGTNTSNQVAVLYQDVNCTEVPVAIHADQLTPTWRVYSTGSNVFQTRAGCLIGAEHVNNSYECDIPIGAGICASYQTQTNSPRRARSVASQSIIAYTMSLGAENSVAYSNNSIAIPTNFTISVTTEILPVSMTKTSVDCTMYICGDSTECSNFLLQYGSFCTQLNRALTGIAVEQDKNTQEVFAQVKQIYKTPPIKDFGGFNFSQILPDPSKPSKRSFIEDLLFNKVTLADAGFIKQYGDCLGDIAARDLICAQKFNGLTVLPPLLTDEMIAQYTSALLAGTITSGWTFGAGAALQIPFAMQMAYRFNGIGVTQNVLYENQKLIANQFNSAIGKIQDSLSSTASALGKLQDVVNQNAQALNTLVKQLSSNFGAISSVLNDILSRLDPPEAEVQIDRLITGRLQSLQTYVTQQLIRAAEIRASANLAATKMSECVLGQSKRVDFCGKGYQLMSFPQSAPHGVVFLNVTYVPAQEKNFTTAPAICNDGKAHFPREGVFVSNGTNWFVTQRNFYEPQIITTDNTFVSGNCDVVIGIVNNTVYDPLQPELDSGGGGSDIDPYKEFGSSYQLLNFLPLDFFPDLNALVDTATALYEEELTGREHCSPHHTAIRQALVCWDELTKLIAWMSSNITSEQVRTIIVNHVNDTWGLKVRQSLWFHLSCLTFGQHTVQEFLVSFGVWIRTPAPYRPPNAPILSTLPEHTVIC

SEQ ID NO: 10937 - protein, 1301 aa, Artificial Sequence
  SARS-CoV-2/Australia/QLD02/2020__EPI_ISL_407896 spike protein (1-1147)(K986P_V987P_ H1048Q_H1064N_ H1083N_H1101N) WhcAg construct
MFVFLVLLPLVSSQCVNLTTRTQLPPAYTNSFTRGVYYPDKVFRSSVLHSTQDLFLPFFSNVTWFHAIHVSGTNGTKRFDNPVLPFNDGVYFASTEKSNIIRGWIFGTTLDSKTQSLLIVNNATNVVIKVCEFQFCNDPFLGVYYHKNNKSWMESEFRVYSSANNCTFEYVSQPFLMDLEGKQGNFKNLREFVFKNIDGYFKIYSKHTPINLVRDLPQGFSALEPLVDLPIGINITRFQTLLALHRSYLTPGDSSSGWTAGAAAYYVGYLQPRTFLLKYNENGTITDAVDCALDPLSETKCTLKSFTVEKGIYQTSNFRVQPTESIVRFPNITNLCPFGEVFNATRFASVYAWNRKRISNCVADYSVLYNSASFSTFKCYGVSPTKLNDLCFTNVYADSFVIRGDEVRQIAPGQTGKIADYNYKLPDDFTGCVIAWNSNNLDSKVGGNYNYLYRLFRKSNLKPFERDISTEIYQAGSTPCNGVEGFNCYFPLQSYGFQPTNGVGYQPYRVVVLSFELLHAPATVCGPKKSTNLVKNKCVNFNFNGLTGTGVLTESNKKFLPFQQFGRDIADTTDAVRDPQTLEILDITPCSFGGVSVITPGTNTSNQVAVLYQDVNCTEVPVAIHADQLTPTWRVYSTGSNVFQTRAGCLIGAEHVNNSYECDIPIGAGICASYQTQTNSPRRARSVASQSIIAYTMSLGAENSVAYSNNSIAIPTNFTISVTTEILPVSMTKTSVDCTMYICGDSTECSNLLLQYGSFCTQLNRALTGIAVEQDKNTQEVFAQVKQIYKTPPIKDFGGFNFSQILPDPSKPSKRSFIEDLLFNKVTLADAGFIKQYGDCLGDIAARDLICAQKFNGLTVLPPLLTDEMIAQYTSALLAGTITSGWTFGAGAALQIPFAMQMAYRFNGIGVTQNVLYENQKLIANQFNSAIGKIQDSLSSTASALGKLQDVVNQNAQALNTLVKQLSSNFGAISSVLNDILSRLDPPEAEVQIDRLITGRLQSLQTYVTQQLIRAAEIRASANLAATKMSECVLGQSKRVDFCGKGYQLMSFPQSAPHGVVFLNVTYVPAQEKNFTTAPAICNDGKAHFPREGVFVSNGTNWFVTQRNFYEPQIITTDNTFVSGNCDVVIGIVNNTVYDPLQLELDSGGGGSDIDPYKEFGSSYQLLNFLPLDFFPDLNALVDTATALYEEELTGREHCSPHHTAIRQALVCWDELTKLIAWMSSNITSEQVRTIIVNHVNDTWGLKVRQSLWFHLSCLTFGQHTVQEFLVSFGVWIRTPAPYRPPNAPILSTLPEHTVIC

SEQ ID NO: 10938 - protein, 1301 aa, Artificial Sequence
  SARS-CoV-2/India/1-31/2020__EPI_ISL_413523 spike protein (1-1147)(K986P_V987P_ H1048Q_H1064N_ H1083N_H1101N) WhcAg construct
MFVFLVLLPLVSSQCVNLTTRTQLPPAYTNSFTRGVYYPDKVFRSSVLHSTQDLFLPFFSNVTWFHAIHVSGTNGTKRFDNPVLPFNDGVYFASTEKSNIIRGWIFGTTLDSKTQSLLIVNNATNVVIKVCEFQFCNDPFLGVYYHKNNKSWMESEFRVYSSANNCTFEYVSQPFLMDLEGKQGNFKNLREFVFKNIDGYFKIYSKHTPINLVRDLPQGFSALEPLVDLPIGINITRFQTLLALHRSYLTPGDSSSGWTAGAAAYYVGYLQPRTFLLKYNENGTITDAVDCALDPLSETKCTLKSFTVEKGIYQTSNFRVQPTESIVRFPNITNLCPFGEVFNATRFASVYAWNRKRISNCVADYSVLYNSASFSTFKCYGVSPTKLNDLCFTNVYADSFVIRGDEVRQIAPGQTGKIADYNYKLPDDFTGCVIAWNSNNLDSKVGGNYNYLYRLFRKSNLKPFERDISTEIYQAGSTPCNGVEGFNCYFPLQSYGFQPTNGVGYQPYRVVVLSFELLHAPATVCGPKKSTNLVKNKCVNFNFNGLTGTGVLTESNKKFLPFQQFGRDIADTTDAVRDPQTLEILDITPCSFGGVSVITPGTNTSNQVAVLYQDVNCTEVPVAIHADQLTPTWRVYSTGSNVFQTRAGCLIGAEHVNNSYECDIPIGAGICASYQTQTNSPRRARSVASQSIIAYTMSLGAENSVAYSNNSIAIPTNFTISVTTEILPVSMTKTSVDCTMYICGDSTECSNLLLQYGSFCTQLNRALTGIAVEQDKNTQEVFAQVKQIYKTPPIKDFGGFNFSQILPDPSKPSKRSFIEDLLFNKVTLADAGFIKQYGDCLGDIAARDLICAQKFNGLTVLPPLLTDEMIAQYTSALLAGTITSGWTFGAGAALQIPFAMQMAYRFNGIGVTQNVLYENQKLIANQFNSVIGKIQDSLSSTASALGKLQDVVNQNAQALNTLVKQLSSNFGAISSVLNDILSRLDPPEAEVQIDRLITGRLQSLQTYVTQQLIRAAEIRASANLAATKMSECVLGQSKRVDFCGKGYQLMSFPQSAPHGVVFLNVTYVPAQEKNFTTAPAICNDGKAHFPREGVFVSNGTNWFVTQRNFYEPQIITTDNTFVSGNCDVVIGIVNNTVYDPLQPELDSGGGGSDIDPYKEFGSSYQLLNFLPLDFFPDLNALVDTATALYEEELTGREHCSPHHTAIRQALVCWDELTKLIAWMSSNITSEQVRTIIVNHVNDTWGLKVRQSLWFHLSCLTFGQHTVQEFLVSFGVWIRTPAPYRPPNAPILSTLPEHTVIC

SEQ ID NO: 10939 - protein, 1301 aa, Artificial Sequence
  SARS-CoV-2/Guangdong/GD2020087-P0008/2020__EPI_ISL_413863 spike protein (1-1147)(K986P_V987P_ H1048Q_H1064N_ H1083N_H1101N) WhcAg construct
MFVFLVLLPLVSSQCVNLTTRTQLPPAYTNSFTRGVYYPDKVFRSSVLHSTQDLFLPFFSNVTWFHAIHVSGTNGTKRFDNPVLPFNDGVYFASTEKSNIIRGWIFGTTLDSKTQSLLIVNNATNVVIKVCEFQFCNDPFLGVYYHKNNKSWMESEFRVYSSANNCTFEYVSQPFLMDLEGKQGNFKNLREFVFKNIDGYFKIYSKHTPINLVRDLPQGFSALEPLVDLPIGINITRFQTLLALHRSYLTPGDSSSGWTAGAAAYYVGYLQPRTFLLKYNENGTITDAVDCALDPLSETKCTLKSFTVEKGIYQTSNFRVQPTESIVRFPNITNLCPFGEVFNATRFASVYAWNRKRISNCVADYSVLYNSASFSTFKCYGVSPTKLNDLCFTNVYADSFVIRGDEVREIAPGQTGKIADYNYKLPDDFTGCVIAWNSNNLDSKVGGNYNYLYRLFRKSNLKPFERDISTEIYQAGSTPCNGVEGFNCYFPLQSYGFQPTNGVGYQPYRVVVLSFELLHAPATVCGPKKSTNLVKNKCVNFNFNGLTGTGVLTESNKKFLPFQQFGRDIADTTDAVRDPQTLEILDITPCSFGGVSVITPGTNTSNQVAVLYQDVNCTEVPVAIHADQLTPTWRVYSTGSNVFQTRAGCLIGAEHVNNSYECDIPIGAGICASYQTQTNSPRRARSVASQSIIAYTMSLGAENSVAYSNNSIAIPTNFTISVTTEILPVSMTKTSVDCTMYICGDSTECSNLLLQYGSFCTQLNRALTGIAVEQDKNTQEVFAQVKQIYKTPPIKDFGGFNFSQILPDPSKPSKRSFIEDLLFNKVTLADAGFIKQYGDCLGDIAARDLICAQKFNGLTVLPPLLTDEMIAQYTSALLAGTITSGWTFGAGAALQIPFAMQMAYRFNGIGVTQNVLYENQKLIANQFNSAIGKIQDSLSSTASALGKLQDVVNQNAQALNTLVKQLSSNFGAISSVLNDILSRLDPPEAEVQIDRLITGRLQSLQTYVTQQLIRAAEIRASANLAATKMSECVLGQSKRVDFCGKGYQLMSFPQSAPHGVVFLNVTYVPAQEKNFTTAPAICNDGKAHFPREGVFVSNGTNWFVTQRNFYEPQIITTDNTFVSGNCDVVIGIVNNTVYDPLQPELDSGGGGSDIDPYKEFGSSYQLLNFLPLDFFPDLNALVDTATALYEEELTGREHCSPHHTAIRQALVCWDELTKLIAWMSSNITSEQVRTIIVNHVNDTWGLKVRQSLWFHLSCLTFGQHTVQEFLVSFGVWIRTPAPYRPPNAPILSTLPEHTVIC

SEQ ID NO: 10940 - protein, 1301 aa, Artificial Sequence
  SARS-CoV-2/Sweden/01/2020__EPI_ISL_411951 spike protein (1-1147)(K986P_V987P_ H1048Q_H1064N_ H1083N_H1101N) WhcAg construct
MFVFLVLLPLVSSQCVNLTTRTQLPPAYTNSFTRGVYYPDKVFRSSVLHSTQDLFLPFFSNVTWFHAIHVSGTNGTKRFDNPVLPFNDGVYFASTEKSNIIRGWIFGTTLDSKTQSLLIVNNATNVVIKVCEFQFCNDPFLGVYYHKNNKSWMESEFRVYSSANNCTFEYVSQPFLMDLEGKQGNFKNLREFVFKNIDGYFKIYSKHTPINLVRDLPQGFSALEPLVDLPIGINITRFQTLLALHRSYLTPGDSSSGWTAGAAAYYVGYLQPRTFLLKYNENGTITDAVDCALDPLSETKCTLKSFTVEKGIYQTSNFRVQPTESIVRFPNITNLCPFGEVFNATRFASVYAWNRKRISNCVADYSVLYNSASFSTFKCYGVSPTKLNDLCFTNVYADSFVIRGDEVRQIAPGQTGKIADYNYKLPDDFTGCVIAWNSNNLDSKVGGNYNYLYRLFRKSNLKPFERDISTEIYQAGSTPCNGVEGFNCYFPLQSYGFQPTNGVGYQPYRVVVLSFELLHAPATVCGPKKSTNLVKNKCVNFNFNGLTGTGVLTESNKKFLPFQQFGRDIADTTDAVRDPQTLEILDITPCSFGGVSVITPGTNTSNQVAVLYQDVNCTEVPVAIHADQLTPTWRVYSTGSNVFQTRAGCLIGAEHVNNSYECDIPIGAGICASYQTQTNSPRRARSVASQSIIAYTMSLGAENSVAYSNNSIAIPTNFTISVTTEILPVSMTKTSVDCTMYICGDSTECSNLLLQYGSFCTQLNRALTGIAVEQDKNTQEVFAQVKQIYKTPPIKDCGGFNFSQILPDPSKPSKRSFIEDLLFNKVTLADAGFIKQYGDCLGDIAARDLICAQKFNGLTVLPPLLTDEMIAQYTSALLAGTITSGWTFGAGAALQIPFAMQMAYRFNGIGVTQNVLYENQKLIANQFNSAIGKIQDSLSSTASALGKLQDVVNQNAQALNTLVKQLSSNFGAISSVLNDILSRLDPPEAEVQIDRLITGRLQSLQTYVTQQLIRAAEIRASANLAATKMSECVLGQSKRVDFCGKGYQLMSFPQSAPHGVVFLNVTYVPAQEKNFTTAPAICNDGKAHFPREGVFVSNGTNWFVTQRNFYEPQIITTDNTFVSGNCDVVIGIVNNTVYDPLQPELDSGGGGSDIDPYKEFGSSYQLLNFLPLDFFPDLNALVDTATALYEEELTGREHCSPHHTAIRQALVCWDELTKLIAWMSSNITSEQVRTIIVNHVNDTWGLKVRQSLWFHLSCLTFGQHTVQEFLVSFGVWIRTPAPYRPPNAPILSTLPEHTVIC

SEQ ID NO: 10941 - protein, 1301 aa, Artificial Sequence
  SARS-CoV-2/Tianmen/HBCDC-HB-07/2020__EPI_ISL_412983 spike protein (1-1147)(K986P_V987P_ H1048Q_H1064N_ H1083N_H1101N) WhcAg construct
MFVFLVLLPLVSSQCVNLTTRTQLPPAYTNSFTRGVYYPDKVFRSSVLHSTQDLFLPFFSNVTWFHAIHVSGTNGTKRFDNPVLPFNDGVYFASTEKSNIIRGWIFGTTLDSKTQSLLIVNNATNVVIKVCEFQFCNDPFLGVYYHKNNKSWMESEFRVYSSANNCTFEYVSQPFLMDLEGKQGNFKNLREFVFKNIDGYFKIYSKHTPINLVRDLPQGFSALEPLVDLPIGINITRFQTLLALHRSYLTPGDSSSGWTAGAAAYYVGYLQPRTFLLKYNENGTITDAVDCALDPLSETKCTLKSFTVEKGIYQTSNFRVQPTESIVRFPNITNLCPFGEVFNATRFASVYAWNRKRISNCVADYSVLYNSASFSTFKCYGVSPTKLNDLCFTNVYADSFVIRGDEVRQIAPGQTGKIADYNYKLPDDFTGCVIAWNSNNLDSKVGGNYNYLYRLFRKSNLKPFERDISTEIYQAGSTPCNGVEGFNCYFPLQSYGFQPTNGVGYQPYRVVVLSFELLHAPATVCGPKKSTNLVKNKCVNFNFNGLTGTGVLTESNKKFLPFQQFGRDIADTTDAVRDPQTLEILDITPCSFGGVSVITPGTNTSNQVAVLYQDLNCTEVPVAIHADQLTPTWRVYSTGSNVFQTRAGCLIGAEHVNNSYECDIPIGAGICASYQTQTNSPRRARSVASQSIIAYTMSLGAENSVAYSNNSIAIPTNFTISVTTEILPVSMTKTSVDCTMYICGDSTECSNLLLQYGSFCTQLNRALTGIAVEQDKNTQEVFAQVKQIYKTPPIKDFGGFNFSQILPDPSKPSKRSFIEDLLFNKVTLADAGFIKQYGDCLGDIAARDLICAQKFNGLTVLPPLLTDEMIAQYTSALLAGTITSGWTFGAGAALQIPFAMQMAYRFNGIGVTQNVLYENQKLIANQFNSAIGKIQDSLSSTASALGKLQDVVNQNAQALNTLVKQLSSNFGAISSVLNDILSRLDPPEAEVQIDRLITGRLQSLQTYVTQQLIRAAEIRASANLAATKMSECVLGQSKRVDFCGKGYQLMSFPQSAPHGVVFLNVTYVPAQEKNFTTAPAICNDGKAHFPREGVFVSNGTNWFVTQRNFYEPQIITTDNTFVSGNCDVVIGIVNNTVYDPLQPELDSGGGGSDIDPYKEFGSSYQLLNFLPLDFFPDLNALVDTATALYEEELTGREHCSPHHTAIRQALVCWDELTKLIAWMSSNITSEQVRTIIVNHVNDTWGLKVRQSLWFHLSCLTFGQHTVQEFLVSFGVWIRTPAPYRPPNAPILSTLPEHTVIC

SEQ ID NO: 10942 - protein, 1301 aa, Artificial Sequence
  SARS-CoV-2/Hong Kong/case42_VM20002493/2020__EPI_ISL_414527 spike protein (1-1147)(K986P_V987P_ H1048Q_H1064N_ H1083N_H1101N) WhcAg construct
MFVFLVLLPLVSSQCVNLTTRTQLPPAYTNSFTRGVYYPDKVFRSSVLHSTQDLFLPFFSNVTWFHAIHVSGTNGTKRFDNPVLPFNDGVYFASTEKSNIIRGWIFGTTLDSKTQSLLIVNNATNVVIKVCEFQFCNDPFLGVYYHKNNKSWMESEFRVYSSANNCTFEYVSQPFLMDLEGKQGNFKNLREFVFKNIDGYFKIYSKHTPINLVRDLPQGFSALEPLVDLPIGINITRFQTLLALHRSYLTPGDSSSGWTAGAAAYYVGYLQPRTFLLKYNENGTITDAVDCALDPLSETKCTLKSFTVEKGIYQTSNFRVQPTESIVRFPNITNLCPFGEVFNATRFASVYAWNRKRISNCVADYSVLYNSASFSTFKCYGVSPTKLNDLCFTNVYADSFVIRGDEVRQIAPGQTGKIADYNYKLPDDFTGCVIAWNSNNLDSKVGGNYNYLYRLFRKSNLKPFERDISTEIYQAGSTPCNGVEGFNCYFPLQSYGFQPTNGVGYQPYRVVVLSFELLHAPATVCGPKKSTNLVKNKCVNFNFNGLTGTGVLTESNKKFLPFQQFGRDIADTTDAVRDPQTLEILDITPCSFGGVSVITPGTNTSNQVAVLYQDVNCTEVPVAIHADQLTPTWRVYSTGSNVFQTRAGCLIGAEHVNNSYECDIPIGAGICASYQTQTNSPRRARSVASQSIIAYTMSLGAENSVAYSNNSIAIPTNFAISVTTEILPVSMTKTSVDCTMYICGDSTECSNLLLQYGSFCTQLNRALTGIAVEQDKNTQEVFAQVKQIYKTPPIKDFGGFNFSQILPDPSKPSKRSFIEDLLFNKVTLADAGFIKQYGDCLGDIAARDLICAQKFNGLTVLPPLLTDEMIAQYTSALLAGTITSGWTFGAGAALQIPFAMQMAYRFNGIGVTQNVLYENQKLIANQFNSAIGKIQDSLSSTASALGKLQDVVNQNAQALNTLVKQLSSNFGAISSVLNDILSRLDPPEAEVQIDRLITGRLQSLQTYVTQQLIRAAEIRASANLAATKMSECVLGQSKRVDFCGKGYQLMSFPQSAPHGVVFLNVTYVPAQEKNFTTAPAICNDGKAHFPREGVFVSNGTNWFVTQRNFYEPQIITTDNTFVSGNCDVVIGIVNNTVYDPLQPELDSGGGGSDIDPYKEFGSSYQLLNFLPLDFFPDLNALVDTATALYEEELTGREHCSPHHTAIRQALVCWDELTKLIAWMSSNITSEQVRTIIVNHVNDTWGLKVRQSLWFHLSCLTFGQHTVQEFLVSFGVWIRTPAPYRPPNAPILSTLPEHTVIC

SEQ ID NO: 10943 - protein, 1301 aa, Artificial Sequence
  SARS-CoV-2/USA/CruiseA-23/2020__EPI_ISL_414482 spike protein (1-1147)(K986P_V987P_ H1048Q_H1064N_ H1083N_H1101N) WhcAg construct
MFVFLVLLPLVSSQCVNLTTRTQLPPAYTNSFTRGVYYPDKVFRSSVLHSTQDLFLPFFSNVTWFHAIHVSGTNGTKRFDNPVLPFNDGVYFASTEKSNIIRGWIFGTTLDSKTQSLLIVNNATNVVIKVCEFQFCNDPFLGVYYHKNNKSWMESEFRVYSSANNCTFEYVSQPFLMDLEVKQGNFKNLREFVFKNIDGYFKIYSKHTPINLVRDLPQGFSALEPLVDLPIGINITRFQTLLALHRSYLTPGDSSSGWTAGAAAYYVGYLQPRTFLLKYNENGTITDAVDCALDPLSETKCTLKSFTVEKGIYQTSNFRVQPTESIVRFPNITNLCPFGEVFNATRFASVYAWNRKRISNCVADYSVLYNSASFSTFKCYGVSPTKLNDLCFTNVYADSFVIRGDEVRQIAPGQTGKIADYNYKLPDDFTGCVIAWNSNNLDSKVGGNYNYLYRLFRKSNLKPFERDISTEIYQAGSTPCNGVEGFNCYFPLQSYGFQPTNGVGYQPYRVVVLSFELLHAPATVCGPKKSTNLVKNKCVNFNFNGLTGTGVLTESNKKFLPFQQFGRDIADTTDAVRDPQTLEILDITPCSFGGVSVITPGTNTSNQVAVLYQDVNCTEVPVAIHADQLTPTWRVYSTGSNVFQTRAGCLIGAEHVNNSYECDIPIGAGICASYQTQTNSPRRARSVASQSIIAYTMSLGAENSVAYSNNSIAIPTNFTISVTTEILPVSMTKTSVDCTMYICGDSTECSNLLLQYGSFCTQLNRALTGIAVEQDKNTQEVFAQVKQIYKTPPIKDFGGFNFSQILPDPSKPSKRSFIEDLLFNKVTLADAGFIKQYGDCLGDIAARDLICAQKFNGLTVLPPLLTDEMIAQYTSALLAGTITSGWTFGAGAALQIPFAMQMAYRFNGIGVTQNVLYENQKLIANQFNSAIGKIQDSLSSTASALGKLQDVVNQNAQALNTLVKQLSSNFGAISSVLNDILSRLDPPEAEVQIDRLITGRLQSLQTYVTQQLIRAAEIRASANLAATKMSECVLGQSKRVDFCGKGYQLMSFPQSAPHGVVFLNVTYVPAQEKNFTTAPAICNDGKAHFPREGVFVSNGTNWFVTQRNFYEPQIITTDNTFVSGNCDVVIGIVNNTVYDPLQPELDSGGGGSDIDPYKEFGSSYQLLNFLPLDFFPDLNALVDTATALYEEELTGREHCSPHHTAIRQALVCWDELTKLIAWMSSNITSEQVRTIIVNHVNDTWGLKVRQSLWFHLSCLTFGQHTVQEFLVSFGVWIRTPAPYRPPNAPILSTLPEHTVIC

SEQ ID NO: 10944 - protein, 1301 aa, Artificial Sequence
  SARS-CoV-2/Hong Kong/case85_VM20002868/2020__EPI_ISL_414519 spike protein (1-1147)(K986P_V987P_ H1048Q_H1064N_ H1083N_H1101N) WhcAg construct
MFVFLVLVPLVSSQCVNLTTRTQLPPAYTNSFTRGVYYPDKVFRSSVLHSTQDLFLPFFSNVTWFHAIHVSGTNGTKRFDNPVLPFNDGVYFASTEKSNIIRGWIFGTTLDSKTQSLLIVNNATNVVIKVCEFQFCNDPFLGVYYHKNNKSWMESEFRVYSSANNCTFEYVSQPFLMDLEGKQGNFKNLREFVFKNIDGYFKIYSKHTPINLVRDLPQGFSALEPLVDLPIGINITRFQTLLALHRSYLTPGDSSSGWTAGAAAYYVGYLQPRTFLLKYNENGTITDAVDCALDPLSETKCTLKSFTVEKGIYQTSNFRVQPTESIVRFPNITNLCPFGEVFNATRFASVYAWNRKRISNCVADYSVLYNSASFSTFKCYGVSPTKLNDLCFTNVYADSFVIRGDEVRQIAPGQTGKIADYNYKLPDDFTGCVIAWNSNNLDSKVGGNYNYLYRLFRKSNLKPFERDISTEIYQAGSTPCNGVEGFNCYFPLQSYGFQPTNGVGYQPYRVVVLSFELLHAPATVCGPKKSTNLVKNKCVNFNFNGLTGTGVLTESNKKFLPFQQFGRDIADTTDAVRDPQTLEILDITPCSFGGVSVITPGTNTSNQVAVLYQDVNCTEVPVAIHADQLTPTWRVYSTGSNVFQTRAGCLIGAEHVNNSYECDIPIGAGICASYQTQTNSPRRARSVASQSIIAYTMSLGAENSVAYSNNSIAIPTNFTISVTTEILPVSMTKTSVDCTMYICGDSTECSNLLLQYGSFCTQLNRALTGIAVEQDKNTQEVFAQVKQIYKTPPIKDFGGFNFSQILPDPSKPSKRSFIEDLLFNKVTLADAGFIKQYGDCLGDIAARDLICAQKFNGLTVLPPLLTDEMIAQYTSALLAGTITSGWTFGAGAALQIPFAMQMAYRFNGIGVTQNVLYENQKLIANQFNSAIGKIQDSLSSTASALGKLQDVVNQNAQALNTLVKQLSSNFGAISSVLNDILSRLDPPEAEVQIDRLITGRLQSLQTYVTQQLIRAAEIRASANLAATKMSECVLGQSKRVDFCGKGYQLMSFPQSAPHGVVFLNVTYVPAQEKNFTTAPAICNDGKAHFPREGVFVSNGTNWFVTQRNFYEPQIITTDNTFVSGNCDVVIGIVNNTVYDPLQPELDSGGGGSDIDPYKEFGSSYQLLNFLPLDFFPDLNALVDTATALYEEELTGREHCSPHHTAIRQALVCWDELTKLIAWMSSNITSEQVRTIIVNHVNDTWGLKVRQSLWFHLSCLTFGQHTVQEFLVSFGVWIRTPAPYRPPNAPILSTLPEHTVIC

SEQ ID NO: 10945 - protein, 1301 aa, Artificial Sequence; identical to SEQ ID NO: 10935
  SARS-CoV-2/England/200990660/2020__EPI_ISL_414523 spike protein (1-1147)(K986P_V987P_ H1048Q_H1064N_ H1083N_H1101N) WhcAg construct

SEQ ID NO: 10946 - protein, 1301 aa, Artificial Sequence
  SARS-CoV-2/Australia/NSW09/2020__EPI_ISL_413595 spike protein (1-1147)(K986P_V987P_ H1048Q_H1064N_ H1083N_H1101N) WhcAg construct
MFVFLVLLPLVSSQCVNLTTRTQLPPAYTNSFTRGVYYPDKVFRSSVLHSTQDLFLPFFSNVTWFHAIHVSGTNGTKRFDNPVLPFNDGVYFASTEKSNIIRGWIFGTTLDSKTQSLLIVNNATNVVIKVCEFQFCNDPFLGVYYHKNNKSWMESEFRVYSSANNCTFEYVSQPFLMDLEGKQGNFKNLREFVFKNIDGYFKIYSKHTPINLVRDLPQGFSALEPLVDLPIGINITRFQTLLALHRSYLTPGDSSSGWTAGAAAYYVGYLQPRTFLLKYNENGTITDAVDCALDPLSETKCTLKSFTVEKGIYQTSNFRVQPTESIVRFPNITNLCPFGEVFNATRFASVYAWNRKRISNCVADYSVLYNSASFSTFKCYGVSPTKLNDLCFTNVYADSFVIRGDEVRQIAPGQTGKIADYNYKLPDDFTGCVIAWNSNNLDSKVGGNYNYLYRLFRKSNLKPFERDISTEIYQAGSTPCNGVEGFNCYFPLQSYGFQPTNGVGYQPYRVVVLSFELLHAPATVCGPKKSTNLVKNKCVNFNFNGLTGTGVLTESNKKFLPFQQFGRDIADTTDAVRDPQTLEILDITPCSFGGVSVITPGTNTSNQVAVLYQDVNCTEVPVAIHADQLTPTWRVYSTGSNVFQTRAGCLIGAEHVNNSYECDIPIGAGICASYQTQTNSPRRARSVASQSIIAYTMSLGAENSVAYSNNSIAIPTNFTISVTTEILPVSMTKTSVDCTMYICGDSTECSNLLLQYGSFCTQLNRALTGIAVEQDKNTQEVFAQVKQIYKTPPIKDFGGFNFSQILPDPSKPSKRSFIEDLLFNKVTLADAGFIKQYGDCLGDIAARDLICAQKFNGLTVLPPLLTDEMIAQYTSALLAGTITSGWTFGAGAALQIPFAMQMAYRFNGIGVTQNVLYENQKLIANQFNSAIGKIQDSLSFTASALGKLQDVVNQNAQALNTLVKQLSSNFGAISSVLNDILSRLDPPEAEVQIDRLITGRLQSLQTYVTQQLIRAAEIRASANLAATKMSECVLGQSKRVDFCGKGYQLMSFPQSAPHGVVFLNVTYVPAQEKNFTTAPAICNDGKAHFPREGVFVSNGTNWFVTQRNFYEPQIITTDNTFVSGNCDVVIGIVNNTVYDPLQPELDSGGGGSDIDPYKEFGSSYQLLNFLPLDFFPDLNALVDTATALYEEELTGREHCSPHHTAIRQALVCWDELTKLIAWMSSNITSEQVRTIIVNHVNDTWGLKVRQSLWFHLSCLTFGQHTVQEFLVSFGVWIRTPAPYRPPNAPILSTLPEHTVIC

SEQ ID NO: 10947 - protein, 1301 aa, Artificial Sequence; identical to SEQ ID NO: 10927
  SARS-CoV-2/Australia/NSW10/2020__EPI_ISL_413596 spike protein (1-1147)(K986P_V987P_ H1048Q_H1064N_ H1083N_H1101N) WhcAg construct

SEQ ID NO: 10948 - protein, 1301 aa, Artificial Sequence
  SARS-CoV-2/Switzerland/1000477797/2020__EPI_ISL_413023 spike protein (1-1147)(K986P_V987P_ H1048Q_H1064N_ H1083N_H1101N) WhcAg construct
MFVFLVLLPLVSSQCVNLTTRTQLPPAYTNSFTRGVYYPDKVFRSSVLHSTQDLFLPFFSNVTWFHAIHVSGTNGTKRFDNPVLPFNDGVYFASTEKSNIIRGWIFGTTLDSKTQSLLIVNNATNVVIKVCEFQFCNDPFLGVYYHKNNKSWMESEFRVYSSANNCTFEYVSQPFLMDLEGKQGNFKNLREFVFKNIDGYFNIYSKHTPINLVRDLPQGFSALEPLVDLPIGINITRFQTLLALHRSYLTPGDSSSGWTAGAAAYYVGYLQPRTFLLKYNENGTITDAVDCALDPLSETKCTLKSFTVEKGIYQTSNFRVQPTESIVRFPNITNLCPFGEVFNATRFASVYAWNRKRISNCVADYSVLYNSASFSTFKCYGVSPTKLNDLCFTNVYADSFVIRGDEVRQIAPGQTGKIADYNYKLPDDFTGCVIAWNSNNLDSKVGGNYNYLYRLFRKSNLKPFERDISTEIYQAGSTPCNGVEGFNCYFPLQSYGFQPTNGVGYQPYRVVVLSFELLHAPATVCGPKKSTNLVKNKCVNFNFNGLTGTGVLTESNKKFLPFQQFGRDIADTTDAVRDPQTLEILDITPCSFGGVSVITPGTNTSNQVAVLYQGVNCTEVPVAIHADQLTPTWRVYSTGSNVFQTRAGCLIGAEHVNNSYECDIPIGAGICASYQTQTNSPRRARSVASQSIIAYTMSLGAENSVAYSNNSIAIPTNFTISVTTEILPVSMTKTSVDCTMYICGDSTECSNLLLQYGSFCTQLNRALTGIAVEQDKNTQEVFAQVKQIYKTPPIKDFGGFNFSQILPDPSKPSKRSFIEDLLFNKVTLADAGFIKQYGDCLGDIAARDLICAQKFNGLTVLPPLLTDEMIAQYTSALLAGTITSGWTFGAGAALQIPFAMQMAYRFNGIGVTQNVLYENQKLIANQFNSAIGKIQDSLSSTASALGKLQDVVNQNAQALNTLVKQLSSNFGAISSVLNDILSRLDPPEAEVQIDRLITGRLQSLQTYVTQQLIRAAEIRASANLAATKMSECVLGQSKRVDFCGKGYQLMSFPQSAPHGVVFLNVTYVPAQEKNFTTAPAICNDGKAHFPREGVFVSNGTNWFVTQRNFYEPQIITTDNTFVSGNCDVVIGIVNNTVYDPLQPELDSGGGGSDIDPYKEFGSSYQLLNFLPLDFFPDLNALVDTATALYEEELTGREHCSPHHTAIRQALVCWDELTKLIAWMSSNITSEQVRTIIVNHVNDTWGLKVRQSLWFHLSCLTFGQHTVQEFLVSFGVWIRTPAPYRPPNAPILSTLPEHTVIC

SEQ ID NO: 10949 - protein, 1301 aa, Artificial Sequence
  SARS-CoV-2/Belgium/BA-02291/2020__EPI_ISL_415159 spike protein (1-1147)(K986P_V987P_ H1048Q_H1064N_ H1083N_H1101N) WhcAg construct
MFVFLVLLPLVSSQCVNLTTRTQLPPAYTNSFTRGVYYPDKVFRSSVLHSTQDLFLPFFSNVTWFHAIHVSGTNGTKRFDNPVLPFNDGVYFASTEKSNIIRGWIFGTTLDSKTQSLLIVNNATNVVIKVCEFQFCNDPFLGVYYHKNNKSWMESEFRVYSSANNCTFEYVSQPFLMDLEGKQGNFKNLREFVFKNIDGYFKIYSKHTPINLVRDLPQGFSALEPLVDLPIGINITRFQTLLALHRSYLTPGDSSSGWTAGAAAYYVGYLQPRTFLLKYNENGTITDAVDCALDPLSETKCTLKSFTVEKGIYQTSNFRVQPTESIVRFPNITNLCPFGEVFNATRFASVYAWNRKRISNCVADYSVLYNSASFSTFKCYGVSPTKLNDLCFTNVYADSFVIRGDEVRQIAPGQTGKIADYNYKLPDDFTGCVIAWNSNNLDSKVGGNYNYLYRLFRRSNLKPFERDISTEIYQAGSTPCNGVEGFNCYFPLQSYGFQPTNGVGYQPYRVVVLSFELLPAPATVCGPKKSTNLVKNKCVNFNFNGLTGTGVLTESNKKFLPFQQFGRDIADTTDAVRDPQTLEILDITPCSFGGVSVITPGTNTSNQVAVLYQGVNCTEVPVAIHADQLTPTWRVYSTGSNVFQTRAGCLIGAEHVNNSYECDIPIGAGICASYQTQTNSPRRARSVASQSIIAYTMSLGAENSVAYSNNSIAIPTNFTISVTTEILPVSMTKTSVDCTMYICGDSTECSNLLLQYGSFCTQLNRALTGIAVEQDKNTQEVFAQVKQIYKTPPIKDFGGFNFSQILPDPSKPSKRSFIEDLLFNKVTLADAGFIKQYGDCLGDIAARDLICAQKFNGLTVLPPLLTDEMIAQYTSALLAGTITSGWTFGAGAALQIPFAMQMAYRFNGIGVTQNVLYENQKLIANQFNSAIGKIQDSLSSAAPALGKLQDVVNQNAQALNTLVKQLSSNFGAISSVLNDILSRLDPPEAEVQIDRLITGRLQSLQTYVTQQLIRAAEIRASANLAATKMSECVLGQSKRVDFCGKGYQLMSFPQSAPHGVVFLNVTYVPAQEKNFTTAPAICNDGKAHFPREGVFVSNGTNWFVTQRNFYEPQIITTDNTFVSGNCDVVIGIVNNTVYDPLQPELDSGGGGSDIDPYKEFGSSYQLLNFLPLDFFPDLNALVDTATALYEEELTGREHCSPHHTAIRQALVCWDELTKLIAWMSSNITSEQVRTIIVNHVNDTWGLKVRQSLWFHLSCLTFGQHTVQEFLVSFGVWIRTPAPYRPPNAPILSTLPEHTVIC

SEQ ID NO: 10950 - protein, 1301 aa, Artificial Sequence
  SARS-CoV-2/USA/WA8-UW5/2020__EPI_ISL_413486 spike protein (1-1147)(K986P_V987P_ H1048Q_H1064N_ H1083N_H1101N) WhcAg construct
MFVFLVLLPLVSSQCVNLTTRTQLPPAYTNSFTRGVYYPDKVFRSSVLHSTQDLFLPFFSNVTWFHAIHVSGTNGTKRFDNPVLPFNDGVYFASTEKSNIIRGWIFGTTLDSKTQSLLIVNNATNVVIKVCEFQFCNDPFLGVYYHKNNKSWMESEFRVYSSANNCTFEYVSQPFLMDLEGKQGNFKNLREFVFKNIDGYFKIYSKHTPINLVRDLPQGFSALEPLVDLPIGINITRFQTLLALHRSYLTPGDSSSGWTAGAAAYYVGYLQPRTFLLKYNENGTITDAVDCALDPLSETKCTLKSFTVEKGIYQTSNFRVQPTESIVRFPNITNLCPFGEVFNATRFASVYAWNRKRISNCVADYSVLYNSASFSTFKCYGVSPTKLNDLCFTNVYADSFVIRGDEVRQIAPGQTGKIADYNYKLPDDFTGCVIAWNSNNLDSKVGGNYNYLYRLFRKSNLKPFERDISTEIYQAGSTPCNGVEGFNCYFPLQSYGFQPTNGVGYQPYRVVVLSFELLHAPATVCGPKKSTNLVKNKCVNFNFNGLTGTGVLTESNKKFLPFQQFGRDIADTTDAVRDPQTLEILDITPCSFGGVSVITPGTNTSNQVAVLYQDVNCTEVPVAIHADQLTPTWRVYSTGSNVFQTRAGCLIGAEYVNNSYECDIPIGAGICASYQTQTNSPRRARSVASQSIIAYTMSLGAENSVAYSNNSIAIPTNFTISVTTEILPVSMTKTSVDCTMYICGDSTECSNLLLQYGSFCTQLNRALTGIAVEQDKNTQEVFAQVKQIYKTPPIKDFGGFNFSQILPDPSKPSKRSFIEDLLFNKVTLADAGFIKQYGDCLGDIAARDLICAQKFNGLTVLPPLLTDEMIAQYTSALLAGTITSGWTFGAGAALQIPFAMQMAYRFNGIGVTQNVLYENQKLIANQFNSAIGKIQDSLSSTASALGKLQDVVNQNAQALNTLVKQLSSNFGAISSVLNDILSRLDPPEAEVQIDRLITGRLQSLQTYVTQQLIRAAEIRASANLAATKMSECVLGQSKRVDFCGKGYQLMSFPQSAPHGVVFLNVTYVPAQEKNFTTAPAICNDGKAHFPREGVFVSNGTNWFVTQRNFYEPQIITTDNTFVSGNCDVVIGIVNNTVYDPLQPELDSGGGGSDIDPYKEFGSSYQLLNFLPLDFFPDLNALVDTATALYEEELTGREHCSPHHTAIRQALVCWDELTKLIAWMSSNITSEQVRTIIVNHVNDTWGLKVRQSLWFHLSCLTFGQHTVQEFLVSFGVWIRTPAPYRPPNAPILSTLPEHTVIC

SEQ ID NO: 10951 - protein, 1301 aa, Artificial Sequence
  SARS-CoV-2/England/20102000506/2020__EPI_ISL_415147 spike protein (1-1147)(K986P_V987P_ H1048Q_H1064N_ H1083N_H1101N) WhcAg construct
MFVFLVLLPLVSSQCVNLTTRTQLPPAYTNSFTRGVYYPDKVFRSSVLHSTQDLFLPFFSNVTWFHAIHVSGTNGTKRFDNPVLPFNDGVYFASTEKSNIIRGWIFGTTLDSKTQSLLIVNNATNVVIKVCEFQFCNDPFLGVYYHKNNKSWMESEFRVYSSANNCTFEYVSQPFLMDLEGKQGNFKNLREFVFKNIDGYFKIYSKHTPINLVRDLPQGFSALEPLVDLPIGINITRFQTLLALHRSYLTPGDSSSGWTAGAAAYYVGYLQPRTFLLKYNENGTITDAVDCALDPLSETKCTLKSFTVEKGIYQTSNFRVQPTESIVRFPNITNLCPFGEVFNATRFASVYAWNRKRISNCVADYSVLYNSASFSTFKCYGVSPTKLNDLCFTNVYADSFVIRGDEVRQIAPGQTGKIADYNYKLPDDFTGCVIAWNSNNLDSKVGGNYNYLYRLFRKSNLKPFERDISTEIYQAGSTPCNGVEGFNCYFPLQSYGFQPTNGVGYQPYRVVVLSFELLHAPATVCGPKKSTNLVKNKCVNFNFNGLTGTGVLTESNKKFLPFQQFGRDIADTTDAVRDPQTLEILDITPCSFGGVSVITPGTNTSNQVAVLYQGVNCTEVPVAIHADQLTPTWRVYSTGSNVFQTRAGCLIGAEHVNNSYECDIPIGAGICASYQTQTNSPRRARSVASQSIIAYTMSLGAENSVAYSNNSIAIPTNFTISVTTEILPVSMTKTSVDCTMYICGDSTECSNLLLQYGSFCTQLNRALTGIAVEQDKNTQEVFAQVKQIYKTPPIKDFGGFNFSQILPDPSKPSKRSFIEDLLFNKVTLADAGFIKQYGYCLGDIAARDLICAQKFNGLTVLPPLLTDEMIAQYTSALLAGTITSGWTFGAGAALQIPFAMQMAYRFNGIGVTQNVLYENQKLIANQFNSAIGKIQDSLSSTASALGKLQDVVNQNAQALNTLVKQLSSNFGAISSVLNDILSRLDPPEAEVQIDRLITGRLQSLQTYVTQQLIRAAEIRASANLAATKMSECVLGQSKRVDFCGKGYQLMSFPQSAPHGVVFLNVTYVPAQEKNFTTAPAICNDGKAHFPREGVFVSNGTNWFVTQRNFYEPQIITTDNTFVSGNCDVVIGIVNNTVYDPLQPELDSGGGGSDIDPYKEFGSSYQLLNFLPLDFFPDLNALVDTATALYEEELTGREHCSPHHTAIRQALVCWDELTKLIAWMSSNITSEQVRTIIVNHVNDTWGLKVRQSLWFHLSCLTFGQHTVQEFLVSFGVWIRTPAPYRPPNAPILSTLPEHTVIC

SEQ ID NO: 10952 - protein, 1301 aa, Artificial Sequence
  SARS-CoV-2/Belgium/VAG-03013/2020__EPI_ISL_415155 spike protein (1-1147)(K986P_V987P_ H1048Q_H1064N_ H1083N_H1101N) WhcAg construct
MFVFLVLLPLVSSQCVNLTTRTQLPPAYTNSFTRGVYYPDKVFRSSVLHSTQDLFLPFFSNVTWFHAIHVSGTNGTKRFDNPVLPFNDGVYFASTEKSNIIRGWIFGTTLDSKTQSLLIVNNATNVVIKVCEFQFCNDPFLGVYYHKNNKSWMESEFRVYSSANNCTFEYVSQPFLMDLEGKQGNFKNLREFVFKNIDGYFKIYSKHTPINLVRDLPQGFSALEPLVDLPIGINITRFQTLLALHRSYLTPGDSSSGWTAGAAAYYVGYLQPRTFLLKYNENGTITDAVDCALDPLSETKCTLKSFTVEKGIYQTSNFRVQPTESIVRFPNITNLCPFGEVFNATRFASVYAWNRKRISNCVADYSVLYNSASFSTFKCYGVSPTKLNDLCFTNVYADSFVIRGDEVRQIAPGQTGKIADYNYKLPDDFTGCVIAWNSNNLDSKVGGNYNYLYRLFRKSNLKPFERDISTEIYQAGSTPCNGVEGFNCYFPLQSYGFQPTNGVGYQPYRVVVLSFELLHAPATVCGPKKSTNLVKNKCVNFNFNGLTGTGVLTESNKKFLPFQQFGRDIADTTDAVRDPQTLEILDITPCSFGGVSVITPGTNTSNQVAVLYQGVNCTEVPVAIHADQLTPTWRVYSTGSNVFQTRAGCLIGAEHVNNSYECDIPIGAGICASYQTQTNSPRRARSVASQSIIAYTMSLGAENSVAYSNNSIAIPTNFTISVTTEILPVSMTKTSVDCTMYICGDSTECSNLLLQYGSFCTQLNRALTGIAVEQDKNTQEVFAQVKQIYKTPPIKDFGGFNFSQILPDPSKPSKRSFIEDLLFNKVTLADAGFIKQYGDCLGDIAARDLICAQKFNGLTVLPPLLTDEMIAQYTSALLAGTITSGWTFGAGAALQIPFAMQMAYRFNGIGVTQNVLYENQKLIANQFNSAIGKIQDSLSSTATALGKLQDVVNQNAQALNTLVKQLSSNFGAISSVLNDILSRLDPPEAEVQIDRLITGRLQSLQTYVTQQLIRAAEIRASANLAATKMSECVLGQSKRVDFCGKGYQLMSFPQSAPHGVVFLNVTYVPAQEKNFTTAPAICNDGKAHFPREGVFVSNGTNWFVTQRNFYEPQIITTDNTFVSGNCDVVIGIVNNTVYDPLQPELDSGGGGSDIDPYKEFGSSYQLLNFLPLDFFPDLNALVDTATALYEEELTGREHCSPHHTAIRQALVCWDELTKLIAWMSSNITSEQVRTIIVNHVNDTWGLKVRQSLWFHLSCLTFGQHTVQEFLVSFGVWIRTPAPYRPPNAPILSTLPEHTVIC

SEQ ID NO: 10953 - protein, 1301 aa, Artificial Sequence
  SARS-CoV-2/Belgium/BC-03016/2020__EPI_ISL_415157 spike protein (1-1147)(K986P_V987P_ H1048Q_H1064N_ H1083N_H1101N) WhcAg construct
MFVFLVLLPLVSSQCVNLTTRTQLPPAYTNSFTRGVYYPDKVFRSSVLHSTQDLFLPFFSNVTWFHAIHVSGTNGTKRFDNPVLPFNDGVYFASTEKSNIIRGWIFGTTLDSKTQSLLIVNNATNVVIKVCEFQFCNDPFLGVYYHKNNKSWMESEFRVYSSANNCTFEYVSQPFLMDLEGKQGNFKNLREFVFKNIDGYFKIYSKHTPINLVRDLPQGFSALEPLVDLPIGINITRFQTLLALHRSYLTPGDSSSGWTAGAAAYYVGYLQPRTFLLKYNENGTITDAVDCALDPLSETKCTLKSFTVEKGIYQTSNFRVQPTESIVRFPNITNLCPFGEVFNATRFASVYAWNRKRISNCVADYSVLYNSASFSTFKCYGVSPTKLNDLCFTNVYADSFVIRGDEVRQIAPGQTGKIADYNYKLPDDFTGCVIAWNSNNLDSKVGGNYNYLYRLFRKSNLKPFERDISTEIYQAGSTPCNGVEGFNCYFPLQSYGFQPTNGVGYQPYRVVVLSFELLHAPATVCGPKKSTNLVKNKCVNFNFNGLTGTGVLTESNKKFLPFQQFGRDIADTTDAVRDPQTLEILDITPCSFGGVSVITPGTNTSNQVAVLYQGVNCTEVPVAIHADQLTPTWRVYSTGSNVFQTRAGCLIGAEHVNNSYECDIPIGAGICASYQTQTNSPRRARSVASQSIIAYTMSLGAENSVAYSNNSIAIPTNFTISVTTEILPVSMTKTSVDCTMYICGDSTECSNLLLQYGSFCTQLNRALTGIAVEQDKNTQEVFAQVKQIYKTPPIKDFGGFNFSQILPDPSKPSKRSFIEDLLFNKVTLADAGFIKQYGDCLGDIAARDLICAQKFNGLTVLPPLLTDEMIAQYTSALLAGTITSGWTFGAGAALQIPFAMQMAYRFNGIGVTQNVLYENQKLIANQFNSAIGKIQDSLSSTAPALGKLQDVVNQNAQALNTLVKQLSSNFGAISSVLNDILSRLDPPEAEVQIDRLITGRLQSLQTYVTQQLIRAAEIRASANLAATKMSECVLGQSKRVDFCGKGYQLMSFPQSAPHGVVFLNVTYVPAQEKNFTTAPAICNDGKAHFPREGVFVSNGTNWFVTQRNFYEPQIITTDNTFVSGNCDVVIGIVNNTVYDPLQPELDSGGGGSDIDPYKEFGSSYQLLNFLPLDFFPDLNALVDTATALYEEELTGREHCSPHHTAIRQALVCWDELTKLIAWMSSNITSEQVRTIIVNHVNDTWGLKVRQSLWFHLSCLTFGQHTVQEFLVSFGVWIRTPAPYRPPNAPILSTLPEHTVIC

SEQ ID NO: 10954 - protein, 1301 aa, Artificial Sequence
  SARS-CoV-2/Germany/BavPat3/2020__EPI_ISL_414521 spike protein (1-1147)(K986P_V987P_ H1048Q_H1064N_ H1083N_H1101N) WhcAg construct
MFVFLVLLPLVSSQCVNLTTRTQLPPAYTNSFTRGVYYPDKVFRSSVLHSTQDLFLPFFSNVTWFHAIHVSGTNGTKRFDNPVLPFNDGVYFASTEKSNIIRGWIFGTTLDSKTQSLLIVNNATNVVIKVCEFQFCNDPFLGVYYHKNNKSWMESEFRVYSSANNCTFEYVSQPFLMDLEGKQGNFKNLREFVFKNIDGYFKIYSKHTPINLVRDLPQGFSALEPLVDLPIGINITRFQTLLALHRSYLTPGDSSSGWTAGAAAYYVGYLQPRTFLLKYNENGTITDAVDCALDPLSETKCTLKSFTVEKGIYQTSNFRVQPTESIVRFPNITNLCPFGEVFNATRFASVYAWNRKRISNCVADYSVLYNSASFSTFKCYGVSPTKLNDLCFTNVYADSFVIRGDEVRQIAPGQTGKIADYNYKLPDDFTGCVIAWNSNNLDSKVGGNYNYLYRLFRKSNLKPFERDISTEIYQAGSTPCNGVEGFNCYFPLQSYGFQPTNGVGYQPYRVVVLSFELLHAPATVCGPKKSTNLVKNKCVNFNFNGLTGTGVLTESNKKFLPFQQFGRDIADTTDAVRDPQTLEILDITPCSFGGVSVITPGTNTSNQVAVLYQDVNCTEVPVAIHADQLTPTWRVYSTGSNVFQTRAGCLIGAEHVNNSYECDIPIGAGICASYQTQTNSPRRARSVASQSIIAYTMSLGAENSVAYSNNSIAIPTNFTISVTTEILPVSMTKTSVDCTMYICGDSTECSNLLLQYGSFCTQLNRALTGIAVEQDKNTQQVFAQVKQIYKTPPIKDFGGFNFSQILPDPSKPSKRSFIEDLLFNKVTLADAGFIKQYGDCLGDIAARDLICAQKFNGLTVLPPLLTDEMIAQYTSALLAGTITSGWTFGAGAALQIPFAMQMAYRFNGIGVTQNVLYENQKLIANQFNSAIGKIQDSLSSTASALGKLQDVVNQNAQALNTLVKQLSSNFGAISSVLNDILSRLDPPEAEVQIDRLITGRLQSLQTYVTQQLIRAAEIRASANLAATKMSECVLGQSKRVDFCGKGYQLMSFPQSAPHGVVFLNVTYVPAQEKNFTTAPAICNDGKAHFPREGVFVSNGTNWFVTQRNFYEPQIITTDNTFVSGNCDVVIGIVNNTVYDPLQPELDSGGGGSDIDPYKEFGSSYQLLNFLPLDFFPDLNALVDTATALYEEELTGREHCSPHHTAIRQALVCWDELTKLIAWMSSNITSEQVRTIIVNHVNDTWGLKVRQSLWFHLSCLTFGQHTVQEFLVSFGVWIRTPAPYRPPNAPILSTLPEHTVIC

SEQ ID NO: 10955 - protein, 1301 aa, Artificial Sequence
  SARS-CoV-2/France/HF1805/2020__EPI_ISL_414628 spike protein (1-1147)(K986P_V987P_ H1048Q_H1064N_ H1083N_H1101N) WhcAg construct
MFVFLVLLPLVSSQCVNLTTRTQLPPAYTNSFTRGVYYPDKVFRSSVLHSTQDLFLPFFSNVTWFHAIHVSGTNGTKRFDNPVLPFNDGVYFASTEKSNIIRGWIFGTTLDSKTQSLLIVNNATNVVIKVCEFQFCNDPFLGVYYHKNNKSWMESEFRVYSSANNCTFEYVSQPFLMDLEGKQGNFKNLREFVFKNIDGYFKIYSKHTPINLVRDLPQGFSALEPLVDLPIGINITRFQTLLALHRSYLTPGDSSSGWTAGAAAYYVGYLQPRTFLLKYNENGTITDAVDCALDPLSETKCTLKSFTVEKGIYQTSNFRVQPTESIVRFPNITNLCPFGEVFNATRFASVYAWNRKRISNCVADYSVLYNSASFSTFKCYGVSPTKLNDLCFTNVYADSFVIRGDEVRQIAPGQTGKIADYNYKLPDDFTGCVIAWNSNNLDSKVGGNYNYLYRLFRKSNLKPFERDISTEIYQAGSTPCNGVEGFNCYFPLQSYGFQPTNGVGYQPYRVVVLSFELLHAPATVCGPKKSTNLVKNKCVNFNFNGLTGTGVLTESNKKFLPFQQFGRDIADTTDAVRDPQTLEILDITPCSFGGVSVITPGTNTSNQVAVLYQGVNCTEVPVAIHADQLTPTWRVYSTGSNVFQTRAGCLIGAEHVNNSYECDIPIGAGICASYQTQTNSPRRARSVASQSIIAYTMSLGAENSVAYSNNSIAIPTNFTISVTTEILPVSMTKTSVDCTMYICGDSTECSNLLLQYGSFCTQLNRALTGIAVEQDKNTQEVFAQVKQIYKTPPIKDFGGFNFSQILPDPSKPSKRSFIEDLLFNKVTLADAGFIKQYGDCLGDIAARDLICAQKFNGLTVLPPLLTDEMIAQYTSALLAGTITSGWTFGAGAALQIPFAMQMAYRFNGIGVTQNVLYENQKLIANQFNSAIGKIQDSLSSTASALGKLQDVVNQNAQALNTLVKQLSSNFGAISSVLNDILSRLDPPEAEVQIDRLITGRLQSLQTYVTQQLIRAAEIRASANLAATKMSECVLGQSKRVDFCGKGYQLMSFPQSAPHGVVFLNVTYVPAQEKNFTTAPAICNDGKAHFPREGVFVSNGTNWFVTQRNFYEPQIITTDNTFVSGNCDVVIGVVNNTVYDPLQPELDSGGGGSDIDPYKEFGSSYQLLNFLPLDFFPDLNALVDTATALYEEELTGREHCSPHHTAIRQALVCWDELTKLIAWMSSNITSEQVRTIIVNHVNDTWGLKVRQSLWFHLSCLTFGQHTVQEFLVSFGVWIRTPAPYRPPNAPILSTLPEHTVIC

SEQ ID NO: 10956 - protein, 1301 aa, Artificial Sequence
  SARS-CoV-2/Netherlands/ZuidHolland_9/2020__EPI_ISL_414445 spike protein (1-1147)(K986P_V987P_ H1048Q_H1064N_ H1083N_H1101N) WhcAg construct
MFVFLVLLPLVSSQCVNLTTRTQLPPAYTNSFTRGVYYPDKVFRSSVLHSTQDLFLPFFSNVTWFHAIHVSGTNGTKRFDNPVLPFNDGVYFASTEKSNIIRGWIFGTTLDSKTQSLLIVNNATNVVIKVCEFQFCNDPFLGVYYHKNNKSWMESEFRVYSSANNCTFEYVSQPFLMDLEGKQGNFKNLREFVFKNIDGYFKIYSKHTPINLVRDLPQGFSALEPLVDLPIGINITRFQTLLALHRSYLTPGDSSSGWTAGAAAYYVGYLQPRTFLLKYNENGTITDAVDCALDPLSETKCTLKSFTVEKGIYQTSNFRVQPTESIVRFPNITNLCPFGEVFNATRFASVYAWNRKRISNCVADYSVLYNSASFSTFKCYGVSPTKLNDLCFTNVYADSFVIRGDEVRQIAPGQTGKIADYNYKLPDDFTGCVIAWNSNNLDSKVGGNYNYLYRLFRKSNLKPFERDISTEIYQAGSTPCNGVEGFNCYFPLQSYGFQPTNGVGYQPYRVVVLSFELLHAPATVCGPKKSTNLVKNKCVNFNFNGLTGTGVLTESNKKFLPFQQFGRDIADTTDAVRDPQTLEILDITPCSFGGVSVITPGTNTSNQVAVLYQGVNCTEVPVAIHADQLTPTWRVYSTGSNVFQTRAGCLIGAEHVNNSYECDIPIGAGICASYQTQTNSPRRARSVASQSIIAYTMSLGAENSVAYSNNSIAIPTNFTISVTTEILPVSMTKTSVDCTMYICGDSTECSNLLLQYGSFCTQLNRALTGIAVEQDKNTQEVFAQVKQIYKTPPIKDFGGFNFSQILPDPSKPSKRSFIEDLLFNKVTLADAGFIKQYGDCLGDIAARDLICVQKFNGLTVLPPLLTDEMIAQYTSALLAGTITSGWTFGAGAALQIPFAMQMAYRFNGIGVTQNVLYENQKLIANQFNSAIGKIQDSLSSTASALGKLQDVVNQNAQALNTLVKQLSSNFGAISSVLNDILSRLDPPEAEVQIDRLITGRLQSLQTYVTQQLIRAAEIRASANLAATKMSECVLGQSKRVDFCGKGYQLMSFPQSAPHGVVFLNVTYVPAQEKNFTTAPAICNDGKAHFPREGVFVSNGTNWFVTQRNFYEPQIITTDNTFVSGNCDVVIGIVNNTVYDPLQPELDSGGGGSDIDPYKEFGSSYQLLNFLPLDFFPDLNALVDTATALYEEELTGREHCSPHHTAIRQALVCWDELTKLIAWMSSNITSEQVRTIIVNHVNDTWGLKVRQSLWFHLSCLTFGQHTVQEFLVSFGVWIRTPAPYRPPNAPILSTLPEHTVIC

SEQ ID NO: 10957 - protein, 1301 aa, Artificial Sequence
  SARS-CoV-2/Finland/FIN03032020A/2020__EPI_ISL_413602 spike protein (1-1147)(K986P_V987P_ H1048Q_H1064N_ H1083N_H1101N) WhcAg construct
MFVFLVLLPLVSSQCVNLTTRTQLPPAYTNSFTRGVYYPDKVFRSSVLHSTQDLFLPFFSNVTWFHAIHVSGTNGTKRFDNPVLPFNDGVYFASTEKSNIIRGWIFGTTLDSKTQSLLIVNNATNVVIKVCEFQFCNDPFLGVYYHKNNKSWMESEFRVYSSANNCTFEYVSQPFLMDLEGKQGNFKNLREFVFKNIDGYFKIYSKHTPINLVRDLPQGFSALEPLVDLPIGINITRFQTLLALHRSYLTPGDSSSGWTAGAAAYYVGYLQPRTFLLKYNENGTITDAVDCALDPLSETKCTLKSFTVEKGIYQTSNFRVQPTESIVRFPNITNLCPFGEVFNATRFASVYAWNRKRISNCVADYSVLYNSASFSTFKCYGVSPTKLNDLCFTNVYADSFVIRGDEVRQIAPGQTGKIADYNYKLPDDFTGCVISWNSNNLDSKVGGNYNYLYRLFRKSNLKPFERDISTEIYQAGSTPCNGVEGFNCYFPLQSYGFQPTNGVGYQPYRVVVLSFELLHAPATVCGPKKSTNLVKNKCVNFNFNGLTGTGVLTESNKKFLPFQQFGRDIADTTDAVRDPQTLEILDITPCSFGGVSVITPGTNTSNQVAVLYQGVNCTEVPVAIHADQLTPTWRVYSTGSNVFQTRAGCLIGAEHVNNSYECDIPIGAGICASYQTQTNSPRRARSVASQSIIAYTMSLGAENSVAYSNNSIAIPTNFTISVTTEILPVSMTKTSVDCTMYICGDSTECSNLLLQYGSFCTQLNRALTGIAVEQDKNTQEVFAQVKQIYKTPPIKDFGGFNFSQILPDPSKPSKRSFIEDLLFNKVTLADAGFIKQYGDCLGDIAARDLICAQKFNGLTVLPPLLTDEMIAQYTSALLAGTITSGWTFGAGAALQIPFAMQMAYRFNGIGVTQNVLYENQKLIANQFNSAIGKIQDSLSSTASALGKLQDVVNQNAQALNTLVKQLSSNFGAISSVLNDILSRLDPPEAEVQIDRLITGRLQSLQTYVTQQLIRAAEIRASANLAATKMSECVLGQSKRVDFCGKGYQLMSFPQSAPHGVVFLNVTYVPAQEKNFTTAPAICNDGKAHFPREGVFVSNGTNWFVTQRNFYEPQIITTDNTFVSGNCDVVIGIVNNTVYDPLQPELDSGGGGSDIDPYKEFGSSYQLLNFLPLDFFPDLNALVDTATALYEEELTGREHCSPHHTAIRQALVCWDELTKLIAWMSSNITSEQVRTIIVNHVNDTWGLKVRQSLWFHLSCLTFGQHTVQEFLVSFGVWIRTPAPYRPPNAPILSTLPEHTVIC

SEQ ID NO: 10958 - protein, 1301 aa, Artificial Sequence
  SARS-CoV-2/France/GE1977/2020__EPI_ISL_414632 spike protein (1-1147)(K986P_V987P_ H1048Q_H1064N_ H1083N_H1101N) WhcAg construct
MFVFLVLLPLVSSQCVNLTTRTQLPPAYTNSFTRGVYYPDKVFRSSVLHSTQDLFLPFFSNVTWFHAIHVSGTNGTKRFDNPVLPFNDGVYFASTEKSNIIRGWIFGTTLDSKTQSLLIVNNATNVVIKVCEFQFCNDPFLGVYYHKNNKSWMESEFRVYSSANNCTFEYVSQPFLMDLEGKQGNFKNLREFVFKNIDGYFKIYSKHTPINLVRDLPQGFSALEPLVDLPIGINITRFQTLLALHRSYLTPGDSSSGWTAGAAAYYVGYLQPRTFLLKYNENGTITDAVDCALDPLSETKCTLKSFTVEKGIYQTSNFRVQPTESIVRFPNITNLCPFGEVFNATRFASVYAWNRKRISNCVADYSVLYNSASFSTFKCYGVSPTKLNDLCFTNVYADSFVIRGDEVRQIAPGQTGKIADYNYKLPDDFTGCVIAWNSNNLDSKVGGNYNYLYRLFRKSNLKPFERDISTEIYQAGSTPCNGVEGFNCYFPLQSYGFQPTNGVGYQPYRVVVLSFELLHAPATVCGPKKSTNLVKNKCVNFNFNGLTGTGVLTESNKKFLPFQQFGRDIADTTDAVRDPQTLEILDITPCSFGGVSVITPGTNTSNQVAVLYQGVNCTEVPVAIHADQLTPTWRVYSTGSNVFQTRAGCLIGAEHVNNSYECDIPIGAGICASYQTQTNSPRRARSVASQSIIAYTMSLGAENSVAYSNNSIAIPTNFTISVTTEILPVSMTKTSVDCTMYICGDSTECSNLLLQYGSFCTQLNRALTGIAVEQDKNTQEVFAQVKQIYKTPPIKDFGGFNFSQILPDPSKPSKRSFIEDLLFNKVTLADAGFIKQYGDCLGDIAARDLICAQKFNGLTVLPPLLTDEMIAQYTSALLAGTITSGWTFGAGAALQIPFAMQMAYRFNGIGVTQNVLYENQKLIANQFNSAIGKIQDSLFSTASALGKLQDVVNQNAQALNTLVKQLSSNFGAISSVLNDILSRLDPPEAEVQIDRLITGRLQSLQTYVTQQLIRAAEIRASANLAATKMSECVLGQSKRVDFCGKGYQLMSFPQSAPHGVVFLNVTYVPAQEKNFTTAPAICNDGKAHFPREGVFVSNGTNWFVTQRNFYEPQIITTDNTFVSGNCDVVIGIVNNTVYDPLQPELDSGGGGSDIDPYKEFGSSYQLLNFLPLDFFPDLNALVDTATALYEEELTGREHCSPHHTAIRQALVCWDELTKLIAWMSSNITSEQVRTIIVNHVNDTWGLKVRQSLWFHLSCLTFGQHTVQEFLVSFGVWIRTPAPYRPPNAPILSTLPEHTVIC

SEQ ID NO: 10959 - protein, 1301 aa, Artificial Sequence
  SARS-CoV-2/Finland/FIN-313/2020__EPI_ISL_414641 spike protein (1-1147)(K986P_V987P_ H1048Q_H1064N_ H1083N_H1101N) WhcAg construct
MFVFLVLLPLVSSQCVNLTTRTQLPPAYTNSFTRGVYYPDKVFRSSVLHSTQDLFLPFFSNVTWFHAIHVSGTNGTKRFDNPVLPFNDGVYFASTEKSNIIRGWIFGTTLDSKTQSLLIVNNATNVVIKVCEFQFCNDPFLGVYYHKNNKSWMESEFRVYSSANNCTFEYVSQPFLMDLEGKQGNFKNLREFVFKNIDGYFKIYSKHTPINLVRDLPQGFSALEPLVDLPIGINITRFKTLLALHRSYLTPGDSSSGWTAGAAAYYVGYLQPRTFLLKYNENGTITDAVDCALDPLSETKCTLKSFTVEKGIYQTSNFRVQPTESIVRFPNITNLCPFGEVFNATRFASVYAWNRKRISNCVADYSVLYNSASFSTFKCYGVSPTKLNDLCFTNVYADSFVIRGDEVRQIAPGQTGKIADYNYKLPDDFTGCVIAWNSNNLDSKVGGNYNYLYRLFRKSNLKPFERDISTEIYQAGSTPCNGVEGFNCYFPLQSYGFQPTNGVGYQPYRVVVLSFELLHAPATVCGPKKSTNLVKNKCVNFNFNGLTGTGVLTESNKKFLPFQQFGRDIADTTDAVRDPQTLEILDITPCSFGGVSVITPGTNTSNQVAVLYQGVNCTEVPVAIHADQLTPTWRVYSTGSNVFQTRAGCLIGAEHVNNSYECDIPIGAGICASYQTQTNSPRRARSVASQSIIAYTMSLGAENSVAYSNNSIAIPTNFTISVTTEILPVSMTKTSVDCTMYICGDSTECSNLLLQYGSFCTQLNRALTGIAVEQDKNTQEVFAQVKQIYKTPPIKDFGGFNFSQILPDPSKPSKRSFIEDLLFNKVTLADAGFIKQYGDCLGDIAARDLICAQKFNGLTVLPPLLTDEMIAQYTSALLAGTITSGWTFGAGAALQIPFAMQMAYRFNGIGVTQNVLYENQKLIANQFNSAIGKIQDSLSSTASALGKLQDVVNQNAQALNTLVKQLSSNFGAISSVLNDILSRLDPPEAEVQIDRLITGRLQSLQTYVTQQLIRAAEIRASANLAATKMSECVLGQSKRVDFCGKGYQLMSFPQSAPHGVVFLNVTYVPAQEKNFTTAPAICNDGKAHFPREGVFVSNGTNWFVTQRNFYEPQIITTDNTFVSGNCDVVIGIVNNTVYDPLQPELDSGGGGSDIDPYKEFGSSYQLLNFLPLDFFPDLNALVDTATALYEEELTGREHCSPHHTAIRQALVCWDELTKLIAWMSSNITSEQVRTIIVNHVNDTWGLKVRQSLWFHLSCLTFGQHTVQEFLVSFGVWIRTPAPYRPPNAPILSTLPEHTVIC

SEQ ID NO: 10960 - protein, 1301 aa, Artificial Sequence
  SARS-CoV-2/Netherlands/ZuidHolland_2/2020__EPI_ISL_414556 spike protein (1-1147)(K986P_V987P_ H1048Q_H1064N_ H1083N_H1101N) WhcAg construct
MFVFLVLLPLVSSQCVNLTTRTQLPPAYTNSFTRGVYYPDKVFRSSVLHSTQDLFLPFFSNVTWFHAIHVSGTNGTKRFDNPVLPFNDGVYFASTEKSNIIRGWIFGTTLDSKTQSLLIVNNATNVVIKVCEFQFCNDPFLGVYYHKNNKSWMESEFRVYSSANNCTFEYVSQPFLMDLEGKQGNFKNLREFVFKNIDGYFKIYSKHTPINLVRDLPQGFSALEPLVDLPIGINITRFQTLLALHRSYLTPGDSSSGWTAGAAAYYVGYLQPRTFLLKYNENGTITDAVDCALDPLSETKCTLKSFTVEKGIYQTSNFRVQPTESIVRFPNITNLCPFGEVFNATRFASVYAWNRKRISNCVADYSVLYNSASFSTFKCYGVSPTKLNDLCFTNVYADSFVIRGDEVRQIAPGQTGKIADYNYKLPDDFTGCVIAWNSNNLDSKVGGNYNYLYRLFRKSNLKPFERDISTEIYQAGSTPCNGVEGFNCYFPLQSYGFQPTNGVGYQPYRVVVLSFELLHAPATVCGPKKSTNLVKNKCVNFNFNGLTGTGVLTESNKKFLPFQQFGRDIADTTDAVRDPQTLEILDITPCSFGGVSVITPGTNTSNQVAVLYQGVNCTEVPVAIHADQLTPTWRVYSTGSNVFQTRAGCLIGAEHVNNSYECDIPIGAGICASYQTQTNSPRRARSVASQSIIAYTMSLGAENSVAYSNNSIAIPTNFTISVTTEILPVSMTKTSVDCTMYICGDSTECSNLLLQYGSFCTQLNRALTGIALEQDKNTQEVFAQVKQIYKTPPIKDFGGFNFSQILPDPSKPSKRSFIEDLLFNKVTLADAGFIKQYGDCLGDIAARDLICAQKFNGLTVLPPLLTDEMIAQYTSALLAGTITSGWTFGAGAALQIPFAMQMAYRFNGIGVTQNVLYENQKLIANQFNSAIGKIQDSLSSTASALGKLQDVVNQNAQALNTLVKQLSSNFGAISSVLNDILSRLDPPEAEVQIDRLITGRLQSLQTYVTQQLIRAAEIRASANLAATKMSECVLGQSKRVDFCGKGYQLMSFPQSAPHGVVFLNVTYVPAQEKNFTTAPAICNDGKAHFPREGVFVSNGTNWFVTQRNFYEPQIITTDNTFVSGNCDVVIGIVNNTVYDPLQPELDSGGGGSDIDPYKEFGSSYQLLNFLPLDFFPDLNALVDTATALYEEELTGREHCSPHHTAIRQALVCWDELTKLIAWMSSNITSEQVRTIIVNHVNDTWGLKVRQSLWFHLSCLTFGQHTVQEFLVSFGVWIRTPAPYRPPNAPILSTLPEHTVIC

SEQ ID NO: 10961 - protein, 1301 aa, Artificial Sequence
  SARS-CoV-2/USA/WA-UW31/2020__EPI_ISL_414618 spike protein (1-1147)(K986P_V987P_ H1048Q_H1064N_ H1083N_H1101N) WhcAg construct
MFVFLVLLPLVSSQCVNLTTRTQLPPAYTNSFTRGVYYPDKVFRSSVLHSTQDLFLPFFSNVTWFHAIHVSGTNGTKRFDNPVLPFNDGVYFASTEKSNIIRGWIFGTTLDSKTQSLLIVNNATNVVIKVCEFQFCNDPFLGVYYHKNNKSWMESEFRVYSSANNCTFEYVSQPFLMDLEGKQGNFKNLREFVFKNIDGYFKIYSKHTPINLVRDLPQGFSALEPLVDLPIGINITRFQTLLALHRSYLTPGDSSSGWTAGAAAYYVGYLQPRTFLLKYNENGTITDAVDCALDPLSETKCTLKSFTVEKGIYQTSNFRVQPTESIVRFPNITNLCPFGEVFNATRFASVYAWNRKRISNCVADYSVLYNSASFSTFKCYGVSPTKLNDLCFTNVYADSFVIRGDEVRQIAPGQTGKIADYNYKLPDDFTGCVIAWNSNNLDSKVGGNYNYLYRLFRKSNLKPFERDISTEIYQAGSTPCNGAEGFNCYFPLQSYGFQPTNGVGYQPYRVVVLSFELLHAPATVCGPKKSTNLVKNKCVNFNFNGLTGTGVLTESNKKFLPFQQFGRDIADTTDAVRDPQTLEILDITPCSFGGVSVITPGTNTSNQVAVLYQDVNCTEVPVAIHADQLTPTWRVYSTGSNVFQTRAGCLIGAEHVNNSYECDIPIGAGICASYQTQTNSPRRARSVASQSIIAYTMSLGAENSVAYSNNSIAIPTNFTISVTTEILPVSMTKTSVDCTMYICGDSTECSNLLLQYGSFCTQLNRALTGIAVEQDKNTQEVFAQVKQIYKTPPIKDFGGFNFSQILPDPSKPSKRSFIEDLLFNKVTLADAGFIKQYGDCLGDIAARDLICAQKFNGLTVLPPLLTDEMIAQYTSALLAGTITSGWTFGAGAALQIPFAMQMAYRFNGIGVTQNVLYENQKLIANQFNSAIGKIQDSLSSTASALGKLQDVVNQNAQALNTLVKQLSSNFGAISSVLNDILSRLDPPEAEVQIDRLITGRLQSLQTYVTQQLIRAAEIRASANLAATKMSECVLGQSKRVDFCGKGYQLMSFPQSAPHGVVFLNVTYVPAQEKNFTTAPAICNDGKAHFPREGVFVSNGTNWFVTQRNFYEPQIITTDNTFVSGNCDVVIGIVNNTVYDPLQPELDSGGGGSDIDPYKEFGSSYQLLNFLPLDFFPDLNALVDTATALYEEELTGREHCSPHHTAIRQALVCWDELTKLIAWMSSNITSEQVRTIIVNHVNDTWGLKVRQSLWFHLSCLTFGQHTVQEFLVSFGVWIRTPAPYRPPNAPILSTLPEHTVIC

SEQ ID NO: 10962 - protein, 1301 aa, Artificial Sequence
  SARS-CoV-2/South Korea/SNU01/2020__EPI_ISL_411929 spike protein (1-1147)(K986P_V987P_ H1048Q_H1064N_ H1083N_H1101N) WhcAg construct
MFVFLVLLPLVSSQCVNLTTRTQLPPAYTNSFTRGVYYPDKVFRSSVLHSTQDLFLPFFSNVTWFHAIHVSGTNGTKRFDNPVLPFNDGVYFASTEKSNIIRGWIFGTTLDSKTQSLLIVNNATNVVIKVCEFQFCNDPFLGVYYHKNNKSWMESEFRVYSSANNCTFEYVSQPFLMDLEGKQGNFKNLREFVFKNIDGYFKIYSKHTPINLVRDLPQGFWALEPLVDLPIGINITRFQTLLALHRSYLTPGDSSSGWTAGAAAYYVGYLQPRTFLLKYNENGTITDAVDCALDPLSETKCTLKSFTVEKGIYQTSNFRVQPTESIVRFPNITNLCPFGEVFNATRFASVYAWNRKRISNCVADYSVLYNSASFSTFKCYGVSPTKLNDLCFTNVYADSFVIRGDEVRQIAPGQTGKIADYNYKLPDDFTGCVIAWNSNNLDSKVGGNYNYLYRLFRKSNLKPFERDISTEIYQAGSTPCNGVEGFNCYFPLQSYGFQPTNGVGYQPYRVVVLSFELLHAPATVCGPKKSTNLVKNKCVNFNFNGLTGTGVLTESNKKFLPFQQFGRDIADTTDAVRDPQTLEILDITPCSFGGVSVITPGTNTSNQVAVLYQDVNCTEVPVAIHADQLTPTWRVYSTGSNVFQTRAGCLIGAEHVNNSYECDIPIGAGICASYQTQTNSPRRARSVASQSIIAYTMSLGAENSVAYSNNSIAIPTNFTISVTTEILPVSMTKTSVDCTMYICGDSTECSNLLLQYGSFCTQLNRALTGIAVEQDKNTQEVFAQVKQIYKTPPIKDFGGFNFSQILPDPSKPSKRSFIEDLLFNKVTLADAGFIKQYGDCLGDIAARDLICAQKFNGLTVLPPLLTDEMIAQYTSALLAGTITSGWTFGAGAALQIPFAMQMAYRFNGIGVTQNVLYENQKLIANQFNSAIGKIQDSLSSTASALGKLQDVVNQNAQALNTLVKQLSSNFGAISSVLNDILSRLDPPEAEVQIDRLITGRLQSLQTYVTQQLIRAAEIRASANLAATKMSECVLGQSKRVDFCGKGYQLMSFPQSAPHGVVFLNVTYVPAQEKNFTTAPAICNDGKAHFPREGVFVSNGTNWFVTQRNFYEPQIITTDNTFVSGNCDVVIGIVNNTVYDPLQPELDSGGGGSDIDPYKEFGSSYQLLNFLPLDFFPDLNALVDTATALYEEELTGREHCSPHHTAIRQALVCWDELTKLIAWMSSNITSEQVRTIIVNHVNDTWGLKVRQSLWFHLSCLTFGQHTVQEFLVSFGVWIRTPAPYRPPNAPILSTLPEHTVIC

SEQ ID NO: 10963 - protein, 1301 aa, Artificial Sequence
  SARS-CoV-2/China/WF0004/2020__EPI_ISL_413694 spike protein (1-1147)(K986P_V987P_ H1048Q_H1064N_ H1083N_H1101N) WhcAg construct
MFVFLVLLPLVSSQCVNLTTRTQLPPAYTNSFTRGVYYPDKVFRSSVLHSTQDLFLPFFSNVTWFHAIHVSGTNGTKRFDNPVLPFNDGVYFASTEKSNIIRGWIFGTTLDSKTQSLLIVNNATNVVIKVCEFQFCNDPFLGVYYHKNNKSWTESEFRVYSSANNCTFEYVSQPFLMDLEGKQGNFKNLREFVFKNIDGYFKIYSKHTPINLVRDLPQGFSALEPLVDLPIGINITRFQTLLALHRSYLTPGDSSSGWTAGAAAYYVGYLQPRTFLLKYNENGTITDAVDCALDPLSETKCTLKSFTVEKGIYQTSNFRVQPTESIVRFPNITNLCPFGEVFNATRFASVYAWNRKRISNCVADYSVLYNSASFSTFKCYGVSPTKLNDLCFTNVYADSFVIRGDEVRQIAPGQTGKIADYNYKLPDDFTGCVIAWNSNNLDSKVGGNYNYLYRLFRKSNLKPFERDISTEIYQAGSTPCNGVEGFNCYFPLQSYGFQPTNGVGYQPYRVVVLSFELLHAPATVCGPKKSTNLVKNKCVNFNFNGLTGTGVLTESNKKFLPFQQFGRDIADTTDAVRDPQTLEILDITPCSFGGVSVITPGTNTSNQVAVLYQDVNCTEVPVAIHADQLTPTWRVYSTGSNVFQTRAGCLIGAEHVNNSYECDIPIGAGICASYQTQTNSPRRARSVASQSIIAYTMSLGAENSVAYSNNSIAIPTNFTISVTTEILPVSMTKTSVDCTMYICGDSTECSNLLLQYGSFCTQLNRALTGIAVEQDKNTQEVFAQVKQIYKTPPIKDFGGFNFSQILPDPSKPSKRSFIEDLLFNKVTLADAGFIKQYGDCLGDIAARDLICAQKFNGLTVLPPLLTDEMIAQYTSALLAGTITSGWTFGAGAALQIPFAMQMAYRFNGIGVTQNVLYENQKLIANQFNSAIGKIQDSLSSTASALGKLQDVVNQNAQALNTLVKQLSSNFGAISSVLNDILSRLDPPEAEVQIDRLITGRLQSLQTYVTQQLIRAAEIRASANLAATKMSECVLGQSKRFDFCGKGYQLMSFPQSAPHGVVFLNVTYVPAQEKNFTTAPAICNDGKAHFPREGVFVSNGTNWFVTQRNFYEPQIITTDNTFVSGNCDVVIGIVNNTVYDPLQPELDSGGGGSDIDPYKEFGSSYQLLNFLPLDFFPDLNALVDTATALYEEELTGREHCSPHHTAIRQALVCWDELTKLIAWMSSNITSEQVRTIIVNHVNDTWGLKVRQSLWFHLSCLTFGQHTVQEFLVSFGVWIRTPAPYRPPNAPILSTLPEHTVIC

SEQ ID NO: 10964 - protein, 1301 aa, Artificial Sequence
  SARS-CoV-2/China/WF0028/2020__EPI_ISL_413791 spike protein (1-1147)(K986P_V987P_ H1048Q_H1064N_ H1083N_H1101N) WhcAg construct
MFVFLVLLPLVSSQCVNLTTRTQLPPAYTNSFTRGVYYPDKVFRSSVLHSTQDLFLPFFSNVTWFHAIHVSGTNGTKRFDNPVLPFNDGVYFASTEKSNIIRGWIFGTTLDSKTQSLLIVNNATNVVIKVCEFQFCNDPFLGVYYHKNNKSWMESEFRVYSSANNCTFEYVSQPFLMDLEGKQGNFKNLREFVFKNIDGYFKIYSKHTPINLVRDLPQGFSALEPLVDLPIGINITRFQTLLALHRSYLTPGDSSSGWTAGAAAYYVGYLQPRTFLLKYNENGTITDAVDCALDPLSETKCTLKSFTVEKGIYQTSNFRVQPTESIVRFPNITNLCPFGEVFNATRFASVYAWNRKRISNCVADYSVLYNSASFSTFKCYGVSPTKLNDLCFTNVYADSFVIRGDEVRQIAPGQTGKIADYNYKLPDDFTGCVIAWNSNNLDSKVGGNYNYLYRLFRKSNLKPFERDISTEIYQAGSTPCNGVEGFNCYFPLQSYGFQPTNGVGYQPYRVVVLSFELLHAPATVCGPKKSTNLVKNKCVNFNFNGLTGTGVLTESNKKFLPFQQFGRDIADTTDAVRDPQTLEILDITPCSFGGVSVITPGTNTSNQVAVLYQDVNCTEVPVAIHADQLTPTWRVYSTGSNVFQTRAGCLIGAEHVNNSYECDIPIGAGICASYQTQTNSPRRARSVASQSIIAYTMSLGAENSVAYSNNSIAIPTNFTISVTTEILPVSMTKTSVDCTMYICGDSTECSNLLLQYGSFCTQLNRALTGIAVEQDKNTQEVFAQVKQIYKTPPIKDFGGFNFSQILPDPSKPSKRSFIEDLLFNKVTLADAGFIKQYGDCLGDIAARDLICAQKFNGLTVLPPLLTDEMIAQYTSALLAGTITSGWTFGAGAALQIPFAMQMAYRFNGIGVTQNVLYENQKLIANQFNSAIGKIQDSLSSTASALGKLQDVVNQNAQALNTLVKQLSSNFGAISSVLNDILSRLDPPEAEVQIDRLITGRLQSLQTYVTQQLIRAAEIRASANLAATKMSECVLGQSKRVDFCGKGYQLMSFPQSAPHGVVFLNVTYVPAQEKNFTTAPAICNDGKAHFPREGVFVSNGTNWFVTQRNFYEPQIITTDNTFVSGNCDVVIGIVNNTVYDPLQPELESGGGGSDIDPYKEFGSSYQLLNFLPLDFFPDLNALVDTATALYEEELTGREHCSPHHTAIRQALVCWDELTKLIAWMSSNITSEQVRTIIVNHVNDTWGLKVRQSLWFHLSCLTFGQHTVQEFLVSFGVWIRTPAPYRPPNAPILSTLPEHTVIC

SEQ ID NO: 10965 - protein, 1301 aa, Artificial Sequence
  SARS-CoV-2/2019-nCoV/USA-CruiseA-18/2020__MT159716.1 spike protein (1-1147)(K986P_V987P_ H1048Q_H1064N_ H1083N_H1101N) WhcAg construct
MFVFLVLLPLVSSQCVNLTTRTQLPPAYTNSFTRGVYYPDKVFRSSVLHSTQDLFLPFFSNVTWFHAIHVSGTNGTKRFDNPVLPFNDGVYFASTEKSNIIRGWIFGTTLDSKTQSLLIVNNATNVVIKVCEFQFCNDPFLGVYYHKNNKSWMESELRVYSSANNCTFEYVSQPFLMDLEGKQGNFKNLREFVFKNIDGYFKIYSKHTPINLVRDLPQGFSALEPLVDLPIGINITRFQTLLALHRSYLTPGDSSSGWTAGAAAYYVGYLQPRTFLLKYNENGTITDAVDCALDPLSETKCTLKSFTVEKGIYQTSNFRVQPTESIVRFPNITNLCPFGEVFNATRFASVYAWNRKRISNCVADYSVLYNSASFSTFKCYGVSPTKLNDLCFTNVYADSFVIRGDEVRQIAPGQTGKIADYNYKLPDDFTGCVIAWNSNNLDSKVGGNYNYLYRLFRKSNLKPFERDISTEIYQAGSTPCNGVEGFNCYFPLQSYGFQPTNGVGYQPYRVVVLSFELLHAPATVCGPKKSTNLVKNKCVNFNFNGLTGTGVLTESNKKFLPFQQFGRDIADTTDAVRDPQTLEILDITPCSFGGVSVITPGTNTSNQVAVLYQDVNCTEVPVAIHADQLTPTWRVYSTGSNVFQTRAGCLIGAEHVNNSYECDIPIGAGICASYQTQTNSPRRARSVASQSIIAYTMSLGAENSVAYSNNSIAIPTNFTISVTTEILPVSMTKTSVDCTMYICGDSTECSNLLLQYGSFCTQLNRALTGIAVEQDKNTQEVFAQVKQIYKTPPIKDFGGFNFSQILPDPSKPSKRSFIEDLLFNKVTLADAGFIKQYGDCLGDIAARDLICAQKFNGLTVLPPLLTDEMIAQYTSALLAGTITSGWTFGAGAALQIPFAMQMAYRFNGIGVTQNVLYENQKLIANQFNSAIGKIQDSLSSTASALGKLQDVVNQNAQALNTLVKQLSSNFGAISSVLNDILSRLDPPEAEVQIDRLITGRLQSLQTYVTQQLIRAAEIRASANLAATKMSECVLGQSKRVDFCGKGYQLMSFPQSAPHGVVFLNVTYVPAQEKNFTTAPAICNDGKAHFPREGVFVSNGTNWFVTQRNFYEPQIITTDNTFVSGNCDVVIGIVNNTVYDPLQPELDSGGGGSDIDPYKEFGSSYQLLNFLPLDFFPDLNALVDTATALYEEELTGREHCSPHHTAIRQALVCWDELTKLIAWMSSNITSEQVRTIIVNHVNDTWGLKVRQSLWFHLSCLTFGQHTVQEFLVSFGVWIRTPAPYRPPNAPILSTLPEHTVIC

SEQ ID NO: 10966 - protein, 1301 aa, Artificial Sequence
  SARS-CoV-2/SARS-CoV-2/Yunnan-01/human/2020/CHN__MT049951.1 spike protein (1-1147)(K986P_V987P_ H1048Q_H1064N_ H1083N_H1101N) WhcAg construct
MFVFLVLLPLVSSQCVNLTTRTQLPPANTNSFTRGVYYPDKVFRSSVLHSTQDLFLPFFSNVTWFHAIHVSGTNGTKRFDNPVLPFNDGVYFASTEKSNIIRGWIFGTTLDSKTQSLLIVNNATNVVIKVCEFQFCNDPFLGVYYHKNNKSWMESEFRVYSSANNCTFEYVSQPFLMDLEGKQGNFKNLREFVFKNIDGYFKIYSKHTPINLVRDLPQGFSALEPLVDLPIGINITRFQTLLALHRSYLTPGDSSSGWTAGAAAYYVGYLQPRTFLLKYNENGTITDAVDCALDPLSETKCTLKSFTVEKGIYQTSNFRVQPTESIVRFPNITNLCPFGEVFNATRFASVYAWNRKRISNCVADYSVLYNSASFSTFKCYGVSPTKLNDLCFTNVYADSFVIRGDEVRQIAPGQTGKIADYNYKLPDDFTGCVIAWNSNNLDSKVGGNYNYLYRLFRKSNLKPFERDISTEIYQAGSTPCNGVEGFNCYFPLQSYGFQPTNGVGYQPYRVVVLSFELLHAPATVCGPKKSTNLVKNKCVNFNFNGLTGTGVLTESNKKFLPFQQFGRDIADTTDAVRDPQTLEILDITPCSFGGVSVITPGTNTSNQVAVLYQDVNCTEVPVAIHADQLTPTWRVYSTGSNVFQTRAGCLIGAEHVNNSYECDIPIGAGICASYQTQTNSPRRARSVASQSIIAYTMSLGAENSVAYSNNSIAIPTNFTISVTTEILPVSMTKTSVDCTMYICGDSTECSNLLLQYGSFCTQLNRALTGIAVEQDKNTQEVFAQVKQIYKTPPIKDFGGFNFSQILPDPSKPSKRSFIEDLLFNKVTLADAGFIKQYGDCLGDIAARDLICAQKFNGLTVLPPLLTDEMIAQYTSALLAGTITSGWTFGAGAALQIPFAMQMAYRFNGIGVTQNVLYENQKLIANQFNSAIGKIQDSLSSTASALGKLQDVVNQNAQALNTLVKQLSSNFGAISSVLNDILSRLDPPEAEVQIDRLITGRLQSLQTYVTQQLIRAAEIRASANLAATKMSECVLGQSKRVDFCGKGYQLMSFPQSAPHGVVFLNVTYVPAQEKNFTTAPAICNDGKAHFPREGVFVSNGTNWFVTQRNFYEPQIITTDNTFVSGNCDVVIGIVNNTVYDPLQPELDSGGGGSDIDPYKEFGSSYQLLNFLPLDFFPDLNALVDTATALYEEELTGREHCSPHHTAIRQALVCWDELTKLIAWMSSNITSEQVRTIIVNHVNDTWGLKVRQSLWFHLSCLTFGQHTVQEFLVSFGVWIRTPAPYRPPNAPILSTLPEHTVIC

SEQ ID NO: 10967 - protein, 1301 aa, Artificial Sequence
  SARS-CoV-2/USA/WA-UW292/2020__EPI_ISL_418077 spike protein (1-1147)(K986P_V987P_ H1048Q_H1064N_ H1083N_H1101N) WhcAg construct
MFVFLVLLPLVSSQCVNLTTRTQLPPAYTNSFTRGVYYPDKVFRSSVLHSTQDLFLPFFSNVTWFHAIHVSGTNGTKRFDNPVLPFNDGVYFASTEKSNIIRGWIFGTTLDSKTQSLLIVNNATNVVIKVCEFQFCNDPFLGVYYHKNNKSWMESEFRVYSSANNCTFEYVSQPFLMDLEGKQGNFKNLREFVFKNIDGYFKIYSKHTPINLVRDLPQGFSALEPLVDLPIGINITRFQTLLALHRSYLTPGDSSSGWTAGAAAYYVGYLQPRTFLLKYNENGTITDAVDCALDPLSETKCTLKSFTVEKGIYQTSNFRVQPTESIVRFPNITNLCPFGEVFNATRFASVYAWNRKRISNCVADYSVLYNSASFSTFKCYGVSPTKLNDLCFTNVYADSFVIRGDEVRQIAPGQTGKIADYNYKLPDDFTGCVIAWNSNNLDSKVGGNYNYLYRLFRKSNLKPFERDISTEIYQASSTPCNGVEGFNCYFPLQSYGFQPTNGVGYQPYRVVVLSFELLHAPATVCGPKKSTNLVKNKCVNFNFNGLTGTGVLTESNKKFLPFQQFGRDIADTTDAVRDPQTLEILDITPCSFGGVSVITPGTNTSNQVAVLYQDVNCTEVPVAIHADQLTPTWRVYSTGSNVFQTRAGCLIGAEHVNNSYECDIPIGAGICASYQTQTNSPRRARSVASQSIIAYTMSLGAENSVAYSNNSIAIPTNFTISVTTEILPVSMTKTSVDCTMYICGDSTECSNLLLQYGSFCTQLNRALTGIAVEQDKNTQEVFAQVKQIYKTPPIKDFGGFNFSQILPDPSKPSKRSFIEDLLFNKVTLADAGFIKQYGDCLGDIAARDLICAQKFNGLTVLPPLLTDEMIAQYTSALLAGTITSGWTFGAGAALQIPFAMQMAYRFNGIGVTQNVLYENQKLIANQFNSAIGKIQDSLSSTASALGKLQDVVNQNAQALNTLVKQLSSNFGAISSVLNDILSRLDPPEAEVQIDRLITGRLQSLQTYVTQQLIRAAEIRASANLAATKMSECVLGQSKRVDFCGKGYQLMSFPQSAPHGVVFLNVTYVPAQEKNFTTAPAICNDGKAHFPREGVFVSNGTNWFVTQRNFYEPQIITTDNTFVSGNCDVVIGIVNNTVYDPLQPELDSGGGGSDIDPYKEFGSSYQLLNFLPLDFFPDLNALVDTATALYEEELTGREHCSPHHTAIRQALVCWDELTKLIAWMSSNITSEQVRTIIVNHVNDTWGLKVRQSLWFHLSCLTFGQHTVQEFLVSFGVWIRTPAPYRPPNAPILSTLPEHTVIC

SEQ ID NO: 10968 - protein, 1301 aa, Artificial Sequence
  SARS-CoV-2/Iceland/192/2020__EPI_ISL_417819 spike protein (1-1147)(K986P_V987P_ H1048Q_H1064N_ H1083N_H1101N) WhcAg construct
MFVFFVLLPLVSSQCVNLTTRTQLPPAYTNSFTRGVYYPDKVFRSSVLHSTQDLFLPFFSNVTWFHAIHVSGTNGTKRFDNPVLPFNDGVYFASTEKSNIIRGWIFGTTLDSKTQSLLIVNNATNVVIKVCEFQFCNDPFLGVYYHKNNKSWMESEFRVYSSANNCTFEYVSQPFLMDLEGKQGNFKNLREFVFKNIDGYFKIYSKHTPINLVRDLPQGFSALEPLVDLPIGINITRFQTLLALHRSYLTPGDSSSGWTAGAAAYYVGYLQPRTFLLKYNENGTITDAVDCALDPLSETKCTLKSFTVEKGIYQTSNFRVQPTESIVRFPNITNLCPFGEVFNATRFASVYAWNRKRISNCVADYSVLYNSASFSTFKCYGVSPTKLNDLCFTNVYADSFVIRGDEVRQIAPGQTGKIADYNYKLPDDFTGCVIAWNSNNLDSKVGGNYNYLYRLFRKSNLKPFERDISTEIYQAGSTPCNGVEGFNCYFPLQSYGFQPTNGVGYQPYRVVVLSFELLHAPATVCGPKKSTNLVKNKCVNFNFNGLTGTGVLTESNKKFLPFQQFGRDIADTTDAVRDPQTLEILDITPCSFGGVSVITPGTNTSNQVAVLYQGVNCTEVPVAIHADQLTPTWRVYSTGSNVFQTRAGCLIGAEHVNNSYECDIPIGAGICASYQTQTNSPRRARSVASQSIIAYTMSLGAENSVAYSNNSIAIPTNFTISVTTEILPVSMTKTSVDCTMYICGDSTECSNLLLQYGSFCTQLNRALTGIAVEQDKNTQEVFAQVKQIYKTPPIKDFGGFNFSQILPDPSKPSKRSFIEDLLFNKVTLADAGFIKQYGDCLGDIAARDLICAQKFNGLTVLPPLLTDEMIAQYTSALLAGTITSGWTFGAGAALQIPFAMQMAYRFNGIGVTQNVLYENQKLIANQFNSAIGKIQDSLSSTASALGKLQDVVNQNAQALNTLVKQLSSNFGAISSVLNDILSRLDPPEAEVQIDRLITGRLQSLQTYVTQQLIRAAEIRASANLAATKMSECVLGQSKRVDFCGKGYQLMSFPQSAPHGVVFLNVTYVPAQEKNFTTAPAICNDGKAHFPREGVFVSNGTNWFVTQRNFYEPQIITTDNTFVSGNCDVVIGIVNNTVYDPLQPELDSGGGGSDIDPYKEFGSSYQLLNFLPLDFFPDLNALVDTATALYEEELTGREHCSPHHTAIRQALVCWDELTKLIAWMSSNITSEQVRTIIVNHVNDTWGLKVRQSLWFHLSCLTFGQHTVQEFLVSFGVWIRTPAPYRPPNAPILSTLPEHTVIC

SEQ ID NO: 10969 - protein, 1301 aa, Artificial Sequence
  SARS-CoV-2/Belgium/ULG-6939/2020__EPI_ISL_417020 spike protein (1-1147)(K986P_V987P_ H1048Q_H1064N_ H1083N_H1101N) WhcAg construct
MFVFLVLLPLVSSQCVNLTTRTQLPPAYTNSFTRGVYYPDKVFRSSVLHSTQDLFLPFFSNVTWFHAIHVSGTNGTKRFDNPVLPFNDGVYFASTEKSNIIRGWIFGTTLDSKTQSLLIVNNATNVVIKVCEFQFCNDPFLGVYYHKNNKSWMESEFRVYSSANNCTFEYVSQPFLMDLEGKQGNFKNLREFVFKNIDGYFKIYSKHTPINLVRDLPQGFSALEPLVDLPIGINITRFQTLLALHRSYLTPGDSSSGWTAGAAAYYVGYLQPRTFLLKYNENGTITDAVDCALDPLSETKCTLKSFTVEKGIYQTSNFRVQPTESIVRFPNITNLCPFGEVFNATRFASVYAWNRKRISNCVADYSVLYNSASFSTFKCYGVSPTKLNDLCFTNVYADSFVIRGDEVRQIAPGQTGKIADYNYKLPDDFTGCVIAWNSNNLDSKVGGNYNYLYRLFRKSNLKPFERDISTEIYQAGSTPCNGVEGFNCYFPLQSYGFQPTNGVGYQPYRVVVLSFELLHAPATVCGPKKSTNLVKNKCVNFNFNGLTGTGVLTESNKKFLPFQQFGRDIADTTDAVRDPQTLEILDITPCSFGGVSVITPGTNTSNQVAVLYQGVNCTEVPVAIHADQLTPTWRVYSTGSNVFQTRAGCLIGAEHVNNSYECDIPIGAGICASYQTQTNSPRRARSVASQSIIAYTMSLGAENSVVYSNNSIAIPTNFTISVTTEILPVSMTKTSVDCTMYICGDSTECSNLLLQYGSFCTQLNRALTGIAVEQDKNTQEVFAQVKQIYKTPPIKDFGGFNFSQILPDPSKPSKRSFIEDLLFNKVTLADAGFIKQYGDCLGDIAARDLICAQKFNGLTVLPPLLTDEMIAQYTSALLAGTITSGWTFGAGAALQIPFAMQMAYRFNGIGVTQNVLYENQKLIANQFNSAIGKIQDSLSSTASALGKLQDVVNQNAQALNTLVKQLSSNFGAISSVLNDILSRLDPPEAEVQIDRLITGRLQSLQTYVTQQLIRAAEIRASANLAATKMSECVLGQSKRVDFCGKGYQLMSFPQSAPHGVVFLNVTYVPAQEKNFTTAPAICNDGKAHFPREGVFVSNGTNWFVTQRNFYEPQIITTDNTFVSGNCDVVIGIVNNTVYDPLQPELDSGGGGSDIDPYKEFGSSYQLLNFLPLDFFPDLNALVDTATALYEEELTGREHCSPHHTAIRQALVCWDELTKLIAWMSSNITSEQVRTIIVNHVNDTWGLKVRQSLWFHLSCLTFGQHTVQEFLVSFGVWIRTPAPYRPPNAPILSTLPEHTVIC

SEQ ID NO: 10970 - protein, 1301 aa, Artificial Sequence
  SARS-CoV-2/France/HF2496/2020__EPI_ISL_418231 spike protein (1-1147)(K986P_V987P_ H1048Q_H1064N_ H1083N_H1101N) WhcAg construct
MFVFLVLLPLVSSQCVNLTTRTQLPPAYTNSFTRGVYYPDKVFRSSVLHSTQDLFLPFFSNVTWFHAIHVSGTNGTKRFDNPVLPFNDGVYFASTEKSNIIRGWIFGTTLDSKTQSLLIVNNATNVVIKVCEFQFCNDPFLGVYYHKNNKSWMESEFRVYSSANNCTFEYVSQPFLMDLEGKQGNFKNLREFVFKNIDGYFKIYSKHTPINLVRDLPQGFSALEPLVDLPIGINITRFQTLLALHRSYLTPGDSSSGWTAGAAAYYVGYLQPRTFLLKYNENGTITDAVDCALDPLSETKCTLKSFTVEKGIYQTSNFRVQPTESIVRFPNITNLCPFGEVFNATRFASVYAWNRKRISNCVADYSVLYNSASFSTFKCYGVSPTKLNDLCFTNVYADSFVIRGDEVRQIAPGQTGKIADYNYKLPDDFTGCVIAWNSNNLDSKVGGNYNYLYRLFRKSNLKPFERDISTEIYQAGSTPCNGVEGFNCYFPLQSYGFQPTNGVGYQPYRVVVLSFELLHAPATVCGPKKSTNLVKNKCVNFNFNGLTGTGVLTESNKKFLPFQQFGRDIADTTDAVRDPQTLEILDITPCSFGGVSVITPGTNTSNQVAVLYQGVNCTEVPVAIHADQLTPTWRVYSTGSNVFQTRAGCLIGAEHVNNSYECDIPIGAGICASYQTQTNSPRRARSVASQSIIAYTMSLGAENSVAYSNNSIAIPTNFTISVTTEILPVSMTKTSVDCTMYICGDSTECSNLLLQYGSFCTQLNRALTGIAVEQDKNTQEVFAQVKQIYKTPPIKDFGGFNFSQILPDPSKPSKRSFIEDLLFNKVTLADAGFIKQYGDCLGDIVARDLICAQKFNGLTVLPPLLTDEMIAQYTSALLAGTITSGWTFGAGAALQIPFAMQMAYRFNGIGVTQNVLYENQKLIANQFNSAIGKIQDSLSSTASALGKLQDVVNQNAQALNTLVKQLSSNFGAISSVLNDILSRLDPPEAEVQIDRLITGRLQSLQTYVTQQLIRAAEIRASANLAATKMSECVLGQSKRVDFCGKGYQLMSFPQSAPHGVVFLNVTYVPAQEKNFTTAPAICNDGKAHFPREGVFVSNGTNWFVTQRNFYEPQIITTDNTFVSGNCDVVIGIVNNTVYDPLQPELDSGGGGSDIDPYKEFGSSYQLLNFLPLDFFPDLNALVDTATALYEEELTGREHCSPHHTAIRQALVCWDELTKLIAWMSSNITSEQVRTIIVNHVNDTWGLKVRQSLWFHLSCLTFGQHTVQEFLVSFGVWIRTPAPYRPPNAPILSTLPEHTVIC

SEQ ID NO: 10971 - protein, 1301 aa, Artificial Sequence
  SARS-CoV-2/USA/WA-UW291/2020__EPI_ISL_418076 spike protein (1-1147)(K986P_V987P_ H1048Q_H1064N_ H1083N_H1101N) WhcAg construct
MFVFLVLLPLVSSQCVNLTTRTQLPPAYTNSFTRGVYYPDKVFRSSVLHSTQDLFLPFFSNVTWFHAIHVSGTNGTKRFDNPVLPFNDGVYFASTEKSNIIRGWIFGTTLDSKTQSLLIVNNATNVVIKVCEFQFCNDPFLGVYYHKNNKSWMESEFRVYSSANNCTFEYVSQPFLMDLEGKQGNFKNLREFVFKNIDGYFKIYSKHTPINLVRDLPQGFSALEPLVDLPIGINITRFQTLLALHRSYLTPGDSSSGWTAGAAAYYVGYLQPRTFLLKYNENGTITDAVDCALDPLSETKCTLKSFTVEKGIYQTSNFRVQPTESIVRFPNITNLCPFGEVFNATRFASVYAWNRKRISNCVADYSVLYNSASFSTFKCYGVSPTKLNDLCFTNVYADSFVIRGDEVRQIAPGQTGKIADYNYKLPDDFTGCVIAWNSNNLDSKVGGNYNYLYRLFRKSNLKPFERDISTEIYQAGSTPCNGVEGFNCYFPLQSYGFQPTNGVGYQPYRVVVLSFELLHAPATVCGPKKSTNLVKNKCVNFNFNGLTGTGVLTESNKKFLPFQQFGRDIADTTDAVRDPQTLEILDITPCSFGGVSVITPGTNTSNQVAVLYQGVNCTEVPVAIHADQLTPTWRVYSTGSNVFQTRAGCLIGAEHVNNSYECDIPIGAGICASYQTQTNSPRRARSVASQSIIAYTMSLGAENSVAYSNNSIAIPTNFTISVTTEILPVSMTKTSVDCTMYICGDSTECSNLLLQYGSFCTQLNRALTGIAVEQDKNTQEVFAQVKQIYKTPPIKDFGGFNFSQILPDPSKPSKRSFIEDLLFNKVTLADAGFIKQYGDCLGDIAARDLICAQKFNGLTVLPPLLTDEMIAQYTSALLAGTITSGWTFGAGAALQIPFAMQMAYRFNGIGVTQNVLYENQKLIANQFNSAIGKIQYSLSSTASALGKLQDVVNQNAQALNTLVKQLSSNFGAISSVLNDILSRLDPPEAEVQIDRLITGRLQSLQTYVTQQLIRAAEIRASANLAATKMSECVLGQSKRVDFCGKGYQLMSFPQSAPHGVVFLNVTYVPAQEKNFTTAPAICNDGKAHFPREGVFVSNGTNWFVTQRNFYEPQIITTDNTFVSGNCDVVIGIVNNTVYDPLQPELDSGGGGSDIDPYKEFGSSYQLLNFLPLDFFPDLNALVDTATALYEEELTGREHCSPHHTAIRQALVCWDELTKLIAWMSSNITSEQVRTIIVNHVNDTWGLKVRQSLWFHLSCLTFGQHTVQEFLVSFGVWIRTPAPYRPPNAPILSTLPEHTVIC

SEQ ID NO: 10972 - protein, 1301 aa, Artificial Sequence; identical to SEQ ID NO: 10935
  SARS-CoV-2/Portugal/PT0034/2020__EPI_ISL_418019 spike protein (1-1147)(K986P_V987P_ H1048Q_H1064N_ H1083N_H1101N) WhcAg construct

SEQ ID NO: 10973 - protein, 1301 aa, Artificial Sequence; identical to SEQ ID NO: 10927
  SARS-CoV-2/Iceland/202/2020__EPI_ISL_417750 spike protein (1-1147)(K986P_V987P_ H1048Q_H1064N_ H1083N_H1101N) WhcAg construct

SEQ ID NO: 10974 - protein, 1301 aa, Artificial Sequence
  SARS-CoV-2/USA/WA-UW261/2020__EPI_ISL_418046 spike protein (1-1147)(K986P_V987P_ H1048Q_H1064N_ H1083N_H1101N) WhcAg construct
MFVFLVLLPLVSSQCVNLTTRTQLPPAYTNSFTRGVYYPDKVFRSSVLHSTQDLFLPFFSNVTWFHAIHVSGTNGTKRFDNPVLPFNDGVYFASTEKSNIIRGWIFGTTLDSKTQSLLIVNNATNVVIKVCEFQFCNDPFLGVYYHKNNKSWMESEFRVYSSANNCTFEYVSQPFLMDLEGKQGNFKNLREFVFKNIDGYFKIYSKHTPINLVRDLPQGFSALEPLVDLPIGINITRFQTLLALHRSYLTPGDSSSGWTAGAAAYYVGYLQPRTFLLKYNENGTITDAVDCALDPLSETKCTLKSFTVEKGIYQTSNFRVQPTESIVRFPNITNLCPFGEVFNATRFTSVYAWNRKRISNCVADYSVLYNSASFSTFKCYGVSPTKLNDLCFTNVYADSFVIRGDEVRQIAPGQTGKIADYNYKLPDDFTGCVIAWNSNNLDSKVGGNYNYLYRLFRKSNLKPFERDISTEIYQAGSTPCNGVEGFNCYFPLQSYGFQPTNGVGYQPYRVVVLSFELLHAPATVCGPKKSTNLVKNKCVNFNFNGLTGTGVLTESNKKFLPFQQFGRDIADTTDAVRDPQTLEILDITPCSFGGVSVITPGTNTSNQVAVLYQDVNCTEVPVAIHADQLTPTWRVYSTGSNVFQTRAGCLIGAEHVNNSYECDIPIGAGICASYQTQTNSPRRARSVASQSIIAYTMSLGAENSVAYSNNSIAIPTNFTISVTTEILPVSMTKTSVDCTMYICGDSTECSNLLLQYGSFCTQLNRALTGIAVEQDKNTQEVFAQVKQIYKTPPIKDFGGFNFSQILPDPSKPSKRSFIEDLLFNKVTLADAGFIKQYGDCLGDIAARDLICAQKFNGLTVLPPLLTDEMIAQYTSALLAGTITSGWTFGAGAALQIPFAMQMAYRFNGIGVTQNVLYENQKLIANQFNSAIGKIQDSLSSTASALGKLQDVVNQNAQALNTLVKQLSSNFGAISSVLNDILSRLDPPEAEVQIDRLITGRLQSLQTYVTQQLIRAAEIRASANLAATKMSECVLGQSKRVDFCGKGYQLMSFPQSAPHGVVFLNVTYVPAQEKNFTTAPAICNDGKAHFPREGVFVSNGTNWFVTQRNFYEPQIITTDNTFVSGNCDVVIGIVNNTVYDPLQPELDSGGGGSDIDPYKEFGSSYQLLNFLPLDFFPDLNALVDTATALYEEELTGREHCSPHHTAIRQALVCWDELTKLIAWMSSNITSEQVRTIIVNHVNDTWGLKVRQSLWFHLSCLTFGQHTVQEFLVSFGVWIRTPAPYRPPNAPILSTLPEHTVIC

SEQ ID NO: 10975 - protein, 1301 aa, Artificial Sequence
  SARS-CoV-2/Portugal/PT0035/2020__EPI_ISL_418020 spike protein (1-1147)(K986P_V987P_ H1048Q_H1064N_ H1083N_H1101N) WhcAg construct
MFVFLVLLPLVSSQCVNLTTRTQLPPAYTNSFTRGVYYPDKVFRSSVLHSTQDLFLPFFSNVTWFHAIHVSGTNGTKRFDNPVLPFNDGVYFASTEKSNIIRGWIFGTTLDSKTQSLLIVNNATNVVIKVCEFQFCNDPFLGVYYHKNNKSWMESEFRVYSSANNCTFEYVSQPFLMDLEGKQGNFKNLREFVFKNIDGYFKIYSKHTPINLVRDLPQGFSALEPLVDLPIGINITRFQTLLALHRSYLTPGDSSSGWTAGAAAYYVGYLQPRTFLLKYNENGTITDAVDCALDPLSETKCTLKSFTVEKGIYQTSNFRVQPTESIVRFPNITNLCPFGEVFNATRFASVYAWNRKRISNCVADYSVLYNSASFSTFKCYGVSPTKLNDLCFTNVYADSFVIRGDEVRQIAPGQTGKIADYNYKLPDDFTGCVIAWNSNNLDSKVGGNYNYLYRLFRKSNLKPFERDISTEIYQAGSTPCNGVEGFNCYFPLQSYGFQPTNGVGYQPYRVVVLSFELLHAPATVCGPKKSTNLVKNKCVNFNFNGLTGTGVLTESNKKFLPFQQFGRDIADTTDAVRDPQTLEILDITPCSFGGVSVITPGTNTSNQVAVLYQDVNCTEVPVAIHADQLTPTWRVYSTGSNVFQTRAGCLIGAEHVNNSYECDIPIGAGICASYQTQTNSPRRARSVASQSIIAYTMSLGAENSVAYSNNSIAIPTNFTISVTTEILPVSMTKTSVDCTMYICGDSTECSNLLLQYGSFCTQLNRALTGIAVEQDKNTQEVFAQVKQIYKTPPIKDFGGFNFSQILPDPSKPSKRSFIEDLLFNKVTLADAGFIKQYGDCLGDISARDLICAQKFNGLTVLPPLLTDEMIAQYTSALLAGTITSGWTFGAGAALQIPFAMQMAYRFNGIGVTQNVLYENQKLIANQFNSAIGKIQDSLSSTASALGKLQDVVNQNAQALNTLVKQLSSNFGAISSVLNDILSRLDPPEAEVQIDRLITGRLQSLQTYVTQQLIRAAEIRASANLAATKMSECVLGQSKRVDFCGKGYQLMSFPQSAPHGVVFLNVTYVPAQEKNFTTAPAICNDGKAHFPREGVFVSNGTNWFVTQRNFYEPQIITTDNTFVSGNCDVVIGIVNNTVYDPLQPELDSGGGGSDIDPYKEFGSSYQLLNFLPLDFFPDLNALVDTATALYEEELTGREHCSPHHTAIRQALVCWDELTKLIAWMSSNITSEQVRTIIVNHVNDTWGLKVRQSLWFHLSCLTFGQHTVQEFLVSFGVWIRTPAPYRPPNAPILSTLPEHTVIC

SEQ ID NO: 10976 - protein, 1301 aa, Artificial Sequence
  SARS-CoV-2/USA/NY-NYUMC7/2020__EPI_ISL_418192 spike protein (1-1147)(K986P_V987P_ H1048Q_H1064N_ H1083N_H1101N) WhcAg construct
MFVFLVLLPLVSSQCVNLTTRTQLPPAYTNSFTRGVYYPDKVFRSSVLHSTQDLFLPFFSNVTWFHAIHVSGTNGTKRFDNPVLPFNDGVYFASTEKSNIIRGWIFGTTLDSKTQSLLIVNNATNVVIKVCEFQFCNDPFLGVYHHKNNKSWMESEFRVYSSANNCTFEYVSQPFLMDLEGKQGNFKNLREFVFKNIDGYFKIYSKHTPINLVRDLPQGFSALEPLVDLPIGINITRFQTLLALHRSYLTPGDSSSGWTAGAAAYYVGYLQPRTFLLKYNENGTITDAVDCALDPLSETKCTLKSFTVEKGIYQTSNFRVQPTESIVRFPNITNLCPFGEVFNATRFASVYAWNRKRISNCVADYSVLYNSASFSTFKCYGVSPTKLNDLCFTNVYADSFVIRGDEVRQIAPGQTGKIADYNYKLPDDFTGCVIAWNSNNLDSKVGGNYNYLYRLFRKSNLKPFERDISTEIYQAGSTPCNGVEGFNCYFPLQSYGFQPTNGVGYQPYRVVVLSFELLHAPATVCGPKKSTNLVKNKCVNFNFNGLTGTGVLTESNKKFLPFQQFGRDIADTTDAVRDPQTLEILDITPCSFGGVSVITPGTNTSNQVAVLYQGVNCTEVPVAIHADQLTPTWRVYSTGSNVFQTRAGCLIGAEHVNNSYECDIPIGAGICASYQTQTNSPRRARSVASQSIIAYTMSLGAENSVAYSNNSIAIPTNFTISVTTEILPVSMTKTSVDCTMYICGDSTECSNLLLQYGSFCTQLNRALTGIAVEQDKNTQEVFAQVKQIYKTPPIKDFGGFNFSQILPDPSKPSKRSFIEDLLFNKVTLADAGFIKQYGDCLGDIAARDLICAQKFNGLTVLPPLLTDEMIAQYTSALLAGTITSGWTFGAGAALQIPFAMQMAYRFNGIGVTQNVLYENQKLIANQFNSAIGKIQDSLSSTASALGKLQDVVNQNAQALNTLVKQLSSNFGAISSVLNDILSRLDPPEAEVQIDRLITGRLQSLQTYVTQQLIRAAEIRASANLAATKMSECVLGQSKRVDFCGKGYQLMSFPQSAPHGVVFLNVTYVPAQEKNFTTAPAICNDGKAHFPREGVFVSNGTNWFVTQRNFYEPQIITTDNTFVSGNCDVVIGIVNNTVYDPLQPELDSGGGGSDIDPYKEFGSSYQLLNFLPLDFFPDLNALVDTATALYEEELTGREHCSPHHTAIRQALVCWDELTKLIAWMSSNITSEQVRTIIVNHVNDTWGLKVRQSLWFHLSCLTFGQHTVQEFLVSFGVWIRTPAPYRPPNAPILSTLPEHTVIC

SEQ ID NO: 10977 - protein, 1301 aa, Artificial Sequence
  SARS-CoV-2/Iceland/189/2020__EPI_ISL_417709 spike protein (1-1147)(K986P_V987P_ H1048Q_H1064N_ H1083N_H1101N) WhcAg construct
MFVFLVLLPLVSSQCVNLTTRTQLPPAYTNSFTRGVYYPDKVFRSSVLHSTQDLFLPFFSNVTWFHAIHVSGTNGTKRFDNPVLPFNDGVYFASTEKSNIIRGWIFGTTLDSKTQSLLIVNNATNVVIKVCEFQFCNDPFLGVYYHKNNKSWMESEFRVYSSANNCTFEYVSQPFLMDLEGKQGNFKNLREFVFKNIDGYFKIYSKHTPINLVRDLPQGFSALEPLVDLPIGINITRFQTLLALHRSYLTPGDSSSGWTAGAAAYYVGYLQPRTFLLKYNENGTITDAVDCALDPLSETKCTLKSFTVEKGIYQTSNFRVQPTESIVRFPNITNLCPFGEVFNATRFASVYAWNRKRISNCVADYSVLYNSASFSTFKCYGVSPTKLNDLCFTNVYADSFVIRGDEVRQIAPGQTGKIADYNYKLPDDFTGCVIAWNSNNLDSKVGGNYNYLYRLFRKSNLKPFERDISTEIYQAGSTPCNGVEGFNCYFPLQSYGFQPTNGVGYQPYRVVVLSFELLHAPATVCGPKKSTNLVKNKCVNFNFNGLTGTGVLTESNKKFLPFQQFGRDIADTTDAVRDPQTLEILDITPCSFGGVSVITPGTNTSNQVAVLYQGVNCTEVPVAIHADQLTPTWRVYSTGSNVFQTRAGCLIGAEHVNNSYECDIPIGAGICASYQTQTNSPRRARSVASQSIIAYTMSLGAENSVAYSNNSIAIPTNFTISVTTEILPVSMTKTSVDCTMYICGDSTECSNLLLQYGSFCTQLNRALTGIAVEQDKNTQEVFAQVKQIYKTPPIKDFGGFNFSQILPDPSKPSKRSFIEDLLFNKVTLADAGFTKQYGDCLGDIAARDLICAQKFNGLTVLPPLLTDEMIAQYTSALLAGTITSGWTFGAGAALQIPFAMQMAYRFNGIGVTQNVLYENQKLIANQFNSAIGKIQDSLSSTASALGKLQDVVNQNAQALNTLVKQLSSNFGAISSVLNDILSRLDPPEAEVQIDRLITGRLQSLQTYVTQQLIRAAEIRASANLAATKMSECVLGQSKRVDFCGKGYQLMSFPQSAPHGVVFLNVTYVPAQEKNFTTAPAICNDGKAHFPREGVFVSNGTNWFVTQRNFYEPQIITTDNTFVSGNCDVVIGIVNNTVYDPLQPELDSGGGGSDIDPYKEFGSSYQLLNFLPLDFFPDLNALVDTATALYEEELTGREHCSPHHTAIRQALVCWDELTKLIAWMSSNITSEQVRTIIVNHVNDTWGLKVRQSLWFHLSCLTFGQHTVQEFLVSFGVWIRTPAPYRPPNAPILSTLPEHTVIC

SEQ ID NO: 10978 - protein, 1301 aa, Artificial Sequence
  SARS-CoV-2/Australia/NSW56/2020__EPI_ISL_417408 spike protein (1-1147)(K986P_V987P_ H1048Q_H1064N_ H1083N_H1101N) WhcAg construct
MFVFLVLLPLVSSQCVNLTTRTQLPPAYTNSFTRGVYYPDKVFRSSVLHSTQDLFLPFFSNVTWFHAIHVSGTNGTKRFDNPVLPFNDGVYFASTEKSNIIRGWIFGTTLDSKTQSLLIVNNATNVVIKVCEFQFCNDPFLGVYYHKNNKSWMESEFRVYSSANNCTFEYVSQPFLMDLEGKQGNFKNLREFVFKNIDGYFKIYSKHTPINLVRDLPQGFSALEPLVDLPIGINITRFQTLLALHRSYLTPGDSSSGWTAGAAAYYVGYLQPRTFLLKYNENGTITDAVDCALDPLSETKCTLKSFTVEKGIYQTSNFRVQPTESIVRFPNITNLCPFGEVFNATRFASVYAWNRKRISNCVADYSVLYNSASFSTFKCYGVSPTKLNDLCFTNVYADSFVIRGDEVRQIAPGQTGKIADYNYKLPDDFTGCVIAWNSNNLDSKVGGNYNYLYRLFRKSNLKPFERDISTEIYQAGSTPCNGVEGFNCYFPLQSYGFQPTNGVGYQPYRVVVLSFELLHAPATVCGPKKSTNLVKNKCVNFNFNGLTGTGVLTESNKKFLPFQQFGRDIADTTDAVRDPQTLEILDITPCSFGGVSVITPGTNTSNQVAVLYQDVNCTEVPVAIHADQLTPTWRVYSTGSNVFQTRAGCLIGAEHVNNSYECDIPIGAGICASYQTQTNSPRRARSVASQSIIAYTMSLGAENSVAYSNNSIAIPTNFTISVTTEILPVSMTKTSVDCTMYICGDSTECSNLLLQYGSFCTQLNRALTGIAVEQDKNTQEVFAQVKQIYKTPPIKDFGGFNFSQILPDSSKPSKRSFIEDLLFNKVTLADAGFIKQYGDCLGDIAARDLICAQKFNGLTVLPPLLTDEMIAQYTSALLAGTITSGWTFGAGAALQIPFAMQMAYRFNGIGVTQNVLYENQKLIANQFNSAIGKIQDSLSSTASALGKLQDVVNQNAQALNTLVKQLSSNFGAISSVLNDILSRLDPPEAEVQIDRLITGRLQSLQTYVTQQLIRAAEIRASANLAATKMSECVLGQSKRVDFCGKGYQLMSFPQSAPHGVVFLNVTYVPAQEKNFTTAPAICNDGKAHFPREGVFVSNGTNWFVTQRNFYEPQIITTDNTFVSGNCDVVIGIVNNTVYDPLQPELDSGGGGSDIDPYKEFGSSYQLLNFLPLDFFPDLNALVDTATALYEEELTGREHCSPHHTAIRQALVCWDELTKLIAWMSSNITSEQVRTIIVNHVNDTWGLKVRQSLWFHLSCLTFGQHTVQEFLVSFGVWIRTPAPYRPPNAPILSTLPEHTVIC

SEQ ID NO: 10979 - protein, 1301 aa, Artificial Sequence
  SARS-CoV-2/Iceland/280/2020__EPI_ISL_417608 spike protein (1-1147)(K986P_V987P_ H1048Q_H1064N_ H1083N_H1101N) WhcAg construct
MFVFLVLLPLVSSQCVNLTTRTQLPPAYTNSFTRGVYYPDKVFRSSVLHSTQDLFLPFFSNVTWFHAIHVSGTNGTKRFDNPVLPFNDGVYFASTEKSNIIRGWIFGTTLDSKTQSLLIVNNATNVVIKVCEFQFCNDPFLGVYYHKNNKSWMESEFRVYSSANNCTFEYVSQPFLMDLEGKQGNFKNLREFVFKNIDGYFKIYSKHTPINLVRDLPQGFSALEPLVDLPIGINITRFQTLLALHRSYLTPGDSSSGWTAGAAAYYVGYLQPRTFLLKYNENGTITDAVDCALDPLSETKCTLKSFTVEKGIYQTSNFRVQPTESIVRFPNITNLCPFGEVFNATRFASVYAWNRKRISNCVADYSVLYNSASFSTFKCYGVSPTKLNDLCFTNVYADSFVIRGDEVRQIAPGQTGKIADYNYKLPDDFTGCVIAWNSNNLDSKVGGNYNYLYRLFRKSNLKPFERDISTEIYQAGSTPCNGVEGFNCYFPLQSYGFQPTNGVGYQPYRVVVLSFELLHAPATVCGPKKSTNLVKNKCVNFNFNGLTGTGVLTESNKKFLPFQQFGRDIADTTDAVRDPQTLEILDITPCSFGGVSVITPGTNTSNQVAVLYQGVNCTEVPVAIHADQLTPTWRVYSTGSNVFQTRAGCLIGAEHVNNSYECDIPIGAGICASYHTQTNSPRRARSVASQSIIAYTMSLGAENSVAYSNNSIAIPTNFTISVTTEILPVSMTKTSVDCTMYICGDSTECSNLLLQYGSFCTQLNRALTGIAVEQDKNTQEVFAQVKQIYKTPPIKDFGGFNFSQILPDPSKPSKRSFIEDLLFNKVTLADAGFIKQYGDCLGDIAARDLICAQKFNGLTVLPPLLTDEMIAQYTSALLAGTITSGWTFGAGAALQIPFAMQMAYRFNGIGVTQNVLYENQKLIANQFNSAIGKIQDSLSSTASALGKLQDVVNQNAQALNTLVKQLSSNFGAISSVLNDILSRLDPPEAEVQIDRLITGRLQSLQTYVTQQLIRAAEIRASANLAATKMSECVLGQSKRVDFCGKGYQLMSFPQSAPHGVVFLNVTYVPAQEKNFTTAPAICNDGKAHFPREGVFVSNGTNWFVTQRNFYEPQIITTDNTFVSGNCDVVIGIVNNTVYDPLQPELDSGGGGSDIDPYKEFGSSYQLLNFLPLDFFPDLNALVDTATALYEEELTGREHCSPHHTAIRQALVCWDELTKLIAWMSSNITSEQVRTIIVNHVNDTWGLKVRQSLWFHLSCLTFGQHTVQEFLVSFGVWIRTPAPYRPPNAPILSTLPEHTVIC

SEQ ID NO: 10980 - protein, 1301 aa, Artificial Sequence; identical to SEQ ID NO: 10935
  SARS-CoV-2/Iceland/247/2020__EPI_ISL_417575 spike protein (1-1147)(K986P_V987P_ H1048Q_H1064N_ H1083N_H1101N) WhcAg construct

SEQ ID NO: 10981 - protein, 1301 aa, Artificial Sequence
  SARS-CoV-2/Iceland/238/2020__EPI_ISL_417566 spike protein (1-1147)(K986P_V987P_ H1048Q_H1064N_ H1083N_H1101N) WhcAg construct
MFVFLVLLPLVSSQCVNLTTRTQLPPAYTNSFTRGVYYPDKVFRSSVLHSTQDLFLPFFSNVTWFHAIHVSGTNGTKRFDNPVLPFNDGVYFASTEKSNIIRGWIFGTTLDSKTQSLLIVNNATNVVIKVCEFQFCNDPFLGVYYHKNNKSWMESEFRVYSSANNCTFEYVSQPFLMDLEGKQGNFKNLREFVFKNIDGYFKIYSKHTPINLVRDLPQGFSALEPLVDLPIGINITRFQTLLALHRSYLTPGDSSSGWTAGAAAYYVGYLQPRTFLLKYNENGTITDAVDCALDPLSETKCTLKSFTVEKGIYQTSNFRVQPTESIVRFPNITNLCPFGEVFNATRFASVYAWNRKRISNCVADYSVLYNSASFSTFKCYGVSPTKLNDLCFTNVYADSFVIRGDEVRQIAPGQTGKIADYNYKLPDDFTGCVIAWNSNNLDSKVGGNYNYLYRLFRKSNLKPFERDISTEIYQAGSTPCNGVEGFNCYFPLQSYGFQPTNGVGYQPYRVVVLSFELLHAPATVCGPKKSTNLVKNKCVNFNFNGLTGTGVLTESNKKFLPFQQFGRDIADTTDAVRDPQTLEILDITPCSFGGVSVITPGTNTSNQVAVLYQGVNCTEVPVAIHADQLTPTWRVYSTGSNVFQTRAGCLIGAEHVNNSYECDIPIGAGICASYQTQTNSPRRARSVASQSIIAYTMSLGAENSVAYSNNSIAIPTNFTISVTTEILPVSMTKTSVDCTMYICGDSTECSNLLLQYGSFCTQLNRALTGIAVEQDKNTQEVFAQVKQIYKTPPIKDFGGFNFSQILPDPSKPSKRSFIEDLLFNKVTLADVGFIKQYGDCLGDIAARDLICAQKFNGLTVLPPLLTDEMIAQYTSALLAGTITSGWTFGAGAALQIPFAMQMAYRFNGIGVTQNVLYENQKLIANQFNSAIGKIQDSLSSTASALGKLQDVVNQNAQALNTLVKQLSSNFGAISSVLNDILSRLDPPEAEVQIDRLITGRLQSLQTYVTQQLIRAAEIRASANLAATKMSECVLGQSKRVDFCGKGYQLMSFPQSAPHGVVFLNVTYVPAQEKNFTTAPAICNDGKAHFPREGVFVSNGTNWFVTQRNFYEPQIITTDNTFVSGNCDVVIGIVNNTVYDPLQPELDSGGGGSDIDPYKEFGSSYQLLNFLPLDFFPDLNALVDTATALYEEELTGREHCSPHHTAIRQALVCWDELTKLIAWMSSNITSEQVRTIIVNHVNDTWGLKVRQSLWFHLSCLTFGQHTVQEFLVSFGVWIRTPAPYRPPNAPILSTLPEHTVIC

SEQ ID NO: 10982 - protein, 1301 aa, Artificial Sequence
  SARS-CoV-2/Greece/16/2020__EPI_ISL_418265 spike protein (1-1147)(K986P_V987P_ H1048Q_H1064N_ H1083N_H1101N) WhcAg construct
MFVFLVLLPLVSSQCVNLTTRTQLPPAYTNSFTRGVYYPDKVFRSSVLHSTQDLFLPFFSNVTWFHAIHVSGTNGTKRFDNPVLPFNDGVYFASTEKSNIIRGWIFGTTLDSKTQSLLIVNNATNVVIKVCEFQFCNDPFLGVYYHKNNKSWMESEFRVYSSANNCTFEYVSQPFLMDLEGKQGNFKNLREFVFKNVDGYFKIYSKHTPINLVRDLPQGFSALEPLVDLPIGINITRFQTLLALHRSYLTPGDSSSGWTAGAAAYYVGYLQPRTFLLKYNENGTITDAVDCALDPLSETKCTLKSFTVEKGIYQTSNFRVQPTESIVRFPNITNLCPFGEVFNATRFASVYAWNRKRISNCVADYSVLYNSASFSTFKCYGVSPTKLNDLCFTNVYADSFVIRGDEVRQIAPGQTGKIADYNYKLPDDFTGCVIAWNSNNLDSKVGGNYNYLYRLFRKSNLKPFERDISTEIYQAGSTPCNGVEGFNCYFPLQSYGFQPTNGVGYQPYRVVVLSFELLHAPATVCGPKKSTNLVKNKCVNFNFNGLTGTGVLTESNKKFLPFQQFGRDIADTTDAVRDPQTLEILDITPCSFGGVSVITPGTNTSNQVAVLYQDVNCTEVPVAIHADQLTPTWRVYSTGSNVFQTRAGCLIGAEHVNNSYECDIPIGAGICASYQTQTNSPRRARSVASQSIIAYTMSLGAENSVAYSNNSIAIPTNFTISVTTEILPVSMTKTSVDCTMYICGDSTECSNLLLQYGSFCTQLNRALTGIAVEQDKNTQEVFAQVKQIYKTPPIKDFGGFNFSQILPDPSKPSKRSFIEDLLFNKVTLADAGFIKQYGDCLGDIAARDLICAQKFNGLTVLPPLLTDEMIAQYTSALLAGTITSGWTFGAGAALQIPFAMQMAYRFNGIGVTQNVLYENQKLIANQFNSAIGKIQDSLSSTASALGKLQDVVNQNAQALNTLVKQLSSNFGAISSVLNDILSRLDPPEAEVQIDRLITGRLQSLQTYVTQQLIRAAEIRASANLAATKMSECVLGQSKRVDFCGKGYQLMSFPQSAPHGVVFLNVTYVPAQEKNFTTAPAICNDGKAHFPREGVFVSNGTNWFVTQRNFYEPQIITTDNTFVSGNCDVVIGIVNNTVYDPLQPELDSGGGGSDIDPYKEFGSSYQLLNFLPLDFFPDLNALVDTATALYEEELTGREHCSPHHTAIRQALVCWDELTKLIAWMSSNITSEQVRTIIVNHVNDTWGLKVRQSLWFHLSCLTFGQHTVQEFLVSFGVWIRTPAPYRPPNAPILSTLPEHTVIC

SEQ ID NO: 10983 - protein, 1301 aa, Artificial Sequence
  SARS-CoV-2/Iceland/319/2020__EPI_ISL_417648 spike protein (1-1147)(K986P_V987P_ H1048Q_H1064N_ H1083N_H1101N) WhcAg construct
MFVFLVLLPLVSSQCVNLTTRTQLPPAYTNSFTRGVYYPDKVFRSSVLHSTQDLFLPFFSNVTWFHAIHVSGTNGTKRFDNPVLPFNDGVYFASTEKSNIIRGWIFGTTLDSKTQSLLIVNNATNVVIKVCEFQFCNDPFLGVYYHKNNKSWMESEFRVYSSANNCTFEYVSQPFLIDLEGKQGNFKNLREFVFKNIDGYFKIYSKHTPINLVRDLPQGFSALEPLVDLPIGINITRFQTLLALHRSYLTPGDSSSGWTAGAAAYYVGYLQPRTFLLKYNENGTITDAVDCALDPLSETKCTLKSFTVEKGIYQTSNFRVQPTESIVRFPNITNLCPFGEVFNATRFASVYAWNRKRISNCVADYSVLYNSASFSTFKCYGVSPTKLNDLCFTNVYADSFVIRGDEVRQIAPGQTGKIADYNYKLPDDFTGCVIAWNSNNLDSKVGGNYNYLYRLFRKSNLKPFERDISTEIYQAGSTPCNGVEGFNCYFPLQSYGFQPTNGVGYQPYRVVVLSFELLHAPATVCGPKKSTNLVKNKCVNFNFNGLTGTGVLTESNKKFLPFQQFGRDIADTTDAVRDPQTLEILDITPCSFGGVSVITPGTNTSNQVAVLYQGVNCTEVPVAIHADQLTPTWRVYSTGSNVFQTRAGCLIGAEHVNNSYECDIPIGAGICASYQTQTNSPRRARSVASQSIIAYTMSLGAENSVAYSNNSIAIPTNFTISVTTEILPVSMTKTSVDCTMYICGDSTECSNLLLQYGSFCTQLNRALTGIAVEQDKNTQEVFAQVKQIYKTPPIKDFGGFNFSQILPDPSKPSKRSFIEDLLFNKVTLADAGFIKQYGDCLGDIAARDLICAQKFNGLTVLPPLLTDEMIAQYTSALLAGTITSGWTFGAGAALQIPFAMQMAYRFNGIGVTQNVLYENQKLIANQFNSAIGKIQDSLSSTASALGKLQDVVNQNAQALNTLVKQLSSNFGAISSVLNDILSRLDPPEAEVQIDRLITGRLQSLQTYVTQQLIRAAEIRASANLAATKMSECVLGQSKRVDFCGKGYQLMSFPQSAPHGVVFLNVTYVPAQEKNFTTAPAICNDGKAHFPREGVFVSNGTNWFVTQRNFYEPQIITTDNTFVSGNCDVVIGIVNNTVYDPLQPELDSGGGGSDIDPYKEFGSSYQLLNFLPLDFFPDLNALVDTATALYEEELTGREHCSPHHTAIRQALVCWDELTKLIAWMSSNITSEQVRTIIVNHVNDTWGLKVRQSLWFHLSCLTFGQHTVQEFLVSFGVWIRTPAPYRPPNAPILSTLPEHTVIC

SEQ ID NO: 10984 - protein, 1301 aa, Artificial Sequence
  SARS-CoV-2/Congo/94/2020__EPI_ISL_417947 spike protein (1-1147)(K986P_V987P_ H1048Q_H1064N_ H1083N_H1101N) WhcAg construct
MFVFLVLLPLVSSQCVNLTTRTQLPPAYTNSFTRGVYYPDKVFRSSVLHSTQDLFLPFFSNVTWFHAIHVSGTNGTKRFDNPVLPFNDGVYFASTEKSNIIRGWIFGTTLDSKTQSLLIVNNATNVVIKVCEFQFCNDPFLGVYYHKNNKSWMESEFRVYSSANNCTFEYVSQPFLMDLEGKQGNFKNLREFVFKNIDGYFKIYSKHTPINLVRDLPQGFSALEPLVDLPIGINITRFQTLLALHRSYLTPGDSSSGWTAGAAAYYVGYLQPRTFLLKYNENGTITDAVDCALDPLSETKCTLKSFTVEKGIYQTSNFRVQPTESIVRFPNITNLCPFGEVFNATRFASVYAWNRKRISNCVADYSVLYNSASFSTFKCYGVSPTKLNDLCFTNVYADSFVIRGDEVRQIAPGQTGKIADYNYKLPDDFTGCVIAWNSNNLDSKVGGNYNYLYRLFRKSNLKPFERDISTEIYQAGSTPCNGVEGFNCYFPLQSYGFQPTNGVGYQPYRVVVLSFELLHAPATVCGPKKSTNLVKNKCVNFNFNGLTGTGVLTESNKKFLPFQQFGRDIADTTDAVRDPQTLEILDITPCSFGGVSVITPGTNTSNQVAVLYQGVNCTEVPVAIHADQLTPTWRVYSTGSNVFQTRAGCLIGAEHVNNSYECDIPIGAGICASYQTQTNSPRRARSVASQSIIAYTMSLGAENSVAYSNNSIAIPTNFTISVTTEILPVSMTKTSVDCTMYICGDSTECSNLLLQYGSFCTQLNRALTGIAVEQDKNTQEVFAQVKQIYKTPPIKDFGGFNFSQILPDPSKPSKRSFIEDILFNKVTLADAGFIKQYGDCLGDIAARDLICAQKFNGLTVLPPLLTDEMIAQYTSALLAGTITSGWTFGAGAALQIPFAMQMAYRFNGIGVTQNVLYENQKLIANQFNSAIGKIQDSLSSTASALGKLQDVVNQNAQALNTLVKQLSSNFGAISSVLNDILSRLDPPEAEVQIDRLITGRLQSLQTYVTQQLIRAAEIRASANLAATKMSECVLGQSKRVDFCGKGYQLMSFPQSAPHGVVFLNVTYVPAQEKNFTTAPAICNDGKAHFPREGVFVSNGTNWFVTQRNFYEPQIITTDNTFVSGNCDVVIGIVNNTVYDPLQPELDSGGGGSDIDPYKEFGSSYQLLNFLPLDFFPDLNALVDTATALYEEELTGREHCSPHHTAIRQALVCWDELTKLIAWMSSNITSEQVRTIIVNHVNDTWGLKVRQSLWFHLSCLTFGQHTVQEFLVSFGVWIRTPAPYRPPNAPILSTLPEHTVIC

SEQ ID NO: 10985 - protein, 1301 aa, Artificial Sequence
  SARS-CoV-2/Congo/158/2020__EPI_ISL_417950 spike protein (1-1147)(K986P_V987P_ H1048Q_H1064N_ H1083N_H1101N) WhcAg construct
MFVFLVLLPLVSSQCVNLTTRTQLPPAYTNSFTRGVYYPDKVFRSSVLHSTQDLFLPFFSNVTWFHAIHVSGTNGTKRFDNPVLPFNDGVYFASTEKSNIIRGWIFGTTLDSKTQSLLIVNNATNVVIKVCEFQFCNDPFLGVYYHKNNKSWMESEFRVYSSANNCTFEYVSQPFLMDLEGKQGNFKNLREFVFKNIDGYFKIYSKHTPINLVRDLPQGFSALEPLVDLPIGINITRFQTLLALHRSYLTPGDSSSGWTAGAAAYYVGYLQPRTFLLKYNENGTITDAVDCALDPLSETKCTLKSFTVEKGIYQTSNFRVQPTESIVRFPNITNLCPFGEVFNATRFASVYAWNRKRISNCVADYSVLYNSASFSTFKCYGVSPTKLNDLCFTNVYADSFVIRGDEVRQIAPGQTGKIADYNYKLPDDFTGCVIAWNSNNLDSKVGGNYNYLYRLFRKSNLKPFERDISTEIYQAGSTPCNGVEGFNCYFPLQSYGFQPTNGVGYQPYRVVVLSFELLHAPATVCGPKKSTNLVKNKCVNFNFNGLTGTGVLTESNKKFLPFQQFGRDIADTTDAVRDPQTLEILDITPCSFGGVSVITPGTNTSNQVAVLYQDVNCTEVPVAIHADQLTPTWRVYSTGSNVFQTRAGCLIGAEHVNNSYECDIPIGAGICASYQTQTNSPRRARSVASQSIIAYTMSLGAENSVAYSNNSIAIPTNFTISVTTEILPVSMTKTSVDCTMYICGDSTECSNLLLQYGSFCTQLNRALTGIAVEQDKNTQEVFAQVKQIYKTPPIKDFGGFNFSQILPDPSKPSKRSFIEDLLFNKVTLADAGFIKQYGDCLGDIAARDLICAQKFNGLTVLPPLLTDEMIAQYTSALLAGTITSGWTFGAGAALQIPFAMQMAYRFNGIGVTQNVLYENQKLIANQFNSAIGKIQDSLSSTASALGKLQDVVNQNAQALNTLVKQLSSNFGAISSVLNDILSRLDPPEAEVQIDRLITGRLQSLQTYVTQQLIRAAEIRASANLAATKMSECVLGQSKRVDFCGKGYQLMSFPQSAPHGVVFLNVTYVPAQEKNFTTAPAICNDGKAHFPREGVFVSNGTNWFVTQRNFYEPQIITTDNTFLSGNCDVVIGIVNNTVYDPLQPELDSGGGGSDIDPYKEFGSSYQLLNFLPLDFFPDLNALVDTATALYEEELTGREHCSPHHTAIRQALVCWDELTKLIAWMSSNITSEQVRTIIVNHVNDTWGLKVRQSLWFHLSCLTFGQHTVQEFLVSFGVWIRTPAPYRPPNAPILSTLPEHTVIC

SEQ ID NO: 10986 - protein, 1301 aa, Artificial Sequence
  SARS-CoV-2/USA/UT-00034/2020__EPI_ISL_417977 spike protein (1-1147)(K986P_V987P_ H1048Q_H1064N_ H1083N_H1101N) WhcAg construct
MFVFLVLLPLVSSQCVNLTTRTQLPPAYTNSFTRGVYYPDKVFRSSVLHSTQDLFLPFFSNVTWFHAIHVSGTNGTKRFDNPVLPFNDGVYFASTEKSNIIRGWIFGTTLDSKTQSLLIVNNATNVVIKVCEFQFCNDPFLGVYYYKNNKSWMESEFRVYSSANNCTFEYVSQPFLMDLEGKQGNFKNLREFVFKNIDGYFKIYSKHTPINLVRDLPQGFSALEPLVDLPIGINITRFQTLLALHRSYLTPGDSSSGWTAGAAAYYVGYLQPRTFLLKYNENGTITDAVDCALDPLSETKCTLKSFTVEKGIYQTSNFRVQPTESIVRFPNITNLCPFGEVFNATRFASVYAWNRKRISNCVADYSVLYNSASFSTFKCYGVSPTKLNDLCFTNVYADSFVIRGDEVRQIAPGQTGKIADYNYKLPDDFTGCVIAWNSNNLDSKVGGNYNYLYRLFRKSNLKPFERDISTEIYQAGSTPCNGVEGFNCYFPLQSYGFQPTNGVGYQPYRVVVLSFELLHAPATVCGPKKSTNLVKNKCVNFNFNGLTGTGVLTESNKKFLPFQQFGRDIADTTDAVRDPQTLEILDITPCSFGGVSVITPGTNTSNQVAVLYQGVNCTEVPVAIHADQLTPTWRVYSTGSNVFQTRAGCLIGAEHVNNSYECDIPIGAGICASYQTQTNSPRRARSVASQSIIAYTMSLGAENSVAYSNNSIAIPTNFTISVTTEILPVSMTKTSVDCTMYICGDSTECSNLLLQYGSFCTQLNRALTGIAVEQDKNTQEVFAQVKQIYKTPPIKDFGGFNFSQILPDPSKPSKRSFIEDLLFNKVTLADAGFIKQYGDCLGDIAARDLICAQKFNGLTVLPPLLTDEMIAQYTSALLAGTITSGWTFGAGAALQIPFAMQMAYRFNGIGVTQNVLYENQKLIANQFNSAIGKIQDSLSSTASALGKLQDVVNQNAQALNTLVKQLSSNFGAISSVLNDILSRLDPPEAEVQIDRLITGRLQSLQTYVTQQLIRAAEIRASANLAATKMSECVLGQSKRVDFCGKGYQLMSFPQSAPHGVVFLNVTYVPAQEKNFTTAPAICNDGKAHFPREGVFVSNGTNWFVTQRNFYEPQIITTDNTFVSGNCDVVIGIVNNTVYDPLQPELDSGGGGSDIDPYKEFGSSYQLLNFLPLDFFPDLNALVDTATALYEEELTGREHCSPHHTAIRQALVCWDELTKLIAWMSSNITSEQVRTIIVNHVNDTWGLKVRQSLWFHLSCLTFGQHTVQEFLVSFGVWIRTPAPYRPPNAPILSTLPEHTVIC

SEQ ID NO: 10987 - protein, 1301 aa, Artificial Sequence
  SARS-CoV-2/USA/UT-00033/2020__EPI_ISL_417976 spike protein (1-1147)(K986P_V987P_ H1048Q_H1064N_ H1083N_H1101N) WhcAg construct
MFVFLVLLPLVSSQCVNLTTRTQLPPAYTNSFTRGVYYPDKVFRSSVLHSTQDLFLPFFSNVTWFHAIHVSGTNGTKRFDNPVLPFNDGVYFASTEKSNIIRGWIFGTTLDSKTQSLLIVNNATNVVIKVCEFQFCNDPFLGVYYHKNNKSWMESEFRVYSSANNCTFEYVSQPFLMDLEGKQGNFKNLREFVFKNIDGYFKIYSKHTPINLVRDLPQGFSALEPLVDLPIGINITRFQTLLALHRSYLTPGDSSSGLTAGAAAYYVGYLQPRTFLLKYNENGTITDAVDCALDPLSETKCTLKSFTVEKGIYQTSNFRVQPTESIVRFPNITNLCPFGEVFNATRFASVYAWNRKRISNCVADYSVLYNSASFSTFKCYGVSPTKLNDLCFTNVYADSFVIRGDEVRQIAPGQTGKIADYNYKLPDDFTGCVIAWNSNNLDSKVGGNYNYLYRLFRKSNLKPFERDISTEIYQAGSTPCNGVEGFNCYFPLQSYGFQPTNGVGYQPYRVVVLSFELLHAPATVCGPKKSTNLVKNKCVNFNFNGLTGTGVLTESNKKFLPFQQFGRDIADTTDAVRDPQTLEILDITPCSFGGVSVITPGTNTSNQVAVLYQGVNCTEVPVAIHADQLTPTWRVYSTGSNVFQTRAGCLIGAEHVNNSYECDIPIGAGICASYQTQTNSPRRARSVASQSIIAYTMSLGAENSVAYSNNSIAIPTNFTISVTTEILPVSMTKTSVDCTMYICGDSTECSNLLLQYGSFCTQLNRALTGIAVEQDKNTQEVFAQVKQIYKTPPIKDFGGFNFSQILPDPSKPSKRSFIEDLLFNKVTLADAGFIKQYGDCLGDIAARDLICAQKFNGLTVLPPLLTDEMIAQYTSALLAGTITSGWTFGAGAALQIPFAMQMAYRFNGIGVTQNVLYENQKLIANQFNSAIGKIQDSLSSTASALGKLQDVVNQNAQALNTLVKQLSSNFGAISSVLNDILSRLDPPEAEVQIDRLITGRLQSLQTYVTQQLIRAAEIRASANLAATKMSECVLGQSKRVDFCGKGYQLMSFPQSAPHGVVFLNVTYVPAQEKNFTTAPAICNDGKAHFPREGVFVSNGTNWFVTQRNFYEPQIITTDNTFVSGNCDVVIGIVNNTVYDPLQPELDSGGGGSDIDPYKEFGSSYQLLNFLPLDFFPDLNALVDTATALYEEELTGREHCSPHHTAIRQALVCWDELTKLIAWMSSNITSEQVRTIIVNHVNDTWGLKVRQSLWFHLSCLTFGQHTVQEFLVSFGVWIRTPAPYRPPNAPILSTLPEHTVIC

SEQ ID NO: 10988 - protein, 1301 aa, Artificial Sequence
  SARS-CoV-2/USA/WI-13/2020__EPI_ISL_417516 spike protein (1-1147)(K986P_V987P_ H1048Q_H1064N_ H1083N_H1101N) WhcAg construct
MFVFLVLLPLVSSQCVNLTTRTQLPPAYTNSFTRGVYYPDKVFRSSVLHSTQDLFLPFFSNVTWFHAIHVSGTNGTKRFDNPVLPFNDGVYFASTEKSNIIRGWIFGTTLDSKTQSLLIVNNATNVVIKVCEFQFCNDPFLGVYYHKNNKSWMESEFRVYSSANNCTFEYVSQPFLMDLEGKQGNFKNLREFVFKNIDGYFKIYSKHTPINLVRDLPQGFSALEPLVDLPIGINITRFQTLLALHRSYLTPGDSSSGWTAGAAAYYVGYLQPRTFLLKYNENGTITDAVDCALDPLSETKCTLKSFTVEKGIYQTSNFRVLPTESIVRFPNITNLCPFGEVFNATRFASVYAWNRKRISNCVADYSVLYNSASFSTFKCYGVSPTKLNDLCFTNVYADSFVIRGDEVRQIAPGQTGKIADYNYKLPDDFTGCVIAWNSNNLDSKVGGNYNYLYRLFRKSNLKPFERDISTEIYQAGSTPCNGVEGFNCYFPLQSYGFQPTNGVGYQPYRVVVLSFELLHAPATVCGPKKSTNLVKNKCVNFNFNGLTGTGVLTESNKKFLPFQQFGRDIADTTDAVRDPQTLEILDITPCSFGGVSVITPGTNTSNQVAVLYQGVNCTEVPVAIHADQLTPTWRVYSTGSNVFQTRAGCLIGAEHVNNSYECDIPIGAGICASYQTQTNSPRRARSVASQSIIAYTMSLGAENSVAYSNNSIAIPTNFTISVTTEILPVSMTKTSVDCTMYICGDSTECSNLLLQYGSFCTQLNRALTGIAVEQDKNTQEVFAQVKQIYKTPPIKDFGGFNFSQILPDPSKPSKRSFIEDLLFNKVTLADAGFIKQYGDCLGDIAARDLICAQKFNGLTVLPPLLTDEMIAQYTSALLAGTITSGWTFGAGAALQIPFAMQMAYRFNGIGVTQNVLYENQKLIANQFNSAIGKIQDSLSSTASALGKLQDVVNQNAQALNTLVKQLSSNFGAISSVLNDILSRLDPPEAEVQIDRLITGRLQSLQTYVTQQLIRAAEIRASANLAATKMSECVLGQSKRVDFCGKGYQLMSFPQSAPHGVVFLNVTYVPAQEKNFTTAPAICNDGKAHFPREGVFVSNGTNWFVTQRNFYEPQIITTDNTFVSGNCDVVIGIVNNTVYDPLQPELDSGGGGSDIDPYKEFGSSYQLLNFLPLDFFPDLNALVDTATALYEEELTGREHCSPHHTAIRQALVCWDELTKLIAWMSSNITSEQVRTIIVNHVNDTWGLKVRQSLWFHLSCLTFGQHTVQEFLVSFGVWIRTPAPYRPPNAPILSTLPEHTVIC

SEQ ID NO: 10989 - protein, 1300 aa, Artificial Sequence
  SARS-CoV-2/India/1-27/2020__EPI_ISL_413522 spike protein (1-1146)(K985P_V986P_ H1047Q_H1063N_ H1082N_H1100N) WhcAg construct
MFVFLVLLPLVSSQCVNLTTRTQLPPAYTNSFTRGVYYPDKVFRSSVLHSTQDLFLPFFSNVTWFHAIHVSGTNGTKRFDNPVLPFNDGVYFASTEKSNIIRGWIFGTTLDSKTQSLLIVNNATNVVIKVCEFQFCNDPFLGVYHKNNKSWMESEFRVYSSANNCTFEYVSQPFLMDLEGKQGNFKNLREFVFKNIDGYFKIYSKHTPINLVRDLPQGFSALEPLVDLPIGINITRFQTLLALHRSYLTPGDSSSGWTAGAAAYYVGYLQPRTFLLKYNENGTITDAVDCALDPLSETKCTLKSFTVEKGIYQTSNFRVQPTESIVRFPNITNLCPFGEVFNATRFASVYAWNRKRISNCVADYSVLYNSASFSTFKCYGVSPTKLNDLCFTNVYADSFVIRGDEVIQIAPGQTGKIADYNYKLPDDFTGCVIAWNSNNLDSKVGGNYNYLYRLFRKSNLKPFERDISTEIYQAGSTPCNGVEGFNCYFPLQSYGFQPTNGVGYQPYRVVVLSFELLHAPATVCGPKKSTNLVKNKCVNFNFNGLTGTGVLTESNKKFLPFQQFGRDIADTTDAVRDPQTLEILDITPCSFGGVSVITPGTNTSNQVAVLYQDVNCTEVPVAIHADQLTPTWRVYSTGSNVFQTRAGCLIGAEHVNNSYECDIPIGAGICASYQTQTNSPRRARSVASQSIIAYTMSLGAENSVAYSNNSIAIPTNFTISVTTEILPVSMTKTSVDCTMYICGDSTECSNLLLQYGSFCTQLNRALTGIAVEQDKNTQEVFAQVKQIYKTPPIKDFGGFNFSQILPDPSKPSKRSFIEDLLFNKVTLADAGFIKQYGDCLGDIAARDLICAQKFNGLTVLPPLLTDEMIAQYTSALLAGTITSGWTFGAGAALQIPFAMQMAYRFNGIGVTQNVLYENQKLIANQFNSAIGKIQDSLSSTASALGKLQDVVNQNAQALNTLVKQLSSNFGAISSVLNDILSRLDPPEAEVQIDRLITGRLQSLQTYVTQQLIRAAEIRASANLAATKMSECVLGQSKRVDFCGKGYQLMSFPQSAPHGVVFLNVTYVPAQEKNFTTAPAICNDGKAHFPREGVFVSNGTNWFVTQRNFYEPQIITTDNTFVSGNCDVVIGIVNNTVYDPLQPELDSGGGGSDIDPYKEFGSSYQLLNFLPLDFFPDLNALVDTATALYEEELTGREHCSPHHTAIRQALVCWDELTKLIAWMSSNITSEQVRTIIVNHVNDTWGLKVRQSLWFHLSCLTFGQHTVQEFLVSFGVWIRTPAPYRPPNAPILSTLPEHTVIC

SEQ ID NO: 10990 - protein, 1295 aa, Artificial Sequence
  SARS-CoV-2/pangolin/Guangxi/P4L/2017__EPI_ISL_410538 spike protein (1-1141)(K980P_V981P_ H1042Q_H1058N_ H1077N_H1095N) WhcAg construct
MFVFLFVLPLVSSQCVNLTTRTGIPPGYTNSSTRGVYYPDKVFRSSILHLTQDLFLPFFSNVTWFNTINYQGGFKKFDNPVLPFNDGVYFASTEKSNIIRGWIFGTTLDARTQSLLIVNNATNVVIKVCEFQFCTDPFLGVYYHNNNKTWVENEFRVYSSANNCTFEYISQPFLMDLEGKQGNFKNLREFVFKNVDGYFKIYSKHTPIDLVRDLPRGFAALEPLVDLPIGINITRFQTLLALHRSYLTPGNLESGWTTGAAAYYVGYLQQRTFLLSYNQNGTITDAVDCSLDPLSETKCTLKSLTVEKGIYQTSNFRVQPTISIVRFPNITNLCPFGEVFNASKFASVYAWNRKRISNCVADYSVLYNSTSFSTFKCYGVSPTKLNDLCFTNVYADSFVVKGDEVRQIAPGQTGVIADYNYKLPDDFTGCVIAWNSVKQDALTGGNYGYLYRLFRKSKLKPFERDISTEIYQAGSTPCNGQVGLNCYYPLERYGFHPTTGVNYQPFRVVVLSFELLNGPATVCGPKLSTTLVKDKCVNFNFNGLTGTGVLTTSKKQFLPFQQFGRDISDTTDAVRDPQTLEILDITPCSFGGVSVITPGTNTSNQVAVLYQDVNCTEVPMAIHAEQLTPAWRVYSAGANVFQTRAGCLVGAEHVNNSYECDIPVGAGICASYHSMSSLRSVNQRSIIAYTMSLGAENSVAYSNNSIAIPTNFTISVTTEILPVSMTKTSVDCTMYICGDSIECSNLLLQYGSFCTQLNRALTGIAVEQDKNTQEVFAQVKQIYKTPPIKDFGGFNFSQILPDPSKPSKRSFIEDLLFNKVTLADAGFIKQYGDCLGDIAARDLICAQKFNGLTVLPPLLTDEMIAQYTSALLAGTITSGWTFGAGAALQIPFAMQMAYRFNGIGVTQNVLYENQKLIANQFNSAIGKIQDSLSSTASALGKLQDVVNQNAQALNTLVKQLSSNFGAISSVLNDILSRLDPPEAEVQIDRLITGRLQSLQTYVTQQLIRAAEIRASANLAATKMSECVLGQSKRVDFCGKGYQLMSFPQSAPHGVVFLNVTYVPAQEKNFTTAPAICNEGKAHFPREGVFVSNGTNWFITQRNFYEPQIITTDNTFVSGSCDVVIGIVNNTVYDPLQPELDSGGGGSDIDPYKEFGSSYQLLNFLPLDFFPDLNALVDTATALYEEELTGREHCSPHHTAIRQALVCWDELTKLIAWMSSNITSEQVRTIIVNHVNDTWGLKVRQSLWFHLSCLTFGQHTVQEFLVSFGVWIRTPAPYRPPNAPILSTLPEHTVIC

SEQ ID NO: 10991 - protein, 1295 aa, Artificial Sequence
  SARS-CoV-2/pangolin/Guangxi/P5L/2017__EPI_ISL_410540 spike protein (1-1141)(K980P_V981P_ H1042Q_H1058N_ H1077N_H1095N) WhcAg construct
MFVFLFVLPLVSSQCVNLTTRTGIPPGYTNSSTRGVYYPDKVFRSSILHLTQDLFLPFFSNVTWFNTINYQGGFKKFDNPVLPFNDGVYFASTEKSNIIRGWIFGTTLDARTQSLLIVNNATNVVIKVCEFQFCTDPFLGVYYHNNNKTWVENEFRVYSSANNCTFEYISQPFLMDLEGKQGNFKNLREFVFKNVDGYFKIYSKHTPIDLVRDLPRGFAALEPLVDLPIGINITRFQTLLALHRSYLTPGKLESGWTTGAAAYYVGYLQQRTFLLSYNQNGTITDAVDCSLDPLSETKCTLKSLTVEKGIYQTSNFRVQPTISIVRFPNITNLCPFGEVFNASKFASVYAWNRKRISNCVADYSVLYNSTSFSTFKCYGVSPTKLNDLCFTNVYADSFVVKGDEVRQIAPGQTGVIADYNYKLPDDFTGCVIAWNSVKQDALTGGNYGYLYRLFRKSKLKPFERDISTEIYQAGSTPCNGQVGLNCYYPLERYGFHPTTGVNYQPFRVVVLSFELLNGPATVCGPKLSTTLVKDKCVNFNFNGLTGTGVLTTSKKQFLPFQQFGRDISDTTDAVRDPQTLEILDITPCSFGGVSVITPGTNTSNQVAVLYQDVNCTEVPMAIHAEQLTPAWRVYSAGANVFQTRAGCLVGAEHVNNSYECDIPVGAGICASYHSMSSFRSVNQRSIIAYTMSLGAENSVAYSNNSIAIPTNFTISVTTEILPVSMTKTSVDCTMYICGDSIECSNLLLQYGSFCTQLNRALTGIAVEQDKNTQEVFAQVKQIYKTPPIKDFGGFNFSQILPDPSKPSKRSFIEDLLFNKVTLADAGFIKQYGDCLGDIAARDLICAQKFNGLTVLPPLLTDEMIAQYTSALLAGTITSGWTFGAGAALQIPFAMQMAYRFNGIGVTQNVLYENQKLIANQFNSAIGKIQDSLSSTASALGKLQDVVNQNAQALNTLVKQLSSNFGAISSVLNDILSRLDPPEAEVQIDRLITGRLQSLQTYVTQQLIRAAEIRASANLAATKMSECVLGQSKRVDFCGKGYQLMSFPQSAPHGVVFLNVTYVPAQEKNFTTAPAICNEGKAHFPREGVFVSNGTNWFITQRNFYEPQIITTDNTFVSGSCDVVIGIVNNTVYDPLQPELDSGGGGSDIDPYKEFGSSYQLLNFLPLDFFPDLNALVDTATALYEEELTGREHCSPHHTAIRQALVCWDELTKLIAWMSSNITSEQVRTIIVNHVNDTWGLKVRQSLWFHLSCLTFGQHTVQEFLVSFGVWIRTPAPYRPPNAPILSTLPEHTVIC

SEQ ID NO: 10992 - protein, 1295 aa, Artificial Sequence
  SARS-CoV-2/pangolin/Guangxi/P5E/2017__EPI_ISL_410541 spike protein (1-1141)(K980P_V981P_ H1042Q_H1058N_ H1077N_H1095N) WhcAg construct
MFVFLFVLPLVSSQCVNLTTRTGIPPGYTNSSTRGVYYPDKVFRSSILHLTQDLFLPFFSNVTWFNTITYQGGSKKFDNPVLPFNDGVYFASTEKSNIIRGWIFGTTLDARTQSLLIVNNATNVVIKVCEFQFCTDPFLGVYYHNNNKTWVENEFRVYSSANNCTFEYISQPFLMDLEGKQGNFKNLREFVFKNVDGYFKIYSKHTPIDLVRDLPRGFAALEPLVDLPIGINITRFQTLLALHRSYLTPGKLESGWTTGAAAYYVGYLQQRTFLLSYNQNGTITDAVDCSLDPLSETKCTLKSLTVEKGIYQTSNFRVQPTISIVRFPNITNLCPFGEVFNASKFASVYAWNRKRISNCVADYSVLYNSTSFSTFKCYGVSPTKLNDLCFTNVYADSFVVKGDEVRQIAPGQTGVIADYNYKLPDDFTGCVIAWNSVKQDALTGDNYGYLYRLFRKSKLKPFERDISTEIYQAGSTPCNGQVGLNCYYPLERYGFHPTTGVNYQPFRVVVLSFELLNGPATVCGPKLSTTLVKDKCVNFNFNGLTGTGVLTTSKKQFLPFQQFGRDISDTTDAVRDPQTLEILDITPCSFGGVSVITPGTNTSNQVAVLYQDVNCTEVPMAIHAEQLTPAWRVYSAGANVFQTRAGCLVGAEHVNNSYECDIPVGAGICASYHSMSSFRSVNQRSIIAYTMSLGAENSVAYSNNSIAIPTNFTISVTTEILPVSMTKTSVDCTMYICGDSIECSNLLLQYGSFCTQLNRALTGIAVEQDKNTQEVFAQVKQIYKTPPIKDFGGFNFSQILPDPSKPSKRSFIEDLLFNKVTLADAGFIKQYGDCLGDIAARDLICAQKFNGLTVLPPLLTDEMIAQYTSALLAGTITSGWTFGAGAALQIPFAMQMAYRFNGIGVTQNVLYENQKLIANQFNSAIGKIQDSLSSTASALGKLQDVVNQNAQALNTLVKQLSSNFGAISSVLNDILSRLDPPEAEVQIDRLITGRLQSLQTYVTQQLIRAAEIRASANLAATKMSECVLGQSKRVDFCGKGYQLMSFPQSAPHGVVFLNVTYVPAQEKNFTTAPAICNEGKAHFPREGVFVSNGTNWFITQRNFYEPQIITTDNTFVSGSCDVVIGIVNNTVYDPLQPELDSGGGGSDIDPYKEFGSSYQLLNFLPLDFFPDLNALVDTATALYEEELTGREHCSPHHTAIRQALVCWDELTKLIAWMSSNITSEQVRTIIVNHVNDTWGLKVRQSLWFHLSCLTFGQHTVQEFLVSFGVWIRTPAPYRPPNAPILSTLPEHTVIC

SEQ ID NO: 10993 - protein, 1293 aa, Artificial Sequence
  SARS-CoV-2/pangolin/Guangxi/P1E/2017__EPI_ISL_410539 spike protein (1-1139)(K978P_V979P_ H1040Q_H1056N_ H1075N_H1093N) WhcAg construct
MFVFLFVLPLVSSQCVNLTTRTGIQPGYTNSSTRGVYYPDKVFRSSILHLTQDLFLPFFSNVTWFNTINYQGGFKKFDNPVLPFNDGVYFASTEKSNIIRGWIFGTTLDARTQSLLIVNNATNVVIKVCEFQFCTDPFLGVYYHNNNKTWVENEFRVYSSANNCTFEYISQPFLMDLEGKQGNFKNLREFVFKNVDGYFKIYSKHTPIDLVRDLPRGFAALEPLVDLPIGINITRFQTLLALHRSYLTPGKLESGWTTGAAAYYVGYLQQRTFLLSYNQNGTITDAVDCSLDPLSETKCTLKSLTVEKGIYQTSNFRVQPTISIVRFPNITNLCPFGEVFNASKFASVYAWNRKRISNCVADYSVLYNSTSFSTFKCYGVSPTKLNDLCFTNVYADSFVVKGDEVRQIAPGQTGVIADYNYKLPDDFTGCVIAWNSVKQDALTGGNYLYRLFRKSKLKPFERDISTEIYQAGSTPCNGQVGLNCYYPLERYGFHPTTGVNYQPFRVVVLSFELLNGPATVCGPKLSTTLVKDKCVNFNFNGLTGTGVLTTSKKQFLPFQQFGRDISDTTDAVRDPQTLEILDITPCSFGGVSVITPGTNTSNQVAVLYQDVNCTEVPMAIHAEQLTPAWRVYSAGANVFQTRAGCLVGAEHVNNSYECDIPVGAGICASYHSMSSLRSVNQRSIIAYTMSLGAENSVAYSNNSIAIPTNFTISVTTEILPVSMTKTSVDCTMYICGDSIECSNLLLQYGSFCTQLNRALTGIAVEQDKNTQEVFAQVKQIYKTPPIKDFGGFNFSQILPDPSKPSKRSFIEDLLFNKVTLADAGFIKQYGDCLGDIAARDLICAQKFNGLTVLPPLLTDEMIAQYTSALLAGTITSGWTFGAGAALQIPFAMQMAYRFNGIGVTQNVLYENQKLIANQFNSAIGKIQDSLSSTASALGKLQDVVNQNAQALNTLVKQLSSNFGAISSVLNDILSRLDPPEAEVQIDRLITGRLQSLQTYVTQQLIRAAEIRASANLAATKMSECVLGQSKRVDFCGKGYQLMSFPQSAPHGVVFLNVTYVPAQEKNFTTAPAICNEGKAHFPREGVFVSNGTNWFITQRNFYEPQIITTDNTFVSGSCDVVIGIVNNTVYDPLQPELDSGGGGSDIDPYKEFGSSYQLLNFLPLDFFPDLNALVDTATALYEEELTGREHCSPHHTAIRQALVCWDELTKLIAWMSSNITSEQVRTIIVNHVNDTWGLKVRQSLWFHLSCLTFGQHTVQEFLVSFGVWIRTPAPYRPPNAPILSTLPEHTVIC

SEQ ID NO: 10994 - protein, 1301 aa, Artificial Sequence
  SARS-CoV-2/Wuhan/WIV05/2019__EPI_ISL_402128 spike protein (1-1147)(I712C_T1077C) WhcAg construct
MFVFLVLLPLVSSQCVNLTTRTQLPPAYTNSFTRGVYYPDKVFRSSVLHSTQDLFLPFFSNVTWFHAIHVSGTNGTKRFDNPVLPFNDGVYFASTEKSNIIRGWIFGTTLDSKTQSLLIVNNATNVVIKVCEFQFCNDPFLGVYYHKNNKSWMESEFRVYSSANNCTFEYVSQPFLMDLEGKQGNFKNLREFVFKNIDGYFKIYSKHTPINLVRDLPQGFSALEPLVDLPIGINITRFQTLLALHRSYLTPGDSSSGWTAGAAAYYVGYLQPRTFLLKYNENGTITDAVDCALDPLSETKCTLKSFTVEKGIYQTSNFRVQPTESIVRFPNITNLCPFGEVFNATRFASVYAWNRKRISNCVADYSVLYNSASFSTFKCYGVSPTKLNDLCFTNVYADSFVIRGDEVRQIAPGQTGKIADYNYKLPDDFTGCVIAWNSNNLDSKVGGNYNYLYRLFRKSNLKPFERDISTEIYQAGSTPCNGVEGFNCYFPLQSYGFQPTNGVGYQPYRVVVLSFELLHAPATVCGPKKSTNLVKNKCVNFNFNGLTGTGVLTESNKKFLPFQQFGRDIADTTDAVRDPQTLEILDITPCSFGGVSVITPGTNTSNQVAVLYQDVNCTEVPVAIHADQLTPTWRVYSTGSNVFQTRAGCLIGAEHVNNSYECDIPIGAGICASYQTQTNSPRRARSVASQSIIAYTMSLGAENSVAYSNNSCAIPTNFTISVTTEILPVSMTKTSVDCTMYICGDSTECSNLLLQYGSFCTQLNRALTGIAVEQDKNTQEVFAQVKQIYKTPPIKDFGGFNFSQILPDPSKPSKRSFIEDLLFNKVTLADAGFIKQYGDCLGDIAARDLICAQKFNGLTVLPPLLTDEMIAQYTSALLAGTITSGWTFGAGAALQIPFAMQMAYRFNGIGVTQNVLYENQKLIANQFNSAIGKIQDSLSSTASALGKLQDVVNQNAQALNTLVKQLSSNFGAISSVLNDILSRLDKVEAEVQIDRLITGRLQSLQTYVTQQLIRAAEIRASANLAATKMSECVLGQSKRVDFCGKGYHLMSFPQSAPHGVVFLHVTYVPAQEKNFTCAPAICHDGKAHFPREGVFVSNGTHWFVTQRNFYEPQIITTDNTFVSGNCDVVIGIVNNTVYDPLQPELDSGGGGSDIDPYKEFGSSYQLLNFLPLDFFPDLNALVDTATALYEEELTGREHCSPHHTAIRQALVCWDELTKLIAWMSSNITSEQVRTIIVNHVNDTWGLKVRQSLWFHLSCLTFGQHTVQEFLVSFGVWIRTPAPYRPPNAPILSTLPEHTVIC

SEQ ID NO: 10995 - protein, 1297 aa, Artificial Sequence
  SARS-CoV-2/bat/Yunnan/RaTG13/2013__EPI_ISL_402131 spike protein (1-1143)(I708C_T1073C) WhcAg construct
MFVFLVLLPLVSSQCVNLTTRTQLPPAYTNSSTRGVYYPDKVFRSSVLHLTQDLFLPFFSNVTWFHAIHVSGTNGIKRFDNPVLPFNDGVYFASTEKSNIIRGWIFGTTLDSKTQSLLIVNNATNVVIKVCEFQFCNDPFLGVYYHKNNKSWMESEFRVYSSANNCTFEYVSQPFLMDLEGKQGNFKNLREFVFKNIDGYFKIYSKHTPINLVRDLPPGFSALEPLVDLPIGINITRFQTLLALHRSYLTPGDSSSGWTAGAAAYYVGYLQPRTFLLKYNENGTITDAVDCALDPLSETKCTLKSFTVEKGIYQTSNFRVQPTDSIVRFPNITNLCPFGEVFNATTFASVYAWNRKRISNCVADYSVLYNSTSFSTFKCYGVSPTKLNDLCFTNVYADSFVITGDEVRQIAPGQTGKIADYNYKLPDDFTGCVIAWNSKHIDAKEGGNFNYLYRLFRKANLKPFERDISTEIYQAGSKPCNGQTGLNCYYPLYRYGFYPTDGVGHQPYRVVVLSFELLNAPATVCGPKKSTNLVKNKCVNFNFNGLTGTGVLTESNKKFLPFQQFGRDIADTTDAVRDPQTLEILDITPCSFGGVSVITPGTNASNQVAVLYQDVNCTEVPVAIHADQLTPTWRVYSTGSNVFQTRAGCLIGAEHVNNSYECDIPIGAGICASYQTQTNSRSVASQSIIAYTMSLGAENSVAYSNNSCAIPTNFTISVTTEILPVSMTKTSVDCTMYICGDSTECSNLLLQYGSFCTQLNRALTGIAVEQDKNTQEVFAQVKQIYKTPPIKDFGGFNFSQILPDPSKPSKRSFIEDLLFNKVTLADAGFIKQYGDCLGDIAARDLICAQKFNGLTVLPPLLTDEMIAQYTSALLAGTITSGWTFGAGAALQIPFAMQMAYRFNGIGVTQNVLYENQKLIANQFNSAIGKIQDSLSSTASALGKLQDVVNQNAQALNTLVKQLSSNFGAISSVLNDILSRLDKVEAEVQIDRLITGRLQSLQTYVTQQLIRAAEIRASANLAATKMSECVLGQSKRVDFCGKGYHLMSFPQSAPHGVVFLHVTYVPAQEKNFTCAPAICHDGKAHFPREGVFVSNGTHWFVTQRNFYEPQIITTDNTFVSGSCDVVIGIVNNTVYDPLQPELDSGGGGSDIDPYKEFGSSYQLLNFLPLDFFPDLNALVDTATALYEEELTGREHCSPHHTAIRQALVCWDELTKLIAWMSSNITSEQVRTIIVNHVNDTWGLKVRQSLWFHLSCLTFGQHTVQEFLVSFGVWIRTPAPYRPPNAPILSTLPEHTVIC

SEQ ID NO: 10996 - protein, 1301 aa, Artificial Sequence
  SARS-CoV-2/Wuhan/HBCDC-HB-01/2019__EPI_ISL_402132 spike protein (1-1147)(I712C_T1077C) WhcAg construct
MFVFLVLLPLVSSQCVNLTTRTQLPPAYTNSITRGVYYPDKVFRSSVLHSTQDLFLPFFSNVTWFHAIHVSGTNGTKRFDNPVLPFNDGVYFASTEKSNIIRGWIFGTTLDSKTQSLLIVNNATNVVIKVCEFQFCNDPFLGVYYHKNNKSWMESEFRVYSSANNCTFEYVSQPFLMDLEGKQGNFKNLREFVFKNIDGYFKIYSKHTPINLVRDLPQGFSALEPLVDLPIGINITRFQTLLALHRSYLTPGDSSSGWTAGAAAYYVGYLQPRTFLLKYNENGTITDAVDCALDPLSETKCTLKSFTVEKGIYQTSNFRVQPTESIVRFPNITNLCPFGEVFNATRFASVYAWNRKRISNCVADYSVLYNSASFSTFKCYGVSPTKLNDLCFTNVYADSFVIRGDEVRQIAPGQTGKIADYNYKLPDDFTGCVIAWNSNNLDSKVGGNYNYLYRLFRKSNLKPFERDISTEIYQAGSTPCNGVEGFNCYFPLQSYGFQPTNGVGYQPYRVVVLSFELLHAPATVCGPKKSTNLVKNKCVNFNFNGLTGTGVLTESNKKFLPFQQFGRDIADTTDAVRDPQTLEILDITPCSFGGVSVITPGTNTSNQVAVLYQDVNCTEVPVAIHADQLTPTWRVYSTGSNVFQTRAGCLIGAEHVNNSYECDIPIGAGICASYQTQTNSPRRARSVASQSIIAYTMSLGAENSVAYSNNSCAIPTNFTISVTTEILPVSMTKTSVDCTMYICGDSTECSNLLLQYGSFCTQLNRALTGIAVEQDKNTQEVFAQVKQIYKTPPIKDFGGFNFSQILPDPSKPSKRSFIEDLLFNKVTLADAGFIKQYGDCLGDIAARDLICAQKFNGLTVLPPLLTDEMIAQYTSALLAGTITSGWTFGAGAALQIPFAMQMAYRFNGIGVTQNVLYENQKLIANQFNSAIGKIQDSLSSTASALGKLQDVVNQNAQALNTLVKQLSSNFGAISSVLNDILSRLDKVEAEVQIDRLITGRLQSLQTYVTQQLIRAAEIRASANLAATKMSECVLGQSKRVDFCGKGYHLMSFPQSAPHGVVFLHVTYVPAQEKNFTCAPAICHDGKAHFPREGVFVSNGTHWFVTQRNFYEPQIITTDNTFVSGNCDVVIGIVNNTVYDPLQPELDSGGGGSDIDPYKEFGSSYQLLNFLPLDFFPDLNALVDTATALYEEELTGREHCSPHHTAIRQALVCWDELTKLIAWMSSNITSEQVRTIIVNHVNDTWGLKVRQSLWFHLSCLTFGQHTVQEFLVSFGVWIRTPAPYRPPNAPILSTLPEHTVIC

SEQ ID NO: 10997 - protein, 1301 aa, Artificial Sequence
  SARS-CoV-2/Guangdong/20SF028/2020__EPI_ISL_403936 spike protein (1-1147)(I712C_T1077C) WhcAg construct
MFVFLVLLPLVSSQCVNLTTRTQLPPAYTNSFTRGVYYPDKVFRSSVLYSTQDLFLPFFSNVTWFHAIHVSGTNGTKRFDNPVLPFNDGVYFASTEKSNIIRGWIFGTTLDSKTQSLLIVNNATNVVIKVCEFQFCNDPFLGVYYHKNNKSWMESEFRVYSSANNCTFEYVSQPFLMDLEGKQGNFKNLREFVFKNIDGYFKIYSKHTPINLVRDLPQGFSALEPLVDLPIGINITRFQTLLALHRSYLTPGDSSSGWTAGAAAYYVGYLQPRTFLLKYNENGTITDAVDCALDPLSETKCTLKSFTVEKGIYQTSNFRVQPTESIVRFPNITNLCPFGEVFNATRFASVYAWNRKRISNCVADYSVLYNSASFSTFKCYGVSPTKLNDLCFTNVYADSFVIRGDEVRQIAPGQTGKIADYNYKLPDDFTGCVIAWNSNNLDSKVGGNYNYLYRLFRKSNLKPFERDISTEIYQAGSTPCNGVEGFNCYFPLQSYGFQPTNGVGYQPYRVVVLSFELLHAPATVCGPKKSTNLVKNKCVNFNFNGLTGTGVLTESNKKFLPFQQFGRDIADTTDAVRDPQTLEILDITPCSFGGVSVITPGTNTSNQVAVLYQDVNCTEVPVAIHADQLTPTWRVYSTGSNVFQTRAGCLIGAEHVNNSYECDIPIGAGICASYQTQTNSPRRARSVASQSIIAYTMSLGAENSVAYSNNSCAIPTNFTISVTTEILPVSMTKTSVDCTMYICGDSTECSNLLLQYGSFCTQLNRALTGIAVEQDKNTQEVFAQVKQIYKTPPIKDFGGFNFSQILPDPSKPSKRSFIEDLLFNKVTLADAGFIKQYGDCLGDIAARDLICAQKFNGLTVLPPLLTDEMIAQYTSALLAGTITSGWTFGAGAALQIPFAMQMAYRFNGIGVTQNVLYENQKLIANQFNSAIGKIQDSLSSTASALGKLQDVVNQNAQALNTLVKQLSSNFGAISSVLNDILSRLDKVEAEVQIDRLITGRLQSLQTYVTQQLIRAAEIRASANLAATKMSECVLGQSKRVDFCGKGYHLMSFPQSAPHGVVFLHVTYVPAQEKNFTCAPAICHDGKAHFPREGVFVSNGTHWFVTQRNFYEPQIITTDNTFVSGNCDVVIGIVNNTVYDPLQPELDSGGGGSDIDPYKEFGSSYQLLNFLPLDFFPDLNALVDTATALYEEELTGREHCSPHHTAIRQALVCWDELTKLIAWMSSNITSEQVRTIIVNHVNDTWGLKVRQSLWFHLSCLTFGQHTVQEFLVSFGVWIRTPAPYRPPNAPILSTLPEHTVIC

SEQ ID NO: 10998 - protein, 1301 aa, Artificial Sequence
  SARS-CoV-2/Shenzhen/SZTH-001/2020__EPI_ISL_406592 spike protein (1-1147)(I712C_T1077C) WhcAg construct
MFVFLVLLPLVSSQCVNLTTRTQLPPAYTNSFTRGVYYPDKVFRSSVLHSTQDLFLPFFSNVTWFHAIHVSGTNGTKRFDNPVLPFNDGVYFASTEKSNIIRGWIFGTTLDSKTQSLLIVNNATNVVIKVCEFQFCNDPFLGVYYHKNNKSWMESEFRVYSSANNCTFEYVSQPFLMDLEGKQGNFKNLREFVFKNIDGYFKIYSKHTPINLVRDLPQGFSALEPLVDLPIGINITRFQTLLALHRSYLTPGDSSSGWTAGAAAYYVGYLQPRTFLLKYNENGTITDAVDCALDPLSETKCTLKSFTVEKGIYQTSNFRVQPTESIVRFPNITNLCPFGEVFNATRFASVYAWNRKRISNCVADYSVLYNSASFSTFKCYGVSPTKLNDLCFTNVYADSFVIRGDEVRQIAPGQTGKIADYNYKLPDDFTGCVIAWNSNNLDSKVGGNYNYLYRLFRKSNLKPFERDISTEIYQAGSTPCNGVEGFNCYFPLQSYGFQPTNGVGYQPYRVVVLSFELLHAPATVCGPKKSTNLVKNKCVNFNFNGLTGTGVLTESNKKFLPFQQFGRDIADTTDAVRDPQTLEILDITPCSFGGVSVITPGTNTSNQVAVLYQDVNCTEVPVAIHADQLTPTWRVYSTGSNVFQTRAGCLIGAEHVNNSYECDIPIGAGICASYQTQTNSPRRARSVASQSIIAYTMSLGAENSVAYSNNSCAIPTNFTISVTTEILPVSMTKTSVDCTMYICGDSTECSNLLLQYGSFCTQLNRALTGIAVEQDKNTQEVFAQVKQIYKTPPIKDFGGFNFSQILPDPSKPSKRSFIEDLLFNKVTLADAGFIKQYGDCLGDIAARDLICAQKFNGLTVLPPLLTDEMIAQYTSALLAGTITSGWTFGAGAALQIPFAMQMAYRFNGIGVTQNVLYENQKLIANQFNSAIGKIQDSLSSTASALGKLQDVVNQNAQALNTLVKQLSSNFGAISSVLNDILSRLDKVEAEVQIDRLITGRLQSLQTYVTQQLIRAAEIRASANLAATKMSECVLGQSKRVDFCGKGYHLMSFPQSAPHGVVFLHVTYVPAQEKNFTCAPAICHDGKAHFPREGVFVSNGTHWFVTQRNFYEPQIITTDNTFVSGNCDVLIGIVNNTVYDPLQPELDSGGGGSDIDPYKEFGSSYQLLNFLPLDFFPDLNALVDTATALYEEELTGREHCSPHHTAIRQALVCWDELTKLIAWMSSNITSEQVRTIIVNHVNDTWGLKVRQSLWFHLSCLTFGQHTVQEFLVSFGVWIRTPAPYRPPNAPILSTLPEHTVIC

SEQ ID NO: 10999 - protein, 1301 aa, Artificial Sequence
  SARS-CoV-2/Shenzhen/SZTH-004/2020__EPI_ISL_406595 spike protein (1-1147)(I712C_T1077C) WhcAg construct
MFVFLVLLPLVSSQCVNLTTRTQLPPAYTNSFTRGVYYPDKVFRSSVLHSTQDLFLPFFSNVTWFHAIHVSGTNGTKRFDNPVLPFNDGVYFASTEKSNIIRGWIFGTTLDSKTQSLLIVNNATNVVIKVCEFQFCNDPFLGVYYHKNNKSWMESEFRVYSSANNCTFEYVSQPFLMDLEGKQGNFKNLREFVFKNIDGYFKIYSKHTPINLVRDLPQGFSALEPLVDLPIGINITRFQTLLALHRSYLTPGDSSSGWTAGAAAYYVGYLQPRTFLLKYNENGTITDAVDCALDPLSETKCTLKSFTVEKGIYQTSNFRVQPTESIVRFPNITNLCPFGEVFNATRFASVYAWDRKRISNCVAYYSVLYNSASFSTFKCYGVSPTKLNDLCFTNVYADSFVIRGDEVRQIAPGQTGKIADYNYKLPDDFTGCVIAWNSNNLDSKVGGNYNYLYRLFRKSNLKPFERDISTEIYQAGSTPCNGVEGFNCYFPLQSYGFQPTNGVGYQPYRVVVLSFELLHAPATVCGPKKSTNLVKNKCVNFNFNGLTGTGVLTESNKKFLPFQQFGRDIADTTDAVRDPQTLEILDITPCSFGGVSVITPGTNTSNQVAVLYQDVNCTEVPVAIHADQLTPTWRVYSTGSNVFQTRAGCLIGAEHVNNSYECDIPIGAGICASYQTQTNSPRRARSVASQSIIAYTMSLGAENSVAYSNNSCAIPTNFTISVTTEILPVSMTKTSVDCTMYICGDSTECSNLLLQYGSFCTQLNRALTGIAVEQDKNTQEVFAQVKQIYKTPPIKDFGGFNFSQILPDPSKPSKRSFIEDLLFNKVTLADAGFIKQYGDCLGDIAARDLICAQKFNGLTVLPPLLTDEMIAQYTSALLAGTITSGWTFGAGAALQIPFAMQMAYRFNGIGVTQNVLYENQKLIANQFNSAIGKIQDSLSSTASALGKLQDVVNQNAQALNTLVKQLSSNFGAISSVLNDILSRLDKVEAEVQIDRLITGRLQSLQTYVTQQLIRAAEIRASANLAATKMSECVLGQSKRVDFCGKGYHLMSFPQSAPHGVVFLHVTYVPAQEKNFTCAPAICHDGKAHFPREGVFVSNGTHWFVTQRNFYEPQIITTDNTFVSGNCDVVIGIVNNTVYDPLQPELDSGGGGSDIDPYKEFGSSYQLLNFLPLDFFPDLNALVDTATALYEEELTGREHCSPHHTAIRQALVCWDELTKLIAWMSSNITSEQVRTIIVNHVNDTWGLKVRQSLWFHLSCLTFGQHTVQEFLVSFGVWIRTPAPYRPPNAPILSTLPEHTVIC

SEQ ID NO: 11000 - protein, 1301 aa, Artificial Sequence
  SARS-CoV-2/France/IDF0372/2020__EPI_ISL_406596 spike protein (1-1147)(I712C_T1077C) WhcAg construct
MFVFLVLLPLVSSQCVNLTTRTQLPPAYTNSFTRGVYYPDKVFRSSVLHSTQDLFLPFFSNVTWFHAIHVSGTNGTKRFDNPVLPFNDGVYFASTEKSNIIRGWIFGTTLDSKTQSLLIVNNATNVVIKVCEFQFCNDPFLGVYYHKNNKSWMESEFRVYSSANNCTFEYVSQPFLMDLEGKQGNFKNLREFVFKNIDGYFKIYSKHTPINLVRDLPQGFSALEPLVDLPIGINITRFQTLLALHRSYLTPGDSSSGWTAGAAAYYVGYLQPRTFLLKYNENGTITDAVDCALDPLSETKCTLKSFTVEKGIYQTSNFRVQPTESIVRFPNITNLCPFGEVFNATRFASVYAWNRKRISNCVADYSFLYNSASFSTFKCYGVSPTKLNDLCFTNVYADSFVIRGDEVRQIAPGQTGKIADYNYKLPDDFTGCVIAWNSNNLDSKVGGNYNYLYRLFRKSNLKPFERDISTEIYQAGSTPCNGVEGFNCYFPLQSYGFQPTNGVGYQPYRVVVLSFELLHAPATVCGPKKSTNLVKNKCVNFNFNGLTGTGVLTESNKKFLPFQQFGRDIADTTDAVRDPQTLEILDITPCSFGGVSVITPGTNTSNQVAVLYQDVNCTEVPVAIHADQLTPTWRVYSTGSNVFQTRAGCLIGAEHVNNSYECDIPIGAGICASYQTQTNSPRRARSVASQSIIAYTMSLGAENSVAYSNNSCAIPTNFTISVTTEILPVSMTKTSVDCTMYICGDSTECSNLLLQYGSFCTQLNRALTGIAVEQDKNTQEVFAQVKQIYKTPPIKDFGGFNFSQILPDPSKPSKRSFIEDLLFNKVTLADAGFIKQYGDCLGDIAARDLICAQKFNGLTVLPPLLTDEMIAQYTSALLAGTITSGWTFGAGAALQIPFAMQMAYRFNGIGVTQNVLYENQKLIANQFNSAIGKIQDSLSSTASALGKLQDVVNQNAQALNTLVKQLSSNFGAISSVLNDILSRLDKVEAEVQIDRLITGRLQSLQTYVTQQLIRAAEIRASANLAATKMSECVLGQSKRVDFCGKGYHLMSFPQSAPHGVVFLHVTYVPAQEKNFTCAPAICHDGKAHFPREGVFVSNGTHWFVTQRNFYEPQIITTDNTFVSGNCDVVIGIVNNTVYDPLQPELDSGGGGSDIDPYKEFGSSYQLLNFLPLDFFPDLNALVDTATALYEEELTGREHCSPHHTAIRQALVCWDELTKLIAWMSSNITSEQVRTIIVNHVNDTWGLKVRQSLWFHLSCLTFGQHTVQEFLVSFGVWIRTPAPYRPPNAPILSTLPEHTVIC

SEQ ID NO: 11001 - protein, 1301 aa, Artificial Sequence
  SARS-CoV-2/Australia/VIC01/2020__EPI_ISL_406844 spike protein (1-1147)(I712C_T1077C) WhcAg construct
MFVFLVLLPLVSSQCVNLTTRTQLPPAYTNSFTRGVYYPDKVFRSSVLHSTQDLFLPFFSNVTWFHAIHVSGTNGTKRFDNPVLPFNDGVYFASTEKSNIIRGWIFGTTLDSKTQSLLIVNNATNVVIKVCEFQFCNDPFLGVYYHKNNKSWMESEFRVYSSANNCTFEYVSQPFLMDLEGKQGNFKNLREFVFKNIDGYFKIYSKHTPINLVRDLPQGFSALEPLVDLPIGINITRFQTLLALHRRYLTPGDSSSGWTAGAAAYYVGYLQPRTFLLKYNENGTITDAVDCALDPLSETKCTLKSFTVEKGIYQTSNFRVQPTESIVRFPNITNLCPFGEVFNATRFASVYAWNRKRISNCVADYSVLYNSASFSTFKCYGVSPTKLNDLCFTNVYADSFVIRGDEVRQIAPGQTGKIADYNYKLPDDFTGCVIAWNSNNLDSKVGGNYNYLYRLFRKSNLKPFERDISTEIYQAGSTPCNGVEGFNCYFPLQSYGFQPTNGVGYQPYRVVVLSFELLHAPATVCGPKKSTNLVKNKCVNFNFNGLTGTGVLTESNKKFLPFQQFGRDIADTTDAVRDPQTLEILDITPCSFGGVSVITPGTNTSNQVAVLYQDVNCTEVPVAIHADQLTPTWRVYSTGSNVFQTRAGCLIGAEHVNNSYECDIPIGAGICASYQTQTNSPRRARSVASQSIIAYTMSLGAENSVAYSNNSCAIPTNFTISVTTEILPVSMTKTSVDCTMYICGDSTECSNLLLQYGSFCTQLNRALTGIAVEQDKNTQEVFAQVKQIYKTPPIKDFGGFNFSQILPDPSKPSKRSFIEDLLFNKVTLADAGFIKQYGDCLGDIAARDLICAQKFNGLTVLPPLLTDEMIAQYTSALLAGTITSGWTFGAGAALQIPFAMQMAYRFNGIGVTQNVLYENQKLIANQFNSAIGKIQDSLSSTASALGKLQDVVNQNAQALNTLVKQLSSNFGAISSVLNDILSRLDKVEAEVQIDRLITGRLQSLQTYVTQQLIRAAEIRASANLAATKMSECVLGQSKRVDFCGKGYHLMSFPQSAPHGVVFLHVTYVPAQEKNFTCAPAICHDGKAHFPREGVFVSNGTHWFVTQRNFYEPQIITTDNTFVSGNCDVVIGIVNNTVYDPLQPELDSGGGGSDIDPYKEFGSSYQLLNFLPLDFFPDLNALVDTATALYEEELTGREHCSPHHTAIRQALVCWDELTKLIAWMSSNITSEQVRTIIVNHVNDTWGLKVRQSLWFHLSCLTFGQHTVQEFLVSFGVWIRTPAPYRPPNAPILSTLPEHTVIC

SEQ ID NO: 11002 - protein, 1301 aa, Artificial Sequence
  SARS-CoV-2/Germany/BavPat1/2020__EPI_ISL_406862 spike protein (1-1147)(I712C_T1077C) WhcAg construct
MFVFLVLLPLVSSQCVNLTTRTQLPPAYTNSFTRGVYYPDKVFRSSVLHSTQDLFLPFFSNVTWFHAIHVSGTNGTKRFDNPVLPFNDGVYFASTEKSNIIRGWIFGTTLDSKTQSLLIVNNATNVVIKVCEFQFCNDPFLGVYYHKNNKSWMESEFRVYSSANNCTFEYVSQPFLMDLEGKQGNFKNLREFVFKNIDGYFKIYSKHTPINLVRDLPQGFSALEPLVDLPIGINITRFQTLLALHRSYLTPGDSSSGWTAGAAAYYVGYLQPRTFLLKYNENGTITDAVDCALDPLSETKCTLKSFTVEKGIYQTSNFRVQPTESIVRFPNITNLCPFGEVFNATRFASVYAWNRKRISNCVADYSVLYNSASFSTFKCYGVSPTKLNDLCFTNVYADSFVIRGDEVRQIAPGQTGKIADYNYKLPDDFTGCVIAWNSNNLDSKVGGNYNYLYRLFRKSNLKPFERDISTEIYQAGSTPCNGVEGFNCYFPLQSYGFQPTNGVGYQPYRVVVLSFELLHAPATVCGPKKSTNLVKNKCVNFNFNGLTGTGVLTESNKKFLPFQQFGRDIADTTDAVRDPQTLEILDITPCSFGGVSVITPGTNTSNQVAVLYQGVNCTEVPVAIHADQLTPTWRVYSTGSNVFQTRAGCLIGAEHVNNSYECDIPIGAGICASYQTQTNSPRRARSVASQSIIAYTMSLGAENSVAYSNNSCAIPTNFTISVTTEILPVSMTKTSVDCTMYICGDSTECSNLLLQYGSFCTQLNRALTGIAVEQDKNTQEVFAQVKQIYKTPPIKDFGGFNFSQILPDPSKPSKRSFIEDLLFNKVTLADAGFIKQYGDCLGDIAARDLICAQKFNGLTVLPPLLTDEMIAQYTSALLAGTITSGWTFGAGAALQIPFAMQMAYRFNGIGVTQNVLYENQKLIANQFNSAIGKIQDSLSSTASALGKLQDVVNQNAQALNTLVKQLSSNFGAISSVLNDILSRLDKVEAEVQIDRLITGRLQSLQTYVTQQLIRAAEIRASANLAATKMSECVLGQSKRVDFCGKGYHLMSFPQSAPHGVVFLHVTYVPAQEKNFTCAPAICHDGKAHFPREGVFVSNGTHWFVTQRNFYEPQIITTDNTFVSGNCDVVIGIVNNTVYDPLQPELDSGGGGSDIDPYKEFGSSYQLLNFLPLDFFPDLNALVDTATALYEEELTGREHCSPHHTAIRQALVCWDELTKLIAWMSSNITSEQVRTIIVNHVNDTWGLKVRQSLWFHLSCLTFGQHTVQEFLVSFGVWIRTPAPYRPPNAPILSTLPEHTVIC

SEQ ID NO: 11003 - protein, 1301 aa, Artificial Sequence
  SARS-CoV-2/Wuhan/HBCDC-HB-02/2020__EPI_ISL_412978 spike protein (1-1147)(I712C_T1077C) WhcAg construct
MFVFLVLLPLVSSQCVNLTTRTQLPPAYTNSFTRGVYYPDKVFRSSVLHSTQDLFLPFFSNVTWFHAIHVSGTNGTKRFDNPVLPFNDGVYFASTEKSNIIRGWIFGTTLDSKTQSLLIVNNATNVVIKVCEFQFCNDPFLGVYYHKNNKSWMESEFRVYSSANNCTFEYVSQPFLMDLEGKQGNFKNLREFVFKNIDGYFKIYSKHTPINLVRDLPQGFSALEPLVDLPIGINITRFQTLLALHRSYLTPGDSSSGWTAGAAAYYVGYLQPRTFLLKYNENGTITDAVDCALDPLSETKCTLKSFTVEKGIYQTSNFRVQPTESIVRFPNITNLCPFGEVFNATRFASVYAWNRKRISNCVADYSVLYNSASFSTFKCYGVSPTKLNDLCFTNVYADSFVIRGDEVRQIAPGQTGKIADYNYKLPDDFTGCVIAWNSNNLDSKVGGNYNYLYRLFRKSNLKPFERDISTEIYQAGSTPCNGVEGFNCYFPLQSYGFQPTNGVGYQPYRVVVLSFELLHAPATVCGPKKSTNLVKNKCVNFNFNGLTGTGVLTESNKKFLPFQQFGRDIADTTDAVRDPQTLEILDITPCSFGGVSVITPGTNTSNQVAVLYQDVNCTEVPVAIHADQLTPTWRVYSTGSNVFQTRAGCLIGAEHVNNSYECDIPIGAGICASYQTQTNSPRRARSVASQSIIAYTMSLGAENSVAYSNNSCAIPTNFTISVTTEILPVSMTKTSVDCTMYICGDSTECSNFLLQYGSFCTQLNRALTGIAVEQDKNTQEVFAQVKQIYKTPPIKDFGGFNFSQILPDPSKPSKRSFIEDLLFNKVTLADAGFIKQYGDCLGDIAARDLICAQKFNGLTVLPPLLTDEMIAQYTSALLAGTITSGWTFGAGAALQIPFAMQMAYRFNGIGVTQNVLYENQKLIANQFNSAIGKIQDSLSSTASALGKLQDVVNQNAQALNTLVKQLSSNFGAISSVLNDILSRLDKVEAEVQIDRLITGRLQSLQTYVTQQLIRAAEIRASANLAATKMSECVLGQSKRVDFCGKGYHLMSFPQSAPHGVVFLHVTYVPAQEKNFTCAPAICHDGKAHFPREGVFVSNGTHWFVTQRNFYEPQIITTDNTFVSGNCDVVIGIVNNTVYDPLQPELDSGGGGSDIDPYKEFGSSYQLLNFLPLDFFPDLNALVDTATALYEEELTGREHCSPHHTAIRQALVCWDELTKLIAWMSSNITSEQVRTIIVNHVNDTWGLKVRQSLWFHLSCLTFGQHTVQEFLVSFGVWIRTPAPYRPPNAPILSTLPEHTVIC

SEQ ID NO: 11004 - protein, 1301 aa, Artificial Sequence
  SARS-CoV-2/Australia/QLD02/2020__EPI_ISL_407896 spike protein (1-1147)(I712C_T1077C) WhcAg construct
MFVFLVLLPLVSSQCVNLTTRTQLPPAYTNSFTRGVYYPDKVFRSSVLHSTQDLFLPFFSNVTWFHAIHVSGTNGTKRFDNPVLPFNDGVYFASTEKSNIIRGWIFGTTLDSKTQSLLIVNNATNVVIKVCEFQFCNDPFLGVYYHKNNKSWMESEFRVYSSANNCTFEYVSQPFLMDLEGKQGNFKNLREFVFKNIDGYFKIYSKHTPINLVRDLPQGFSALEPLVDLPIGINITRFQTLLALHRSYLTPGDSSSGWTAGAAAYYVGYLQPRTFLLKYNENGTITDAVDCALDPLSETKCTLKSFTVEKGIYQTSNFRVQPTESIVRFPNITNLCPFGEVFNATRFASVYAWNRKRISNCVADYSVLYNSASFSTFKCYGVSPTKLNDLCFTNVYADSFVIRGDEVRQIAPGQTGKIADYNYKLPDDFTGCVIAWNSNNLDSKVGGNYNYLYRLFRKSNLKPFERDISTEIYQAGSTPCNGVEGFNCYFPLQSYGFQPTNGVGYQPYRVVVLSFELLHAPATVCGPKKSTNLVKNKCVNFNFNGLTGTGVLTESNKKFLPFQQFGRDIADTTDAVRDPQTLEILDITPCSFGGVSVITPGTNTSNQVAVLYQDVNCTEVPVAIHADQLTPTWRVYSTGSNVFQTRAGCLIGAEHVNNSYECDIPIGAGICASYQTQTNSPRRARSVASQSIIAYTMSLGAENSVAYSNNSCAIPTNFTISVTTEILPVSMTKTSVDCTMYICGDSTECSNLLLQYGSFCTQLNRALTGIAVEQDKNTQEVFAQVKQIYKTPPIKDFGGFNFSQILPDPSKPSKRSFIEDLLFNKVTLADAGFIKQYGDCLGDIAARDLICAQKFNGLTVLPPLLTDEMIAQYTSALLAGTITSGWTFGAGAALQIPFAMQMAYRFNGIGVTQNVLYENQKLIANQFNSAIGKIQDSLSSTASALGKLQDVVNQNAQALNTLVKQLSSNFGAISSVLNDILSRLDKVEAEVQIDRLITGRLQSLQTYVTQQLIRAAEIRASANLAATKMSECVLGQSKRVDFCGKGYHLMSFPQSAPHGVVFLHVTYVPAQEKNFTCAPAICHDGKAHFPREGVFVSNGTHWFVTQRNFYEPQIITTDNTFVSGNCDVVIGIVNNTVYDPLQLELDSGGGGSDIDPYKEFGSSYQLLNFLPLDFFPDLNALVDTATALYEEELTGREHCSPHHTAIRQALVCWDELTKLIAWMSSNITSEQVRTIIVNHVNDTWGLKVRQSLWFHLSCLTFGQHTVQEFLVSFGVWIRTPAPYRPPNAPILSTLPEHTVIC

SEQ ID NO: 11005 - protein, 1301 aa, Artificial Sequence
  SARS-CoV-2/India/1-31/2020__EPI_ISL_413523 spike protein (1-1147)(I712C_T1077C) WhcAg construct
MFVFLVLLPLVSSQCVNLTTRTQLPPAYTNSFTRGVYYPDKVFRSSVLHSTQDLFLPFFSNVTWFHAIHVSGTNGTKRFDNPVLPFNDGVYFASTEKSNIIRGWIFGTTLDSKTQSLLIVNNATNVVIKVCEFQFCNDPFLGVYYHKNNKSWMESEFRVYSSANNCTFEYVSQPFLMDLEGKQGNFKNLREFVFKNIDGYFKIYSKHTPINLVRDLPQGFSALEPLVDLPIGINITRFQTLLALHRSYLTPGDSSSGWTAGAAAYYVGYLQPRTFLLKYNENGTITDAVDCALDPLSETKCTLKSFTVEKGIYQTSNFRVQPTESIVRFPNITNLCPFGEVFNATRFASVYAWNRKRISNCVADYSVLYNSASFSTFKCYGVSPTKLNDLCFTNVYADSFVIRGDEVRQIAPGQTGKIADYNYKLPDDFTGCVIAWNSNNLDSKVGGNYNYLYRLFRKSNLKPFERDISTEIYQAGSTPCNGVEGFNCYFPLQSYGFQPTNGVGYQPYRVVVLSFELLHAPATVCGPKKSTNLVKNKCVNFNFNGLTGTGVLTESNKKFLPFQQFGRDIADTTDAVRDPQTLEILDITPCSFGGVSVITPGTNTSNQVAVLYQDVNCTEVPVAIHADQLTPTWRVYSTGSNVFQTRAGCLIGAEHVNNSYECDIPIGAGICASYQTQTNSPRRARSVASQSIIAYTMSLGAENSVAYSNNSCAIPTNFTISVTTEILPVSMTKTSVDCTMYICGDSTECSNLLLQYGSFCTQLNRALTGIAVEQDKNTQEVFAQVKQIYKTPPIKDFGGFNFSQILPDPSKPSKRSFIEDLLFNKVTLADAGFIKQYGDCLGDIAARDLICAQKFNGLTVLPPLLTDEMIAQYTSALLAGTITSGWTFGAGAALQIPFAMQMAYRFNGIGVTQNVLYENQKLIANQFNSVIGKIQDSLSSTASALGKLQDVVNQNAQALNTLVKQLSSNFGAISSVLNDILSRLDKVEAEVQIDRLITGRLQSLQTYVTQQLIRAAEIRASANLAATKMSECVLGQSKRVDFCGKGYHLMSFPQSAPHGVVFLHVTYVPAQEKNFTCAPAICHDGKAHFPREGVFVSNGTHWFVTQRNFYEPQIITTDNTFVSGNCDVVIGIVNNTVYDPLQPELDSGGGGSDIDPYKEFGSSYQLLNFLPLDFFPDLNALVDTATALYEEELTGREHCSPHHTAIRQALVCWDELTKLIAWMSSNITSEQVRTIIVNHVNDTWGLKVRQSLWFHLSCLTFGQHTVQEFLVSFGVWIRTPAPYRPPNAPILSTLPEHTVIC

SEQ ID NO: 11006 - protein, 1301 aa, Artificial Sequence
  SARS-CoV-2/Guangdong/GD2020087-P0008/2020__EPI_ISL_413863 spike protein (1-1147)(I712C_T1077C) WhcAg construct
MFVFLVLLPLVSSQCVNLTTRTQLPPAYTNSFTRGVYYPDKVFRSSVLHSTQDLFLPFFSNVTWFHAIHVSGTNGTKRFDNPVLPFNDGVYFASTEKSNIIRGWIFGTTLDSKTQSLLIVNNATNVVIKVCEFQFCNDPFLGVYYHKNNKSWMESEFRVYSSANNCTFEYVSQPFLMDLEGKQGNFKNLREFVFKNIDGYFKIYSKHTPINLVRDLPQGFSALEPLVDLPIGINITRFQTLLALHRSYLTPGDSSSGWTAGAAAYYVGYLQPRTFLLKYNENGTITDAVDCALDPLSETKCTLKSFTVEKGIYQTSNFRVQPTESIVRFPNITNLCPFGEVFNATRFASVYAWNRKRISNCVADYSVLYNSASFSTFKCYGVSPTKLNDLCFTNVYADSFVIRGDEVREIAPGQTGKIADYNYKLPDDFTGCVIAWNSNNLDSKVGGNYNYLYRLFRKSNLKPFERDISTEIYQAGSTPCNGVEGFNCYFPLQSYGFQPTNGVGYQPYRVVVLSFELLHAPATVCGPKKSTNLVKNKCVNFNFNGLTGTGVLTESNKKFLPFQQFGRDIADTTDAVRDPQTLEILDITPCSFGGVSVITPGTNTSNQVAVLYQDVNCTEVPVAIHADQLTPTWRVYSTGSNVFQTRAGCLIGAEHVNNSYECDIPIGAGICASYQTQTNSPRRARSVASQSIIAYTMSLGAENSVAYSNNSCAIPTNFTISVTTEILPVSMTKTSVDCTMYICGDSTECSNLLLQYGSFCTQLNRALTGIAVEQDKNTQEVFAQVKQIYKTPPIKDFGGFNFSQILPDPSKPSKRSFIEDLLFNKVTLADAGFIKQYGDCLGDIAARDLICAQKFNGLTVLPPLLTDEMIAQYTSALLAGTITSGWTFGAGAALQIPFAMQMAYRFNGIGVTQNVLYENQKLIANQFNSAIGKIQDSLSSTASALGKLQDVVNQNAQALNTLVKQLSSNFGAISSVLNDILSRLDKVEAEVQIDRLITGRLQSLQTYVTQQLIRAAEIRASANLAATKMSECVLGQSKRVDFCGKGYHLMSFPQSAPHGVVFLHVTYVPAQEKNFTCAPAICHDGKAHFPREGVFVSNGTHWFVTQRNFYEPQIITTDNTFVSGNCDVVIGIVNNTVYDPLQPELDSGGGGSDIDPYKEFGSSYQLLNFLPLDFFPDLNALVDTATALYEEELTGREHCSPHHTAIRQALVCWDELTKLIAWMSSNITSEQVRTIIVNHVNDTWGLKVRQSLWFHLSCLTFGQHTVQEFLVSFGVWIRTPAPYRPPNAPILSTLPEHTVIC

SEQ ID NO: 11007 - protein, 1301 aa, Artificial Sequence
  SARS-CoV-2/Sweden/01/2020__EPI_ISL_411951 spike protein (1-1147)(I712C_T1077C) WhcAg construct
MFVFLVLLPLVSSQCVNLTTRTQLPPAYTNSFTRGVYYPDKVFRSSVLHSTQDLFLPFFSNVTWFHAIHVSGTNGTKRFDNPVLPFNDGVYFASTEKSNIIRGWIFGTTLDSKTQSLLIVNNATNVVIKVCEFQFCNDPFLGVYYHKNNKSWMESEFRVYSSANNCTFEYVSQPFLMDLEGKQGNFKNLREFVFKNIDGYFKIYSKHTPINLVRDLPQGFSALEPLVDLPIGINITRFQTLLALHRSYLTPGDSSSGWTAGAAAYYVGYLQPRTFLLKYNENGTITDAVDCALDPLSETKCTLKSFTVEKGIYQTSNFRVQPTESIVRFPNITNLCPFGEVFNATRFASVYAWNRKRISNCVADYSVLYNSASFSTFKCYGVSPTKLNDLCFTNVYADSFVIRGDEVRQIAPGQTGKIADYNYKLPDDFTGCVIAWNSNNLDSKVGGNYNYLYRLFRKSNLKPFERDISTEIYQAGSTPCNGVEGFNCYFPLQSYGFQPTNGVGYQPYRVVVLSFELLHAPATVCGPKKSTNLVKNKCVNFNFNGLTGTGVLTESNKKFLPFQQFGRDIADTTDAVRDPQTLEILDITPCSFGGVSVITPGTNTSNQVAVLYQDVNCTEVPVAIHADQLTPTWRVYSTGSNVFQTRAGCLIGAEHVNNSYECDIPIGAGICASYQTQTNSPRRARSVASQSIIAYTMSLGAENSVAYSNNSCAIPTNFTISVTTEILPVSMTKTSVDCTMYICGDSTECSNLLLQYGSFCTQLNRALTGIAVEQDKNTQEVFAQVKQIYKTPPIKDCGGFNFSQILPDPSKPSKRSFIEDLLFNKVTLADAGFIKQYGDCLGDIAARDLICAQKFNGLTVLPPLLTDEMIAQYTSALLAGTITSGWTFGAGAALQIPFAMQMAYRFNGIGVTQNVLYENQKLIANQFNSAIGKIQDSLSSTASALGKLQDVVNQNAQALNTLVKQLSSNFGAISSVLNDILSRLDKVEAEVQIDRLITGRLQSLQTYVTQQLIRAAEIRASANLAATKMSECVLGQSKRVDFCGKGYHLMSFPQSAPHGVVFLHVTYVPAQEKNFTCAPAICHDGKAHFPREGVFVSNGTHWFVTQRNFYEPQIITTDNTFVSGNCDVVIGIVNNTVYDPLQPELDSGGGGSDIDPYKEFGSSYQLLNFLPLDFFPDLNALVDTATALYEEELTGREHCSPHHTAIRQALVCWDELTKLIAWMSSNITSEQVRTIIVNHVNDTWGLKVRQSLWFHLSCLTFGQHTVQEFLVSFGVWIRTPAPYRPPNAPILSTLPEHTVIC

SEQ ID NO: 11008 - protein, 1301 aa, Artificial Sequence
  SARS-CoV-2/Tianmen/HBCDC-HB-07/2020__EPI_ISL_412983 spike protein (1-1147)(I712C_T1077C) WhcAg construct
MFVFLVLLPLVSSQCVNLTTRTQLPPAYTNSFTRGVYYPDKVFRSSVLHSTQDLFLPFFSNVTWFHAIHVSGTNGTKRFDNPVLPFNDGVYFASTEKSNIIRGWIFGTTLDSKTQSLLIVNNATNVVIKVCEFQFCNDPFLGVYYHKNNKSWMESEFRVYSSANNCTFEYVSQPFLMDLEGKQGNFKNLREFVFKNIDGYFKIYSKHTPINLVRDLPQGFSALEPLVDLPIGINITRFQTLLALHRSYLTPGDSSSGWTAGAAAYYVGYLQPRTFLLKYNENGTITDAVDCALDPLSETKCTLKSFTVEKGIYQTSNFRVQPTESIVRFPNITNLCPFGEVFNATRFASVYAWNRKRISNCVADYSVLYNSASFSTFKCYGVSPTKLNDLCFTNVYADSFVIRGDEVRQIAPGQTGKIADYNYKLPDDFTGCVIAWNSNNLDSKVGGNYNYLYRLFRKSNLKPFERDISTEIYQAGSTPCNGVEGFNCYFPLQSYGFQPTNGVGYQPYRVVVLSFELLHAPATVCGPKKSTNLVKNKCVNFNFNGLTGTGVLTESNKKFLPFQQFGRDIADTTDAVRDPQTLEILDITPCSFGGVSVITPGTNTSNQVAVLYQDLNCTEVPVAIHADQLTPTWRVYSTGSNVFQTRAGCLIGAEHVNNSYECDIPIGAGICASYQTQTNSPRRARSVASQSIIAYTMSLGAENSVAYSNNSCAIPTNFTISVTTEILPVSMTKTSVDCTMYICGDSTECSNLLLQYGSFCTQLNRALTGIAVEQDKNTQEVFAQVKQIYKTPPIKDFGGFNFSQILPDPSKPSKRSFIEDLLFNKVTLADAGFIKQYGDCLGDIAARDLICAQKFNGLTVLPPLLTDEMIAQYTSALLAGTITSGWTFGAGAALQIPFAMQMAYRFNGIGVTQNVLYENQKLIANQFNSAIGKIQDSLSSTASALGKLQDVVNQNAQALNTLVKQLSSNFGAISSVLNDILSRLDKVEAEVQIDRLITGRLQSLQTYVTQQLIRAAEIRASANLAATKMSECVLGQSKRVDFCGKGYHLMSFPQSAPHGVVFLHVTYVPAQEKNFTCAPAICHDGKAHFPREGVFVSNGTHWFVTQRNFYEPQIITTDNTFVSGNCDVVIGIVNNTVYDPLQPELDSGGGGSDIDPYKEFGSSYQLLNFLPLDFFPDLNALVDTATALYEEELTGREHCSPHHTAIRQALVCWDELTKLIAWMSSNITSEQVRTIIVNHVNDTWGLKVRQSLWFHLSCLTFGQHTVQEFLVSFGVWIRTPAPYRPPNAPILSTLPEHTVIC

SEQ ID NO: 11009 - protein, 1301 aa, Artificial Sequence
  SARS-CoV-2/Hong Kong/case42_VM20002493/2020__EPI_ISL_414527 spike protein (1-1147)(I712C_T1077C) WhcAg construct
MFVFLVLLPLVSSQCVNLTTRTQLPPAYTNSFTRGVYYPDKVFRSSVLHSTQDLFLPFFSNVTWFHAIHVSGTNGTKRFDNPVLPFNDGVYFASTEKSNIIRGWIFGTTLDSKTQSLLIVNNATNVVIKVCEFQFCNDPFLGVYYHKNNKSWMESEFRVYSSANNCTFEYVSQPFLMDLEGKQGNFKNLREFVFKNIDGYFKIYSKHTPINLVRDLPQGFSALEPLVDLPIGINITRFQTLLALHRSYLTPGDSSSGWTAGAAAYYVGYLQPRTFLLKYNENGTITDAVDCALDPLSETKCTLKSFTVEKGIYQTSNFRVQPTESIVRFPNITNLCPFGEVFNATRFASVYAWNRKRISNCVADYSVLYNSASFSTFKCYGVSPTKLNDLCFTNVYADSFVIRGDEVRQIAPGQTGKIADYNYKLPDDFTGCVIAWNSNNLDSKVGGNYNYLYRLFRKSNLKPFERDISTEIYQAGSTPCNGVEGFNCYFPLQSYGFQPTNGVGYQPYRVVVLSFELLHAPATVCGPKKSTNLVKNKCVNFNFNGLTGTGVLTESNKKFLPFQQFGRDIADTTDAVRDPQTLEILDITPCSFGGVSVITPGTNTSNQVAVLYQDVNCTEVPVAIHADQLTPTWRVYSTGSNVFQTRAGCLIGAEHVNNSYECDIPIGAGICASYQTQTNSPRRARSVASQSIIAYTMSLGAENSVAYSNNSCAIPTNFAISVTTEILPVSMTKTSVDCTMYICGDSTECSNLLLQYGSFCTQLNRALTGIAVEQDKNTQEVFAQVKQIYKTPPIKDFGGFNFSQILPDPSKPSKRSFIEDLLFNKVTLADAGFIKQYGDCLGDIAARDLICAQKFNGLTVLPPLLTDEMIAQYTSALLAGTITSGWTFGAGAALQIPFAMQMAYRFNGIGVTQNVLYENQKLIANQFNSAIGKIQDSLSSTASALGKLQDVVNQNAQALNTLVKQLSSNFGAISSVLNDILSRLDKVEAEVQIDRLITGRLQSLQTYVTQQLIRAAEIRASANLAATKMSECVLGQSKRVDFCGKGYHLMSFPQSAPHGVVFLHVTYVPAQEKNFTCAPAICHDGKAHFPREGVFVSNGTHWFVTQRNFYEPQIITTDNTFVSGNCDVVIGIVNNTVYDPLQPELDSGGGGSDIDPYKEFGSSYQLLNFLPLDFFPDLNALVDTATALYEEELTGREHCSPHHTAIRQALVCWDELTKLIAWMSSNITSEQVRTIIVNHVNDTWGLKVRQSLWFHLSCLTFGQHTVQEFLVSFGVWIRTPAPYRPPNAPILSTLPEHTVIC

SEQ ID NO: 11010 - protein, 1301 aa, Artificial Sequence
  SARS-CoV-2/USA/CruiseA-23/2020__EPI_ISL_414482 spike protein (1-1147)(I712C_T1077C) WhcAg construct
MFVFLVLLPLVSSQCVNLTTRTQLPPAYTNSFTRGVYYPDKVFRSSVLHSTQDLFLPFFSNVTWFHAIHVSGTNGTKRFDNPVLPFNDGVYFASTEKSNIIRGWIFGTTLDSKTQSLLIVNNATNVVIKVCEFQFCNDPFLGVYYHKNNKSWMESEFRVYSSANNCTFEYVSQPFLMDLEVKQGNFKNLREFVFKNIDGYFKIYSKHTPINLVRDLPQGFSALEPLVDLPIGINITRFQTLLALHRSYLTPGDSSSGWTAGAAAYYVGYLQPRTFLLKYNENGTITDAVDCALDPLSETKCTLKSFTVEKGIYQTSNFRVQPTESIVRFPNITNLCPFGEVFNATRFASVYAWNRKRISNCVADYSVLYNSASFSTFKCYGVSPTKLNDLCFTNVYADSFVIRGDEVRQIAPGQTGKIADYNYKLPDDFTGCVIAWNSNNLDSKVGGNYNYLYRLFRKSNLKPFERDISTEIYQAGSTPCNGVEGFNCYFPLQSYGFQPTNGVGYQPYRVVVLSFELLHAPATVCGPKKSTNLVKNKCVNFNFNGLTGTGVLTESNKKFLPFQQFGRDIADTTDAVRDPQTLEILDITPCSFGGVSVITPGTNTSNQVAVLYQDVNCTEVPVAIHADQLTPTWRVYSTGSNVFQTRAGCLIGAEHVNNSYECDIPIGAGICASYQTQTNSPRRARSVASQSIIAYTMSLGAENSVAYSNNSCAIPTNFTISVTTEILPVSMTKTSVDCTMYICGDSTECSNLLLQYGSFCTQLNRALTGIAVEQDKNTQEVFAQVKQIYKTPPIKDFGGFNFSQILPDPSKPSKRSFIEDLLFNKVTLADAGFIKQYGDCLGDIAARDLICAQKFNGLTVLPPLLTDEMIAQYTSALLAGTITSGWTFGAGAALQIPFAMQMAYRFNGIGVTQNVLYENQKLIANQFNSAIGKIQDSLSSTASALGKLQDVVNQNAQALNTLVKQLSSNFGAISSVLNDILSRLDKVEAEVQIDRLITGRLQSLQTYVTQQLIRAAEIRASANLAATKMSECVLGQSKRVDFCGKGYHLMSFPQSAPHGVVFLHVTYVPAQEKNFTCAPAICHDGKAHFPREGVFVSNGTHWFVTQRNFYEPQIITTDNTFVSGNCDVVIGIVNNTVYDPLQPELDSGGGGSDIDPYKEFGSSYQLLNFLPLDFFPDLNALVDTATALYEEELTGREHCSPHHTAIRQALVCWDELTKLIAWMSSNITSEQVRTIIVNHVNDTWGLKVRQSLWFHLSCLTFGQHTVQEFLVSFGVWIRTPAPYRPPNAPILSTLPEHTVIC

SEQ ID NO: 11011 - protein, 1301 aa, Artificial Sequence
  SARS-CoV-2/Hong Kong/case85_VM20002868/2020__EPI_ISL_414519 spike protein (1-1147)(I712C_T1077C) WhcAg construct
MFVFLVLVPLVSSQCVNLTTRTQLPPAYTNSFTRGVYYPDKVFRSSVLHSTQDLFLPFFSNVTWFHAIHVSGTNGTKRFDNPVLPFNDGVYFASTEKSNIIRGWIFGTTLDSKTQSLLIVNNATNVVIKVCEFQFCNDPFLGVYYHKNNKSWMESEFRVYSSANNCTFEYVSQPFLMDLEGKQGNFKNLREFVFKNIDGYFKIYSKHTPINLVRDLPQGFSALEPLVDLPIGINITRFQTLLALHRSYLTPGDSSSGWTAGAAAYYVGYLQPRTFLLKYNENGTITDAVDCALDPLSETKCTLKSFTVEKGIYQTSNFRVQPTESIVRFPNITNLCPFGEVFNATRFASVYAWNRKRISNCVADYSVLYNSASFSTFKCYGVSPTKLNDLCFTNVYADSFVIRGDEVRQIAPGQTGKIADYNYKLPDDFTGCVIAWNSNNLDSKVGGNYNYLYRLFRKSNLKPFERDISTEIYQAGSTPCNGVEGFNCYFPLQSYGFQPTNGVGYQPYRVVVLSFELLHAPATVCGPKKSTNLVKNKCVNFNFNGLTGTGVLTESNKKFLPFQQFGRDIADTTDAVRDPQTLEILDITPCSFGGVSVITPGTNTSNQVAVLYQDVNCTEVPVAIHADQLTPTWRVYSTGSNVFQTRAGCLIGAEHVNNSYECDIPIGAGICASYQTQTNSPRRARSVASQSIIAYTMSLGAENSVAYSNNSCAIPTNFTISVTTEILPVSMTKTSVDCTMYICGDSTECSNLLLQYGSFCTQLNRALTGIAVEQDKNTQEVFAQVKQIYKTPPIKDFGGFNFSQILPDPSKPSKRSFIEDLLFNKVTLADAGFIKQYGDCLGDIAARDLICAQKFNGLTVLPPLLTDEMIAQYTSALLAGTITSGWTFGAGAALQIPFAMQMAYRFNGIGVTQNVLYENQKLIANQFNSAIGKIQDSLSSTASALGKLQDVVNQNAQALNTLVKQLSSNFGAISSVLNDILSRLDKVEAEVQIDRLITGRLQSLQTYVTQQLIRAAEIRASANLAATKMSECVLGQSKRVDFCGKGYHLMSFPQSAPHGVVFLHVTYVPAQEKNFTCAPAICHDGKAHFPREGVFVSNGTHWFVTQRNFYEPQIITTDNTFVSGNCDVVIGIVNNTVYDPLQPELDSGGGGSDIDPYKEFGSSYQLLNFLPLDFFPDLNALVDTATALYEEELTGREHCSPHHTAIRQALVCWDELTKLIAWMSSNITSEQVRTIIVNHVNDTWGLKVRQSLWFHLSCLTFGQHTVQEFLVSFGVWIRTPAPYRPPNAPILSTLPEHTVIC

SEQ ID NO: 11012 - protein, 1301 aa, Artificial Sequence; identical to SEQ ID NO: 11002
  SARS-CoV-2/England/200990660/2020__EPI_ISL_414523 spike protein (1-1147)(I712C_T1077C) WhcAg construct

SEQ ID NO: 11013 - protein, 1301 aa, Artificial Sequence
  SARS-CoV-2/Australia/NSW09/2020__EPI_ISL_413595 spike protein (1-1147)(I712C_T1077C) WhcAg construct
MFVFLVLLPLVSSQCVNLTTRTQLPPAYTNSFTRGVYYPDKVFRSSVLHSTQDLFLPFFSNVTWFHAIHVSGTNGTKRFDNPVLPFNDGVYFASTEKSNIIRGWIFGTTLDSKTQSLLIVNNATNVVIKVCEFQFCNDPFLGVYYHKNNKSWMESEFRVYSSANNCTFEYVSQPFLMDLEGKQGNFKNLREFVFKNIDGYFKIYSKHTPINLVRDLPQGFSALEPLVDLPIGINITRFQTLLALHRSYLTPGDSSSGWTAGAAAYYVGYLQPRTFLLKYNENGTITDAVDCALDPLSETKCTLKSFTVEKGIYQTSNFRVQPTESIVRFPNITNLCPFGEVFNATRFASVYAWNRKRISNCVADYSVLYNSASFSTFKCYGVSPTKLNDLCFTNVYADSFVIRGDEVRQIAPGQTGKIADYNYKLPDDFTGCVIAWNSNNLDSKVGGNYNYLYRLFRKSNLKPFERDISTEIYQAGSTPCNGVEGFNCYFPLQSYGFQPTNGVGYQPYRVVVLSFELLHAPATVCGPKKSTNLVKNKCVNFNFNGLTGTGVLTESNKKFLPFQQFGRDIADTTDAVRDPQTLEILDITPCSFGGVSVITPGTNTSNQVAVLYQDVNCTEVPVAIHADQLTPTWRVYSTGSNVFQTRAGCLIGAEHVNNSYECDIPIGAGICASYQTQTNSPRRARSVASQSIIAYTMSLGAENSVAYSNNSCAIPTNFTISVTTEILPVSMTKTSVDCTMYICGDSTECSNLLLQYGSFCTQLNRALTGIAVEQDKNTQEVFAQVKQIYKTPPIKDFGGFNFSQILPDPSKPSKRSFIEDLLFNKVTLADAGFIKQYGDCLGDIAARDLICAQKFNGLTVLPPLLTDEMIAQYTSALLAGTITSGWTFGAGAALQIPFAMQMAYRFNGIGVTQNVLYENQKLIANQFNSAIGKIQDSLSFTASALGKLQDVVNQNAQALNTLVKQLSSNFGAISSVLNDILSRLDKVEAEVQIDRLITGRLQSLQTYVTQQLIRAAEIRASANLAATKMSECVLGQSKRVDFCGKGYHLMSFPQSAPHGVVFLHVTYVPAQEKNFTCAPAICHDGKAHFPREGVFVSNGTHWFVTQRNFYEPQIITTDNTFVSGNCDVVIGIVNNTVYDPLQPELDSGGGGSDIDPYKEFGSSYQLLNFLPLDFFPDLNALVDTATALYEEELTGREHCSPHHTAIRQALVCWDELTKLIAWMSSNITSEQVRTIIVNHVNDTWGLKVRQSLWFHLSCLTFGQHTVQEFLVSFGVWIRTPAPYRPPNAPILSTLPEHTVIC

SEQ ID NO: 11014 - protein, 1301 aa, Artificial Sequence; identical to SEQ ID NO: 10994
  SARS-CoV-2/Australia/NSW10/2020__EPI_ISL_413596 spike protein (1-1147)(I712C_T1077C) WhcAg construct

SEQ ID NO: 11015 - protein, 1301 aa, Artificial Sequence
  SARS-CoV-2/Switzerland/1000477797/2020__EPI_ISL_413023 spike protein (1-1147)(I712C_T1077C) WhcAg construct
MFVFLVLLPLVSSQCVNLTTRTQLPPAYTNSFTRGVYYPDKVFRSSVLHSTQDLFLPFFSNVTWFHAIHVSGTNGTKRFDNPVLPFNDGVYFASTEKSNIIRGWIFGTTLDSKTQSLLIVNNATNVVIKVCEFQFCNDPFLGVYYHKNNKSWMESEFRVYSSANNCTFEYVSQPFLMDLEGKQGNFKNLREFVFKNIDGYFNIYSKHTPINLVRDLPQGFSALEPLVDLPIGINITRFQTLLALHRSYLTPGDSSSGWTAGAAAYYVGYLQPRTFLLKYNENGTITDAVDCALDPLSETKCTLKSFTVEKGIYQTSNFRVQPTESIVRFPNITNLCPFGEVFNATRFASVYAWNRKRISNCVADYSVLYNSASFSTFKCYGVSPTKLNDLCFTNVYADSFVIRGDEVRQIAPGQTGKIADYNYKLPDDFTGCVIAWNSNNLDSKVGGNYNYLYRLFRKSNLKPFERDISTEIYQAGSTPCNGVEGFNCYFPLQSYGFQPTNGVGYQPYRVVVLSFELLHAPATVCGPKKSTNLVKNKCVNFNFNGLTGTGVLTESNKKFLPFQQFGRDIADTTDAVRDPQTLEILDITPCSFGGVSVITPGTNTSNQVAVLYQGVNCTEVPVAIHADQLTPTWRVYSTGSNVFQTRAGCLIGAEHVNNSYECDIPIGAGICASYQTQTNSPRRARSVASQSIIAYTMSLGAENSVAYSNNSCAIPTNFTISVTTEILPVSMTKTSVDCTMYICGDSTECSNLLLQYGSFCTQLNRALTGIAVEQDKNTQEVFAQVKQIYKTPPIKDFGGFNFSQILPDPSKPSKRSFIEDLLFNKVTLADAGFIKQYGDCLGDIAARDLICAQKFNGLTVLPPLLTDEMIAQYTSALLAGTITSGWTFGAGAALQIPFAMQMAYRFNGIGVTQNVLYENQKLIANQFNSAIGKIQDSLSSTASALGKLQDVVNQNAQALNTLVKQLSSNFGAISSVLNDILSRLDKVEAEVQIDRLITGRLQSLQTYVTQQLIRAAEIRASANLAATKMSECVLGQSKRVDFCGKGYHLMSFPQSAPHGVVFLHVTYVPAQEKNFTCAPAICHDGKAHFPREGVFVSNGTHWFVTQRNFYEPQIITTDNTFVSGNCDVVIGIVNNTVYDPLQPELDSGGGGSDIDPYKEFGSSYQLLNFLPLDFFPDLNALVDTATALYEEELTGREHCSPHHTAIRQALVCWDELTKLIAWMSSNITSEQVRTIIVNHVNDTWGLKVRQSLWFHLSCLTFGQHTVQEFLVSFGVWIRTPAPYRPPNAPILSTLPEHTVIC

SEQ ID NO: 11016 - protein, 1301 aa, Artificial Sequence
  SARS-CoV-2/Belgium/BA-02291/2020__EPI_ISL_415159 spike protein (1-1147)(I712C_T1077C) WhcAg construct
MFVFLVLLPLVSSQCVNLTTRTQLPPAYTNSFTRGVYYPDKVFRSSVLHSTQDLFLPFFSNVTWFHAIHVSGTNGTKRFDNPVLPFNDGVYFASTEKSNIIRGWIFGTTLDSKTQSLLIVNNATNVVIKVCEFQFCNDPFLGVYYHKNNKSWMESEFRVYSSANNCTFEYVSQPFLMDLEGKQGNFKNLREFVFKNIDGYFKIYSKHTPINLVRDLPQGFSALEPLVDLPIGINITRFQTLLALHRSYLTPGDSSSGWTAGAAAYYVGYLQPRTFLLKYNENGTITDAVDCALDPLSETKCTLKSFTVEKGIYQTSNFRVQPTESIVRFPNITNLCPFGEVFNATRFASVYAWNRKRISNCVADYSVLYNSASFSTFKCYGVSPTKLNDLCFTNVYADSFVIRGDEVRQIAPGQTGKIADYNYKLPDDFTGCVIAWNSNNLDSKVGGNYNYLYRLFRRSNLKPFERDISTEIYQAGSTPCNGVEGFNCYFPLQSYGFQPTNGVGYQPYRVVVLSFELLPAPATVCGPKKSTNLVKNKCVNFNFNGLTGTGVLTESNKKFLPFQQFGRDIADTTDAVRDPQTLEILDITPCSFGGVSVITPGTNTSNQVAVLYQGVNCTEVPVAIHADQLTPTWRVYSTGSNVFQTRAGCLIGAEHVNNSYECDIPIGAGICASYQTQTNSPRRARSVASQSIIAYTMSLGAENSVAYSNNSCAIPTNFTISVTTEILPVSMTKTSVDCTMYICGDSTECSNLLLQYGSFCTQLNRALTGIAVEQDKNTQEVFAQVKQIYKTPPIKDFGGFNFSQILPDPSKPSKRSFIEDLLFNKVTLADAGFIKQYGDCLGDIAARDLICAQKFNGLTVLPPLLTDEMIAQYTSALLAGTITSGWTFGAGAALQIPFAMQMAYRFNGIGVTQNVLYENQKLIANQFNSAIGKIQDSLSSAAPALGKLQDVVNQNAQALNTLVKQLSSNFGAISSVLNDILSRLDKVEAEVQIDRLITGRLQSLQTYVTQQLIRAAEIRASANLAATKMSECVLGQSKRVDFCGKGYHLMSFPQSAPHGVVFLHVTYVPAQEKNFTCAPAICHDGKAHFPREGVFVSNGTHWFVTQRNFYEPQIITTDNTFVSGNCDVVIGIVNNTVYDPLQPELDSGGGGSDIDPYKEFGSSYQLLNFLPLDFFPDLNALVDTATALYEEELTGREHCSPHHTAIRQALVCWDELTKLIAWMSSNITSEQVRTIIVNHVNDTWGLKVRQSLWFHLSCLTFGQHTVQEFLVSFGVWIRTPAPYRPPNAPILSTLPEHTVIC

SEQ ID NO: 11017 - protein, 1301 aa, Artificial Sequence
  SARS-CoV-2/USA/WA8-UW5/2020__EPI_ISL_413486 spike protein (1-1147)(I712C_T1077C) WhcAg construct
MFVFLVLLPLVSSQCVNLTTRTQLPPAYTNSFTRGVYYPDKVFRSSVLHSTQDLFLPFFSNVTWFHAIHVSGTNGTKRFDNPVLPFNDGVYFASTEKSNIIRGWIFGTTLDSKTQSLLIVNNATNVVIKVCEFQFCNDPFLGVYYHKNNKSWMESEFRVYSSANNCTFEYVSQPFLMDLEGKQGNFKNLREFVFKNIDGYFKIYSKHTPINLVRDLPQGFSALEPLVDLPIGINITRFQTLLALHRSYLTPGDSSSGWTAGAAAYYVGYLQPRTFLLKYNENGTITDAVDCALDPLSETKCTLKSFTVEKGIYQTSNFRVQPTESIVRFPNITNLCPFGEVFNATRFASVYAWNRKRISNCVADYSVLYNSASFSTFKCYGVSPTKLNDLCFTNVYADSFVIRGDEVRQIAPGQTGKIADYNYKLPDDFTGCVIAWNSNNLDSKVGGNYNYLYRLFRKSNLKPFERDISTEIYQAGSTPCNGVEGFNCYFPLQSYGFQPTNGVGYQPYRVVVLSFELLHAPATVCGPKKSTNLVKNKCVNFNFNGLTGTGVLTESNKKFLPFQQFGRDIADTTDAVRDPQTLEILDITPCSFGGVSVITPGTNTSNQVAVLYQDVNCTEVPVAIHADQLTPTWRVYSTGSNVFQTRAGCLIGAEYVNNSYECDIPIGAGICASYQTQTNSPRRARSVASQSIIAYTMSLGAENSVAYSNNSCAIPTNFTISVTTEILPVSMTKTSVDCTMYICGDSTECSNLLLQYGSFCTQLNRALTGIAVEQDKNTQEVFAQVKQIYKTPPIKDFGGFNFSQILPDPSKPSKRSFIEDLLFNKVTLADAGFIKQYGDCLGDIAARDLICAQKFNGLTVLPPLLTDEMIAQYTSALLAGTITSGWTFGAGAALQIPFAMQMAYRFNGIGVTQNVLYENQKLIANQFNSAIGKIQDSLSSTASALGKLQDVVNQNAQALNTLVKQLSSNFGAISSVLNDILSRLDKVEAEVQIDRLITGRLQSLQTYVTQQLIRAAEIRASANLAATKMSECVLGQSKRVDFCGKGYHLMSFPQSAPHGVVFLHVTYVPAQEKNFTCAPAICHDGKAHFPREGVFVSNGTHWFVTQRNFYEPQIITTDNTFVSGNCDVVIGIVNNTVYDPLQPELDSGGGGSDIDPYKEFGSSYQLLNFLPLDFFPDLNALVDTATALYEEELTGREHCSPHHTAIRQALVCWDELTKLIAWMSSNITSEQVRTIIVNHVNDTWGLKVRQSLWFHLSCLTFGQHTVQEFLVSFGVWIRTPAPYRPPNAPILSTLPEHTVIC

SEQ ID NO: 11018 - protein, 1301 aa, Artificial Sequence
  SARS-CoV-2/England/20102000506/2020__EPI_ISL_415147 spike protein (1-1147)(I712C_T1077C) WhcAg construct
MFVFLVLLPLVSSQCVNLTTRTQLPPAYTNSFTRGVYYPDKVFRSSVLHSTQDLFLPFFSNVTWFHAIHVSGTNGTKRFDNPVLPFNDGVYFASTEKSNIIRGWIFGTTLDSKTQSLLIVNNATNVVIKVCEFQFCNDPFLGVYYHKNNKSWMESEFRVYSSANNCTFEYVSQPFLMDLEGKQGNFKNLREFVFKNIDGYFKIYSKHTPINLVRDLPQGFSALEPLVDLPIGINITRFQTLLALHRSYLTPGDSSSGWTAGAAAYYVGYLQPRTFLLKYNENGTITDAVDCALDPLSETKCTLKSFTVEKGIYQTSNFRVQPTESIVRFPNITNLCPFGEVFNATRFASVYAWNRKRISNCVADYSVLYNSASFSTFKCYGVSPTKLNDLCFTNVYADSFVIRGDEVRQIAPGQTGKIADYNYKLPDDFTGCVIAWNSNNLDSKVGGNYNYLYRLFRKSNLKPFERDISTEIYQAGSTPCNGVEGFNCYFPLQSYGFQPTNGVGYQPYRVVVLSFELLHAPATVCGPKKSTNLVKNKCVNFNFNGLTGTGVLTESNKKFLPFQQFGRDIADTTDAVRDPQTLEILDITPCSFGGVSVITPGTNTSNQVAVLYQGVNCTEVPVAIHADQLTPTWRVYSTGSNVFQTRAGCLIGAEHVNNSYECDIPIGAGICASYQTQTNSPRRARSVASQSIIAYTMSLGAENSVAYSNNSCAIPTNFTISVTTEILPVSMTKTSVDCTMYICGDSTECSNLLLQYGSFCTQLNRALTGIAVEQDKNTQEVFAQVKQIYKTPPIKDFGGFNFSQILPDPSKPSKRSFIEDLLFNKVTLADAGFIKQYGYCLGDIAARDLICAQKFNGLTVLPPLLTDEMIAQYTSALLAGTITSGWTFGAGAALQIPFAMQMAYRFNGIGVTQNVLYENQKLIANQFNSAIGKIQDSLSSTASALGKLQDVVNQNAQALNTLVKQLSSNFGAISSVLNDILSRLDKVEAEVQIDRLITGRLQSLQTYVTQQLIRAAEIRASANLAATKMSECVLGQSKRVDFCGKGYHLMSFPQSAPHGVVFLHVTYVPAQEKNFTCAPAICHDGKAHFPREGVFVSNGTHWFVTQRNFYEPQIITTDNTFVSGNCDVVIGIVNNTVYDPLQPELDSGGGGSDIDPYKEFGSSYQLLNFLPLDFFPDLNALVDTATALYEEELTGREHCSPHHTAIRQALVCWDELTKLIAWMSSNITSEQVRTIIVNHVNDTWGLKVRQSLWFHLSCLTFGQHTVQEFLVSFGVWIRTPAPYRPPNAPILSTLPEHTVIC

SEQ ID NO: 11019 - protein, 1301 aa, Artificial Sequence
  SARS-CoV-2/Belgium/VAG-03013/2020__EPI_ISL_415155 spike protein (1-1147)(I712C_T1077C) WhcAg construct
MFVFLVLLPLVSSQCVNLTTRTQLPPAYTNSFTRGVYYPDKVFRSSVLHSTQDLFLPFFSNVTWFHAIHVSGTNGTKRFDNPVLPFNDGVYFASTEKSNIIRGWIFGTTLDSKTQSLLIVNNATNVVIKVCEFQFCNDPFLGVYYHKNNKSWMESEFRVYSSANNCTFEYVSQPFLMDLEGKQGNFKNLREFVFKNIDGYFKIYSKHTPINLVRDLPQGFSALEPLVDLPIGINITRFQTLLALHRSYLTPGDSSSGWTAGAAAYYVGYLQPRTFLLKYNENGTITDAVDCALDPLSETKCTLKSFTVEKGIYQTSNFRVQPTESIVRFPNITNLCPFGEVFNATRFASVYAWNRKRISNCVADYSVLYNSASFSTFKCYGVSPTKLNDLCFTNVYADSFVIRGDEVRQIAPGQTGKIADYNYKLPDDFTGCVIAWNSNNLDSKVGGNYNYLYRLFRKSNLKPFERDISTEIYQAGSTPCNGVEGFNCYFPLQSYGFQPTNGVGYQPYRVVVLSFELLHAPATVCGPKKSTNLVKNKCVNFNFNGLTGTGVLTESNKKFLPFQQFGRDIADTTDAVRDPQTLEILDITPCSFGGVSVITPGTNTSNQVAVLYQGVNCTEVPVAIHADQLTPTWRVYSTGSNVFQTRAGCLIGAEHVNNSYECDIPIGAGICASYQTQTNSPRRARSVASQSIIAYTMSLGAENSVAYSNNSCAIPTNFTISVTTEILPVSMTKTSVDCTMYICGDSTECSNLLLQYGSFCTQLNRALTGIAVEQDKNTQEVFAQVKQIYKTPPIKDFGGFNFSQILPDPSKPSKRSFIEDLLFNKVTLADAGFIKQYGDCLGDIAARDLICAQKFNGLTVLPPLLTDEMIAQYTSALLAGTITSGWTFGAGAALQIPFAMQMAYRFNGIGVTQNVLYENQKLIANQFNSAIGKIQDSLSSTATALGKLQDVVNQNAQALNTLVKQLSSNFGAISSVLNDILSRLDKVEAEVQIDRLITGRLQSLQTYVTQQLIRAAEIRASANLAATKMSECVLGQSKRVDFCGKGYHLMSFPQSAPHGVVFLHVTYVPAQEKNFTCAPAICHDGKAHFPREGVFVSNGTHWFVTQRNFYEPQIITTDNTFVSGNCDVVIGIVNNTVYDPLQPELDSGGGGSDIDPYKEFGSSYQLLNFLPLDFFPDLNALVDTATALYEEELTGREHCSPHHTAIRQALVCWDELTKLIAWMSSNITSEQVRTIIVNHVNDTWGLKVRQSLWFHLSCLTFGQHTVQEFLVSFGVWIRTPAPYRPPNAPILSTLPEHTVIC

SEQ ID NO: 11020 - protein, 1301 aa, Artificial Sequence
  SARS-CoV-2/Belgium/BC-03016/2020__EPI_ISL_415157 spike protein (1-1147)(I712C_T1077C) WhcAg construct
MFVFLVLLPLVSSQCVNLTTRTQLPPAYTNSFTRGVYYPDKVFRSSVLHSTQDLFLPFFSNVTWFHAIHVSGTNGTKRFDNPVLPFNDGVYFASTEKSNIIRGWIFGTTLDSKTQSLLIVNNATNVVIKVCEFQFCNDPFLGVYYHKNNKSWMESEFRVYSSANNCTFEYVSQPFLMDLEGKQGNFKNLREFVFKNIDGYFKIYSKHTPINLVRDLPQGFSALEPLVDLPIGINITRFQTLLALHRSYLTPGDSSSGWTAGAAAYYVGYLQPRTFLLKYNENGTITDAVDCALDPLSETKCTLKSFTVEKGIYQTSNFRVQPTESIVRFPNITNLCPFGEVFNATRFASVYAWNRKRISNCVADYSVLYNSASFSTFKCYGVSPTKLNDLCFTNVYADSFVIRGDEVRQIAPGQTGKIADYNYKLPDDFTGCVIAWNSNNLDSKVGGNYNYLYRLFRKSNLKPFERDISTEIYQAGSTPCNGVEGFNCYFPLQSYGFQPTNGVGYQPYRVVVLSFELLHAPATVCGPKKSTNLVKNKCVNFNFNGLTGTGVLTESNKKFLPFQQFGRDIADTTDAVRDPQTLEILDITPCSFGGVSVITPGTNTSNQVAVLYQGVNCTEVPVAIHADQLTPTWRVYSTGSNVFQTRAGCLIGAEHVNNSYECDIPIGAGICASYQTQTNSPRRARSVASQSIIAYTMSLGAENSVAYSNNSCAIPTNFTISVTTEILPVSMTKTSVDCTMYICGDSTECSNLLLQYGSFCTQLNRALTGIAVEQDKNTQEVFAQVKQIYKTPPIKDFGGFNFSQILPDPSKPSKRSFIEDLLFNKVTLADAGFIKQYGDCLGDIAARDLICAQKFNGLTVLPPLLTDEMIAQYTSALLAGTITSGWTFGAGAALQIPFAMQMAYRFNGIGVTQNVLYENQKLIANQFNSAIGKIQDSLSSTAPALGKLQDVVNQNAQALNTLVKQLSSNFGAISSVLNDILSRLDKVEAEVQIDRLITGRLQSLQTYVTQQLIRAAEIRASANLAATKMSECVLGQSKRVDFCGKGYHLMSFPQSAPHGVVFLHVTYVPAQEKNFTCAPAICHDGKAHFPREGVFVSNGTHWFVTQRNFYEPQIITTDNTFVSGNCDVVIGIVNNTVYDPLQPELDSGGGGSDIDPYKEFGSSYQLLNFLPLDFFPDLNALVDTATALYEEELTGREHCSPHHTAIRQALVCWDELTKLIAWMSSNITSEQVRTIIVNHVNDTWGLKVRQSLWFHLSCLTFGQHTVQEFLVSFGVWIRTPAPYRPPNAPILSTLPEHTVIC

SEQ ID NO: 11021 - protein, 1301 aa, Artificial Sequence
  SARS-CoV-2/Germany/BavPat3/2020__EPI_ISL_414521 spike protein (1-1147)(I712C_T1077C) WhcAg construct
MFVFLVLLPLVSSQCVNLTTRTQLPPAYTNSFTRGVYYPDKVFRSSVLHSTQDLFLPFFSNVTWFHAIHVSGTNGTKRFDNPVLPFNDGVYFASTEKSNIIRGWIFGTTLDSKTQSLLIVNNATNVVIKVCEFQFCNDPFLGVYYHKNNKSWMESEFRVYSSANNCTFEYVSQPFLMDLEGKQGNFKNLREFVFKNIDGYFKIYSKHTPINLVRDLPQGFSALEPLVDLPIGINITRFQTLLALHRSYLTPGDSSSGWTAGAAAYYVGYLQPRTFLLKYNENGTITDAVDCALDPLSETKCTLKSFTVEKGIYQTSNFRVQPTESIVRFPNITNLCPFGEVFNATRFASVYAWNRKRISNCVADYSVLYNSASFSTFKCYGVSPTKLNDLCFTNVYADSFVIRGDEVRQIAPGQTGKIADYNYKLPDDFTGCVIAWNSNNLDSKVGGNYNYLYRLFRKSNLKPFERDISTEIYQAGSTPCNGVEGFNCYFPLQSYGFQPTNGVGYQPYRVVVLSFELLHAPATVCGPKKSTNLVKNKCVNFNFNGLTGTGVLTESNKKFLPFQQFGRDIADTTDAVRDPQTLEILDITPCSFGGVSVITPGTNTSNQVAVLYQDVNCTEVPVAIHADQLTPTWRVYSTGSNVFQTRAGCLIGAEHVNNSYECDIPIGAGICASYQTQTNSPRRARSVASQSIIAYTMSLGAENSVAYSNNSCAIPTNFTISVTTEILPVSMTKTSVDCTMYICGDSTECSNLLLQYGSFCTQLNRALTGIAVEQDKNTQQVFAQVKQIYKTPPIKDFGGFNFSQILPDPSKPSKRSFIEDLLFNKVTLADAGFIKQYGDCLGDIAARDLICAQKFNGLTVLPPLLTDEMIAQYTSALLAGTITSGWTFGAGAALQIPFAMQMAYRFNGIGVTQNVLYENQKLIANQFNSAIGKIQDSLSSTASALGKLQDVVNQNAQALNTLVKQLSSNFGAISSVLNDILSRLDKVEAEVQIDRLITGRLQSLQTYVTQQLIRAAEIRASANLAATKMSECVLGQSKRVDFCGKGYHLMSFPQSAPHGVVFLHVTYVPAQEKNFTCAPAICHDGKAHFPREGVFVSNGTHWFVTQRNFYEPQIITTDNTFVSGNCDVVIGIVNNTVYDPLQPELDSGGGGSDIDPYKEFGSSYQLLNFLPLDFFPDLNALVDTATALYEEELTGREHCSPHHTAIRQALVCWDELTKLIAWMSSNITSEQVRTIIVNHVNDTWGLKVRQSLWFHLSCLTFGQHTVQEFLVSFGVWIRTPAPYRPPNAPILSTLPEHTVIC

SEQ ID NO: 11022 - protein, 1301 aa, Artificial Sequence
  SARS-CoV-2/France/HF1805/2020__EPI_ISL_414628 spike protein (1-1147)(I712C_T1077C) WhcAg construct
MFVFLVLLPLVSSQCVNLTTRTQLPPAYTNSFTRGVYYPDKVFRSSVLHSTQDLFLPFFSNVTWFHAIHVSGTNGTKRFDNPVLPFNDGVYFASTEKSNIIRGWIFGTTLDSKTQSLLIVNNATNVVIKVCEFQFCNDPFLGVYYHKNNKSWMESEFRVYSSANNCTFEYVSQPFLMDLEGKQGNFKNLREFVFKNIDGYFKIYSKHTPINLVRDLPQGFSALEPLVDLPIGINITRFQTLLALHRSYLTPGDSSSGWTAGAAAYYVGYLQPRTFLLKYNENGTITDAVDCALDPLSETKCTLKSFTVEKGIYQTSNFRVQPTESIVRFPNITNLCPFGEVFNATRFASVYAWNRKRISNCVADYSVLYNSASFSTFKCYGVSPTKLNDLCFTNVYADSFVIRGDEVRQIAPGQTGKIADYNYKLPDDFTGCVIAWNSNNLDSKVGGNYNYLYRLFRKSNLKPFERDISTEIYQAGSTPCNGVEGFNCYFPLQSYGFQPTNGVGYQPYRVVVLSFELLHAPATVCGPKKSTNLVKNKCVNFNFNGLTGTGVLTESNKKFLPFQQFGRDIADTTDAVRDPQTLEILDITPCSFGGVSVITPGTNTSNQVAVLYQGVNCTEVPVAIHADQLTPTWRVYSTGSNVFQTRAGCLIGAEHVNNSYECDIPIGAGICASYQTQTNSPRRARSVASQSIIAYTMSLGAENSVAYSNNSCAIPTNFTISVTTEILPVSMTKTSVDCTMYICGDSTECSNLLLQYGSFCTQLNRALTGIAVEQDKNTQEVFAQVKQIYKTPPIKDFGGFNFSQILPDPSKPSKRSFIEDLLFNKVTLADAGFIKQYGDCLGDIAARDLICAQKFNGLTVLPPLLTDEMIAQYTSALLAGTITSGWTFGAGAALQIPFAMQMAYRFNGIGVTQNVLYENQKLIANQFNSAIGKIQDSLSSTASALGKLQDVVNQNAQALNTLVKQLSSNFGAISSVLNDILSRLDKVEAEVQIDRLITGRLQSLQTYVTQQLIRAAEIRASANLAATKMSECVLGQSKRVDFCGKGYHLMSFPQSAPHGVVFLHVTYVPAQEKNFTCAPAICHDGKAHFPREGVFVSNGTHWFVTQRNFYEPQIITTDNTFVSGNCDVVIGVVNNTVYDPLQPELDSGGGGSDIDPYKEFGSSYQLLNFLPLDFFPDLNALVDTATALYEEELTGREHCSPHHTAIRQALVCWDELTKLIAWMSSNITSEQVRTIIVNHVNDTWGLKVRQSLWFHLSCLTFGQHTVQEFLVSFGVWIRTPAPYRPPNAPILSTLPEHTVIC

SEQ ID NO: 11023 - protein, 1301 aa, Artificial Sequence
  SARS-CoV-2/Netherlands/ZuidHolland_9/2020__EPI_ISL_414445 spike protein (1-1147)(I712C_T1077C) WhcAg construct
MFVFLVLLPLVSSQCVNLTTRTQLPPAYTNSFTRGVYYPDKVFRSSVLHSTQDLFLPFFSNVTWFHAIHVSGTNGTKRFDNPVLPFNDGVYFASTEKSNIIRGWIFGTTLDSKTQSLLIVNNATNVVIKVCEFQFCNDPFLGVYYHKNNKSWMESEFRVYSSANNCTFEYVSQPFLMDLEGKQGNFKNLREFVFKNIDGYFKIYSKHTPINLVRDLPQGFSALEPLVDLPIGINITRFQTLLALHRSYLTPGDSSSGWTAGAAAYYVGYLQPRTFLLKYNENGTITDAVDCALDPLSETKCTLKSFTVEKGIYQTSNFRVQPTESIVRFPNITNLCPFGEVFNATRFASVYAWNRKRISNCVADYSVLYNSASFSTFKCYGVSPTKLNDLCFTNVYADSFVIRGDEVRQIAPGQTGKIADYNYKLPDDFTGCVIAWNSNNLDSKVGGNYNYLYRLFRKSNLKPFERDISTEIYQAGSTPCNGVEGFNCYFPLQSYGFQPTNGVGYQPYRVVVLSFELLHAPATVCGPKKSTNLVKNKCVNFNFNGLTGTGVLTESNKKFLPFQQFGRDIADTTDAVRDPQTLEILDITPCSFGGVSVITPGTNTSNQVAVLYQGVNCTEVPVAIHADQLTPTWRVYSTGSNVFQTRAGCLIGAEHVNNSYECDIPIGAGICASYQTQTNSPRRARSVASQSIIAYTMSLGAENSVAYSNNSCAIPTNFTISVTTEILPVSMTKTSVDCTMYICGDSTECSNLLLQYGSFCTQLNRALTGIAVEQDKNTQEVFAQVKQIYKTPPIKDFGGFNFSQILPDPSKPSKRSFIEDLLFNKVTLADAGFIKQYGDCLGDIAARDLICVQKFNGLTVLPPLLTDEMIAQYTSALLAGTITSGWTFGAGAALQIPFAMQMAYRFNGIGVTQNVLYENQKLIANQFNSAIGKIQDSLSSTASALGKLQDVVNQNAQALNTLVKQLSSNFGAISSVLNDILSRLDKVEAEVQIDRLITGRLQSLQTYVTQQLIRAAEIRASANLAATKMSECVLGQSKRVDFCGKGYHLMSFPQSAPHGVVFLHVTYVPAQEKNFTCAPAICHDGKAHFPREGVFVSNGTHWFVTQRNFYEPQIITTDNTFVSGNCDVVIGIVNNTVYDPLQPELDSGGGGSDIDPYKEFGSSYQLLNFLPLDFFPDLNALVDTATALYEEELTGREHCSPHHTAIRQALVCWDELTKLIAWMSSNITSEQVRTIIVNHVNDTWGLKVRQSLWFHLSCLTFGQHTVQEFLVSFGVWIRTPAPYRPPNAPILSTLPEHTVIC

SEQ ID NO: 11024 - protein, 1301 aa, Artificial Sequence
  SARS-CoV-2/Finland/FIN03032020A/2020__EPI_ISL_413602 spike protein (1-1147)(I712C_T1077C) WhcAg construct
MFVFLVLLPLVSSQCVNLTTRTQLPPAYTNSFTRGVYYPDKVFRSSVLHSTQDLFLPFFSNVTWFHAIHVSGTNGTKRFDNPVLPFNDGVYFASTEKSNIIRGWIFGTTLDSKTQSLLIVNNATNVVIKVCEFQFCNDPFLGVYYHKNNKSWMESEFRVYSSANNCTFEYVSQPFLMDLEGKQGNFKNLREFVFKNIDGYFKIYSKHTPINLVRDLPQGFSALEPLVDLPIGINITRFQTLLALHRSYLTPGDSSSGWTAGAAAYYVGYLQPRTFLLKYNENGTITDAVDCALDPLSETKCTLKSFTVEKGIYQTSNFRVQPTESIVRFPNITNLCPFGEVFNATRFASVYAWNRKRISNCVADYSVLYNSASFSTFKCYGVSPTKLNDLCFTNVYADSFVIRGDEVRQIAPGQTGKIADYNYKLPDDFTGCVISWNSNNLDSKVGGNYNYLYRLFRKSNLKPFERDISTEIYQAGSTPCNGVEGFNCYFPLQSYGFQPTNGVGYQPYRVVVLSFELLHAPATVCGPKKSTNLVKNKCVNFNFNGLTGTGVLTESNKKFLPFQQFGRDIADTTDAVRDPQTLEILDITPCSFGGVSVITPGTNTSNQVAVLYQGVNCTEVPVAIHADQLTPTWRVYSTGSNVFQTRAGCLIGAEHVNNSYECDIPIGAGICASYQTQTNSPRRARSVASQSIIAYTMSLGAENSVAYSNNSCAIPTNFTISVTTEILPVSMTKTSVDCTMYICGDSTECSNLLLQYGSFCTQLNRALTGIAVEQDKNTQEVFAQVKQIYKTPPIKDFGGFNFSQILPDPSKPSKRSFIEDLLFNKVTLADAGFIKQYGDCLGDIAARDLICAQKFNGLTVLPPLLTDEMIAQYTSALLAGTITSGWTFGAGAALQIPFAMQMAYRFNGIGVTQNVLYENQKLIANQFNSAIGKIQDSLSSTASALGKLQDVVNQNAQALNTLVKQLSSNFGAISSVLNDILSRLDKVEAEVQIDRLITGRLQSLQTYVTQQLIRAAEIRASANLAATKMSECVLGQSKRVDFCGKGYHLMSFPQSAPHGVVFLHVTYVPAQEKNFTCAPAICHDGKAHFPREGVFVSNGTHWFVTQRNFYEPQIITTDNTFVSGNCDVVIGIVNNTVYDPLQPELDSGGGGSDIDPYKEFGSSYQLLNFLPLDFFPDLNALVDTATALYEEELTGREHCSPHHTAIRQALVCWDELTKLIAWMSSNITSEQVRTIIVNHVNDTWGLKVRQSLWFHLSCLTFGQHTVQEFLVSFGVWIRTPAPYRPPNAPILSTLPEHTVIC

SEQ ID NO: 11025 - protein, 1301 aa, Artificial Sequence
  SARS-CoV-2/France/GE1977/2020__EPI_ISL_414632 spike protein (1-1147)(I712C_T1077C) WhcAg construct
MFVFLVLLPLVSSQCVNLTTRTQLPPAYTNSFTRGVYYPDKVFRSSVLHSTQDLFLPFFSNVTWFHAIHVSGTNGTKRFDNPVLPFNDGVYFASTEKSNIIRGWIFGTTLDSKTQSLLIVNNATNVVIKVCEFQFCNDPFLGVYYHKNNKSWMESEFRVYSSANNCTFEYVSQPFLMDLEGKQGNFKNLREFVFKNIDGYFKIYSKHTPINLVRDLPQGFSALEPLVDLPIGINITRFQTLLALHRSYLTPGDSSSGWTAGAAAYYVGYLQPRTFLLKYNENGTITDAVDCALDPLSETKCTLKSFTVEKGIYQTSNFRVQPTESIVRFPNITNLCPFGEVFNATRFASVYAWNRKRISNCVADYSVLYNSASFSTFKCYGVSPTKLNDLCFTNVYADSFVIRGDEVRQIAPGQTGKIADYNYKLPDDFTGCVIAWNSNNLDSKVGGNYNYLYRLFRKSNLKPFERDISTEIYQAGSTPCNGVEGFNCYFPLQSYGFQPTNGVGYQPYRVVVLSFELLHAPATVCGPKKSTNLVKNKCVNFNFNGLTGTGVLTESNKKFLPFQQFGRDIADTTDAVRDPQTLEILDITPCSFGGVSVITPGTNTSNQVAVLYQGVNCTEVPVAIHADQLTPTWRVYSTGSNVFQTRAGCLIGAEHVNNSYECDIPIGAGICASYQTQTNSPRRARSVASQSIIAYTMSLGAENSVAYSNNSCAIPTNFTISVTTEILPVSMTKTSVDCTMYICGDSTECSNLLLQYGSFCTQLNRALTGIAVEQDKNTQEVFAQVKQIYKTPPIKDFGGFNFSQILPDPSKPSKRSFIEDLLFNKVTLADAGFIKQYGDCLGDIAARDLICAQKFNGLTVLPPLLTDEMIAQYTSALLAGTITSGWTFGAGAALQIPFAMQMAYRFNGIGVTQNVLYENQKLIANQFNSAIGKIQDSLFSTASALGKLQDVVNQNAQALNTLVKQLSSNFGAISSVLNDILSRLDKVEAEVQIDRLITGRLQSLQTYVTQQLIRAAEIRASANLAATKMSECVLGQSKRVDFCGKGYHLMSFPQSAPHGVVFLHVTYVPAQEKNFTCAPAICHDGKAHFPREGVFVSNGTHWFVTQRNFYEPQIITTDNTFVSGNCDVVIGIVNNTVYDPLQPELDSGGGGSDIDPYKEFGSSYQLLNFLPLDFFPDLNALVDTATALYEEELTGREHCSPHHTAIRQALVCWDELTKLIAWMSSNITSEQVRTIIVNHVNDTWGLKVRQSLWFHLSCLTFGQHTVQEFLVSFGVWIRTPAPYRPPNAPILSTLPEHTVIC

SEQ ID NO: 11026 - protein, 1301 aa, Artificial Sequence
  SARS-CoV-2/Finland/FIN-313/2020__EPI_ISL_414641 spike protein (1-1147)(I712C_T1077C) WhcAg construct
MFVFLVLLPLVSSQCVNLTTRTQLPPAYTNSFTRGVYYPDKVFRSSVLHSTQDLFLPFFSNVTWFHAIHVSGTNGTKRFDNPVLPFNDGVYFASTEKSNIIRGWIFGTTLDSKTQSLLIVNNATNVVIKVCEFQFCNDPFLGVYYHKNNKSWMESEFRVYSSANNCTFEYVSQPFLMDLEGKQGNFKNLREFVFKNIDGYFKIYSKHTPINLVRDLPQGFSALEPLVDLPIGINITRFKTLLALHRSYLTPGDSSSGWTAGAAAYYVGYLQPRTFLLKYNENGTITDAVDCALDPLSETKCTLKSFTVEKGIYQTSNFRVQPTESIVRFPNITNLCPFGEVFNATRFASVYAWNRKRISNCVADYSVLYNSASFSTFKCYGVSPTKLNDLCFTNVYADSFVIRGDEVRQIAPGQTGKIADYNYKLPDDFTGCVIAWNSNNLDSKVGGNYNYLYRLFRKSNLKPFERDISTEIYQAGSTPCNGVEGFNCYFPLQSYGFQPTNGVGYQPYRVVVLSFELLHAPATVCGPKKSTNLVKNKCVNFNFNGLTGTGVLTESNKKFLPFQQFGRDIADTTDAVRDPQTLEILDITPCSFGGVSVITPGTNTSNQVAVLYQGVNCTEVPVAIHADQLTPTWRVYSTGSNVFQTRAGCLIGAEHVNNSYECDIPIGAGICASYQTQTNSPRRARSVASQSIIAYTMSLGAENSVAYSNNSCAIPTNFTISVTTEILPVSMTKTSVDCTMYICGDSTECSNLLLQYGSFCTQLNRALTGIAVEQDKNTQEVFAQVKQIYKTPPIKDFGGFNFSQILPDPSKPSKRSFIEDLLFNKVTLADAGFIKQYGDCLGDIAARDLICAQKFNGLTVLPPLLTDEMIAQYTSALLAGTITSGWTFGAGAALQIPFAMQMAYRFNGIGVTQNVLYENQKLIANQFNSAIGKIQDSLSSTASALGKLQDVVNQNAQALNTLVKQLSSNFGAISSVLNDILSRLDKVEAEVQIDRLITGRLQSLQTYVTQQLIRAAEIRASANLAATKMSECVLGQSKRVDFCGKGYHLMSFPQSAPHGVVFLHVTYVPAQEKNFTCAPAICHDGKAHFPREGVFVSNGTHWFVTQRNFYEPQIITTDNTFVSGNCDVVIGIVNNTVYDPLQPELDSGGGGSDIDPYKEFGSSYQLLNFLPLDFFPDLNALVDTATALYEEELTGREHCSPHHTAIRQALVCWDELTKLIAWMSSNITSEQVRTIIVNHVNDTWGLKVRQSLWFHLSCLTFGQHTVQEFLVSFGVWIRTPAPYRPPNAPILSTLPEHTVIC

SEQ ID NO: 11027 - protein, 1301 aa, Artificial Sequence
  SARS-CoV-2/Netherlands/ZuidHolland_2/2020__EPI_ISL_414556 spike protein (1-1147)(I712C_T1077C) WhcAg construct
MFVFLVLLPLVSSQCVNLTTRTQLPPAYTNSFTRGVYYPDKVFRSSVLHSTQDLFLPFFSNVTWFHAIHVSGTNGTKRFDNPVLPFNDGVYFASTEKSNIIRGWIFGTTLDSKTQSLLIVNNATNVVIKVCEFQFCNDPFLGVYYHKNNKSWMESEFRVYSSANNCTFEYVSQPFLMDLEGKQGNFKNLREFVFKNIDGYFKIYSKHTPINLVRDLPQGFSALEPLVDLPIGINITRFQTLLALHRSYLTPGDSSSGWTAGAAAYYVGYLQPRTFLLKYNENGTITDAVDCALDPLSETKCTLKSFTVEKGIYQTSNFRVQPTESIVRFPNITNLCPFGEVFNATRFASVYAWNRKRISNCVADYSVLYNSASFSTFKCYGVSPTKLNDLCFTNVYADSFVIRGDEVRQIAPGQTGKIADYNYKLPDDFTGCVIAWNSNNLDSKVGGNYNYLYRLFRKSNLKPFERDISTEIYQAGSTPCNGVEGFNCYFPLQSYGFQPTNGVGYQPYRVVVLSFELLHAPATVCGPKKSTNLVKNKCVNFNFNGLTGTGVLTESNKKFLPFQQFGRDIADTTDAVRDPQTLEILDITPCSFGGVSVITPGTNTSNQVAVLYQGVNCTEVPVAIHADQLTPTWRVYSTGSNVFQTRAGCLIGAEHVNNSYECDIPIGAGICASYQTQTNSPRRARSVASQSIIAYTMSLGAENSVAYSNNSCAIPTNFTISVTTEILPVSMTKTSVDCTMYICGDSTECSNLLLQYGSFCTQLNRALTGIALEQDKNTQEVFAQVKQIYKTPPIKDFGGFNFSQILPDPSKPSKRSFIEDLLFNKVTLADAGFIKQYGDCLGDIAARDLICAQKFNGLTVLPPLLTDEMIAQYTSALLAGTITSGWTFGAGAALQIPFAMQMAYRFNGIGVTQNVLYENQKLIANQFNSAIGKIQDSLSSTASALGKLQDVVNQNAQALNTLVKQLSSNFGAISSVLNDILSRLDKVEAEVQIDRLITGRLQSLQTYVTQQLIRAAEIRASANLAATKMSECVLGQSKRVDFCGKGYHLMSFPQSAPHGVVFLHVTYVPAQEKNFTCAPAICHDGKAHFPREGVFVSNGTHWFVTQRNFYEPQIITTDNTFVSGNCDVVIGIVNNTVYDPLQPELDSGGGGSDIDPYKEFGSSYQLLNFLPLDFFPDLNALVDTATALYEEELTGREHCSPHHTAIRQALVCWDELTKLIAWMSSNITSEQVRTIIVNHVNDTWGLKVRQSLWFHLSCLTFGQHTVQEFLVSFGVWIRTPAPYRPPNAPILSTLPEHTVIC

SEQ ID NO: 11028 - protein, 1301 aa, Artificial Sequence
  SARS-CoV-2/USA/WA-UW31/2020__EPI_ISL_414618 spike protein (1-1147)(I712C_T1077C) WhcAg construct
MFVFLVLLPLVSSQCVNLTTRTQLPPAYTNSFTRGVYYPDKVFRSSVLHSTQDLFLPFFSNVTWFHAIHVSGTNGTKRFDNPVLPFNDGVYFASTEKSNIIRGWIFGTTLDSKTQSLLIVNNATNVVIKVCEFQFCNDPFLGVYYHKNNKSWMESEFRVYSSANNCTFEYVSQPFLMDLEGKQGNFKNLREFVFKNIDGYFKIYSKHTPINLVRDLPQGFSALEPLVDLPIGINITRFQTLLALHRSYLTPGDSSSGWTAGAAAYYVGYLQPRTFLLKYNENGTITDAVDCALDPLSETKCTLKSFTVEKGIYQTSNFRVQPTESIVRFPNITNLCPFGEVFNATRFASVYAWNRKRISNCVADYSVLYNSASFSTFKCYGVSPTKLNDLCFTNVYADSFVIRGDEVRQIAPGQTGKIADYNYKLPDDFTGCVIAWNSNNLDSKVGGNYNYLYRLFRKSNLKPFERDISTEIYQAGSTPCNGAEGFNCYFPLQSYGFQPTNGVGYQPYRVVVLSFELLHAPATVCGPKKSTNLVKNKCVNFNFNGLTGTGVLTESNKKFLPFQQFGRDIADTTDAVRDPQTLEILDITPCSFGGVSVITPGTNTSNQVAVLYQDVNCTEVPVAIHADQLTPTWRVYSTGSNVFQTRAGCLIGAEHVNNSYECDIPIGAGICASYQTQTNSPRRARSVASQSIIAYTMSLGAENSVAYSNNSCAIPTNFTISVTTEILPVSMTKTSVDCTMYICGDSTECSNLLLQYGSFCTQLNRALTGIAVEQDKNTQEVFAQVKQIYKTPPIKDFGGFNFSQILPDPSKPSKRSFIEDLLFNKVTLADAGFIKQYGDCLGDIAARDLICAQKFNGLTVLPPLLTDEMIAQYTSALLAGTITSGWTFGAGAALQIPFAMQMAYRFNGIGVTQNVLYENQKLIANQFNSAIGKIQDSLSSTASALGKLQDVVNQNAQALNTLVKQLSSNFGAISSVLNDILSRLDKVEAEVQIDRLITGRLQSLQTYVTQQLIRAAEIRASANLAATKMSECVLGQSKRVDFCGKGYHLMSFPQSAPHGVVFLHVTYVPAQEKNFTCAPAICHDGKAHFPREGVFVSNGTHWFVTQRNFYEPQIITTDNTFVSGNCDVVIGIVNNTVYDPLQPELDSGGGGSDIDPYKEFGSSYQLLNFLPLDFFPDLNALVDTATALYEEELTGREHCSPHHTAIRQALVCWDELTKLIAWMSSNITSEQVRTIIVNHVNDTWGLKVRQSLWFHLSCLTFGQHTVQEFLVSFGVWIRTPAPYRPPNAPILSTLPEHTVIC

SEQ ID NO: 11029 - protein, 1301 aa, Artificial Sequence
  SARS-CoV-2/South Korea/SNU01/2020__EPI_ISL_411929 spike protein (1-1147)(I712C_T1077C) WhcAg construct
MFVFLVLLPLVSSQCVNLTTRTQLPPAYTNSFTRGVYYPDKVFRSSVLHSTQDLFLPFFSNVTWFHAIHVSGTNGTKRFDNPVLPFNDGVYFASTEKSNIIRGWIFGTTLDSKTQSLLIVNNATNVVIKVCEFQFCNDPFLGVYYHKNNKSWMESEFRVYSSANNCTFEYVSQPFLMDLEGKQGNFKNLREFVFKNIDGYFKIYSKHTPINLVRDLPQGFWALEPLVDLPIGINITRFQTLLALHRSYLTPGDSSSGWTAGAAAYYVGYLQPRTFLLKYNENGTITDAVDCALDPLSETKCTLKSFTVEKGIYQTSNFRVQPTESIVRFPNITNLCPFGEVFNATRFASVYAWNRKRISNCVADYSVLYNSASFSTFKCYGVSPTKLNDLCFTNVYADSFVIRGDEVRQIAPGQTGKIADYNYKLPDDFTGCVIAWNSNNLDSKVGGNYNYLYRLFRKSNLKPFERDISTEIYQAGSTPCNGVEGFNCYFPLQSYGFQPTNGVGYQPYRVVVLSFELLHAPATVCGPKKSTNLVKNKCVNFNFNGLTGTGVLTESNKKFLPFQQFGRDIADTTDAVRDPQTLEILDITPCSFGGVSVITPGTNTSNQVAVLYQDVNCTEVPVAIHADQLTPTWRVYSTGSNVFQTRAGCLIGAEHVNNSYECDIPIGAGICASYQTQTNSPRRARSVASQSIIAYTMSLGAENSVAYSNNSCAIPTNFTISVTTEILPVSMTKTSVDCTMYICGDSTECSNLLLQYGSFCTQLNRALTGIAVEQDKNTQEVFAQVKQIYKTPPIKDFGGFNFSQILPDPSKPSKRSFIEDLLFNKVTLADAGFIKQYGDCLGDIAARDLICAQKFNGLTVLPPLLTDEMIAQYTSALLAGTITSGWTFGAGAALQIPFAMQMAYRFNGIGVTQNVLYENQKLIANQFNSAIGKIQDSLSSTASALGKLQDVVNQNAQALNTLVKQLSSNFGAISSVLNDILSRLDKVEAEVQIDRLITGRLQSLQTYVTQQLIRAAEIRASANLAATKMSECVLGQSKRVDFCGKGYHLMSFPQSAPHGVVFLHVTYVPAQEKNFTCAPAICHDGKAHFPREGVFVSNGTHWFVTQRNFYEPQIITTDNTFVSGNCDVVIGIVNNTVYDPLQPELDSGGGGSDIDPYKEFGSSYQLLNFLPLDFFPDLNALVDTATALYEEELTGREHCSPHHTAIRQALVCWDELTKLIAWMSSNITSEQVRTIIVNHVNDTWGLKVRQSLWFHLSCLTFGQHTVQEFLVSFGVWIRTPAPYRPPNAPILSTLPEHTVIC

SEQ ID NO: 11030 - protein, 1301 aa, Artificial Sequence
  SARS-CoV-2/China/WF0004/2020__EPI_ISL_413694 spike protein (1-1147)(I712C_T1077C) WhcAg construct
MFVFLVLLPLVSSQCVNLTTRTQLPPAYTNSFTRGVYYPDKVFRSSVLHSTQDLFLPFFSNVTWFHAIHVSGTNGTKRFDNPVLPFNDGVYFASTEKSNIIRGWIFGTTLDSKTQSLLIVNNATNVVIKVCEFQFCNDPFLGVYYHKNNKSWTESEFRVYSSANNCTFEYVSQPFLMDLEGKQGNFKNLREFVFKNIDGYFKIYSKHTPINLVRDLPQGFSALEPLVDLPIGINITRFQTLLALHRSYLTPGDSSSGWTAGAAAYYVGYLQPRTFLLKYNENGTITDAVDCALDPLSETKCTLKSFTVEKGIYQTSNFRVQPTESIVRFPNITNLCPFGEVFNATRFASVYAWNRKRISNCVADYSVLYNSASFSTFKCYGVSPTKLNDLCFTNVYADSFVIRGDEVRQIAPGQTGKIADYNYKLPDDFTGCVIAWNSNNLDSKVGGNYNYLYRLFRKSNLKPFERDISTEIYQAGSTPCNGVEGFNCYFPLQSYGFQPTNGVGYQPYRVVVLSFELLHAPATVCGPKKSTNLVKNKCVNFNFNGLTGTGVLTESNKKFLPFQQFGRDIADTTDAVRDPQTLEILDITPCSFGGVSVITPGTNTSNQVAVLYQDVNCTEVPVAIHADQLTPTWRVYSTGSNVFQTRAGCLIGAEHVNNSYECDIPIGAGICASYQTQTNSPRRARSVASQSIIAYTMSLGAENSVAYSNNSCAIPTNFTISVTTEILPVSMTKTSVDCTMYICGDSTECSNLLLQYGSFCTQLNRALTGIAVEQDKNTQEVFAQVKQIYKTPPIKDFGGFNFSQILPDPSKPSKRSFIEDLLFNKVTLADAGFIKQYGDCLGDIAARDLICAQKFNGLTVLPPLLTDEMIAQYTSALLAGTITSGWTFGAGAALQIPFAMQMAYRFNGIGVTQNVLYENQKLIANQFNSAIGKIQDSLSSTASALGKLQDVVNQNAQALNTLVKQLSSNFGAISSVLNDILSRLDKVEAEVQIDRLITGRLQSLQTYVTQQLIRAAEIRASANLAATKMSECVLGQSKRFDFCGKGYHLMSFPQSAPHGVVFLHVTYVPAQEKNFTCAPAICHDGKAHFPREGVFVSNGTHWFVTQRNFYEPQIITTDNTFVSGNCDVVIGIVNNTVYDPLQPELDSGGGGSDIDPYKEFGSSYQLLNFLPLDFFPDLNALVDTATALYEEELTGREHCSPHHTAIRQALVCWDELTKLIAWMSSNITSEQVRTIIVNHVNDTWGLKVRQSLWFHLSCLTFGQHTVQEFLVSFGVWIRTPAPYRPPNAPILSTLPEHTVIC

SEQ ID NO: 11031 - protein, 1301 aa, Artificial Sequence
  SARS-CoV-2/China/WF0028/2020__EPI_ISL_413791 spike protein (1-1147)(I712C_T1077C) WhcAg construct
MFVFLVLLPLVSSQCVNLTTRTQLPPAYTNSFTRGVYYPDKVFRSSVLHSTQDLFLPFFSNVTWFHAIHVSGTNGTKRFDNPVLPFNDGVYFASTEKSNIIRGWIFGTTLDSKTQSLLIVNNATNVVIKVCEFQFCNDPFLGVYYHKNNKSWMESEFRVYSSANNCTFEYVSQPFLMDLEGKQGNFKNLREFVFKNIDGYFKIYSKHTPINLVRDLPQGFSALEPLVDLPIGINITRFQTLLALHRSYLTPGDSSSGWTAGAAAYYVGYLQPRTFLLKYNENGTITDAVDCALDPLSETKCTLKSFTVEKGIYQTSNFRVQPTESIVRFPNITNLCPFGEVFNATRFASVYAWNRKRISNCVADYSVLYNSASFSTFKCYGVSPTKLNDLCFTNVYADSFVIRGDEVRQIAPGQTGKIADYNYKLPDDFTGCVIAWNSNNLDSKVGGNYNYLYRLFRKSNLKPFERDISTEIYQAGSTPCNGVEGFNCYFPLQSYGFQPTNGVGYQPYRVVVLSFELLHAPATVCGPKKSTNLVKNKCVNFNFNGLTGTGVLTESNKKFLPFQQFGRDIADTTDAVRDPQTLEILDITPCSFGGVSVITPGTNTSNQVAVLYQDVNCTEVPVAIHADQLTPTWRVYSTGSNVFQTRAGCLIGAEHVNNSYECDIPIGAGICASYQTQTNSPRRARSVASQSIIAYTMSLGAENSVAYSNNSCAIPTNFTISVTTEILPVSMTKTSVDCTMYICGDSTECSNLLLQYGSFCTQLNRALTGIAVEQDKNTQEVFAQVKQIYKTPPIKDFGGFNFSQILPDPSKPSKRSFIEDLLFNKVTLADAGFIKQYGDCLGDIAARDLICAQKFNGLTVLPPLLTDEMIAQYTSALLAGTITSGWTFGAGAALQIPFAMQMAYRFNGIGVTQNVLYENQKLIANQFNSAIGKIQDSLSSTASALGKLQDVVNQNAQALNTLVKQLSSNFGAISSVLNDILSRLDKVEAEVQIDRLITGRLQSLQTYVTQQLIRAAEIRASANLAATKMSECVLGQSKRVDFCGKGYHLMSFPQSAPHGVVFLHVTYVPAQEKNFTCAPAICHDGKAHFPREGVFVSNGTHWFVTQRNFYEPQIITTDNTFVSGNCDVVIGIVNNTVYDPLQPELESGGGGSDIDPYKEFGSSYQLLNFLPLDFFPDLNALVDTATALYEEELTGREHCSPHHTAIRQALVCWDELTKLIAWMSSNITSEQVRTIIVNHVNDTWGLKVRQSLWFHLSCLTFGQHTVQEFLVSFGVWIRTPAPYRPPNAPILSTLPEHTVIC

SEQ ID NO: 11032 - protein, 1301 aa, Artificial Sequence
  SARS-CoV-2/2019-nCoV/USA-CruiseA-18/2020__MT159716.1 spike protein (1-1147)(I712C_T1077C) WhcAg construct
MFVFLVLLPLVSSQCVNLTTRTQLPPAYTNSFTRGVYYPDKVFRSSVLHSTQDLFLPFFSNVTWFHAIHVSGTNGTKRFDNPVLPFNDGVYFASTEKSNIIRGWIFGTTLDSKTQSLLIVNNATNVVIKVCEFQFCNDPFLGVYYHKNNKSWMESELRVYSSANNCTFEYVSQPFLMDLEGKQGNFKNLREFVFKNIDGYFKIYSKHTPINLVRDLPQGFSALEPLVDLPIGINITRFQTLLALHRSYLTPGDSSSGWTAGAAAYYVGYLQPRTFLLKYNENGTITDAVDCALDPLSETKCTLKSFTVEKGIYQTSNFRVQPTESIVRFPNITNLCPFGEVFNATRFASVYAWNRKRISNCVADYSVLYNSASFSTFKCYGVSPTKLNDLCFTNVYADSFVIRGDEVRQIAPGQTGKIADYNYKLPDDFTGCVIAWNSNNLDSKVGGNYNYLYRLFRKSNLKPFERDISTEIYQAGSTPCNGVEGFNCYFPLQSYGFQPTNGVGYQPYRVVVLSFELLHAPATVCGPKKSTNLVKNKCVNFNFNGLTGTGVLTESNKKFLPFQQFGRDIADTTDAVRDPQTLEILDITPCSFGGVSVITPGTNTSNQVAVLYQDVNCTEVPVAIHADQLTPTWRVYSTGSNVFQTRAGCLIGAEHVNNSYECDIPIGAGICASYQTQTNSPRRARSVASQSIIAYTMSLGAENSVAYSNNSCAIPTNFTISVTTEILPVSMTKTSVDCTMYICGDSTECSNLLLQYGSFCTQLNRALTGIAVEQDKNTQEVFAQVKQIYKTPPIKDFGGFNFSQILPDPSKPSKRSFIEDLLFNKVTLADAGFIKQYGDCLGDIAARDLICAQKFNGLTVLPPLLTDEMIAQYTSALLAGTITSGWTFGAGAALQIPFAMQMAYRFNGIGVTQNVLYENQKLIANQFNSAIGKIQDSLSSTASALGKLQDVVNQNAQALNTLVKQLSSNFGAISSVLNDILSRLDKVEAEVQIDRLITGRLQSLQTYVTQQLIRAAEIRASANLAATKMSECVLGQSKRVDFCGKGYHLMSFPQSAPHGVVFLHVTYVPAQEKNFTCAPAICHDGKAHFPREGVFVSNGTHWFVTQRNFYEPQIITTDNTFVSGNCDVVIGIVNNTVYDPLQPELDSGGGGSDIDPYKEFGSSYQLLNFLPLDFFPDLNALVDTATALYEEELTGREHCSPHHTAIRQALVCWDELTKLIAWMSSNITSEQVRTIIVNHVNDTWGLKVRQSLWFHLSCLTFGQHTVQEFLVSFGVWIRTPAPYRPPNAPILSTLPEHTVIC

SEQ ID NO: 11033 - protein, 1301 aa, Artificial Sequence
  SARS-CoV-2/SARS-CoV-2/Yunnan-01/human/2020/CHN__MT049951.1 spike protein (1-1147)(I712C_T1077C) WhcAg construct
MFVFLVLLPLVSSQCVNLTTRTQLPPANTNSFTRGVYYPDKVFRSSVLHSTQDLFLPFFSNVTWFHAIHVSGTNGTKRFDNPVLPFNDGVYFASTEKSNIIRGWIFGTTLDSKTQSLLIVNNATNVVIKVCEFQFCNDPFLGVYYHKNNKSWMESEFRVYSSANNCTFEYVSQPFLMDLEGKQGNFKNLREFVFKNIDGYFKIYSKHTPINLVRDLPQGFSALEPLVDLPIGINITRFQTLLALHRSYLTPGDSSSGWTAGAAAYYVGYLQPRTFLLKYNENGTITDAVDCALDPLSETKCTLKSFTVEKGIYQTSNFRVQPTESIVRFPNITNLCPFGEVFNATRFASVYAWNRKRISNCVADYSVLYNSASFSTFKCYGVSPTKLNDLCFTNVYADSFVIRGDEVRQIAPGQTGKIADYNYKLPDDFTGCVIAWNSNNLDSKVGGNYNYLYRLFRKSNLKPFERDISTEIYQAGSTPCNGVEGFNCYFPLQSYGFQPTNGVGYQPYRVVVLSFELLHAPATVCGPKKSTNLVKNKCVNFNFNGLTGTGVLTESNKKFLPFQQFGRDIADTTDAVRDPQTLEILDITPCSFGGVSVITPGTNTSNQVAVLYQDVNCTEVPVAIHADQLTPTWRVYSTGSNVFQTRAGCLIGAEHVNNSYECDIPIGAGICASYQTQTNSPRRARSVASQSIIAYTMSLGAENSVAYSNNSCAIPTNFTISVTTEILPVSMTKTSVDCTMYICGDSTECSNLLLQYGSFCTQLNRALTGIAVEQDKNTQEVFAQVKQIYKTPPIKDFGGFNFSQILPDPSKPSKRSFIEDLLFNKVTLADAGFIKQYGDCLGDIAARDLICAQKFNGLTVLPPLLTDEMIAQYTSALLAGTITSGWTFGAGAALQIPFAMQMAYRFNGIGVTQNVLYENQKLIANQFNSAIGKIQDSLSSTASALGKLQDVVNQNAQALNTLVKQLSSNFGAISSVLNDILSRLDKVEAEVQIDRLITGRLQSLQTYVTQQLIRAAEIRASANLAATKMSECVLGQSKRVDFCGKGYHLMSFPQSAPHGVVFLHVTYVPAQEKNFTCAPAICHDGKAHFPREGVFVSNGTHWFVTQRNFYEPQIITTDNTFVSGNCDVVIGIVNNTVYDPLQPELDSGGGGSDIDPYKEFGSSYQLLNFLPLDFFPDLNALVDTATALYEEELTGREHCSPHHTAIRQALVCWDELTKLIAWMSSNITSEQVRTIIVNHVNDTWGLKVRQSLWFHLSCLTFGQHTVQEFLVSFGVWIRTPAPYRPPNAPILSTLPEHTVIC

SEQ ID NO: 11034 - protein, 1301 aa, Artificial Sequence
  SARS-CoV-2/USA/WA-UW292/2020__EPI_ISL_418077 spike protein (1-1147)(I712C_T1077C) WhcAg construct
MFVFLVLLPLVSSQCVNLTTRTQLPPAYTNSFTRGVYYPDKVFRSSVLHSTQDLFLPFFSNVTWFHAIHVSGTNGTKRFDNPVLPFNDGVYFASTEKSNIIRGWIFGTTLDSKTQSLLIVNNATNVVIKVCEFQFCNDPFLGVYYHKNNKSWMESEFRVYSSANNCTFEYVSQPFLMDLEGKQGNFKNLREFVFKNIDGYFKIYSKHTPINLVRDLPQGFSALEPLVDLPIGINITRFQTLLALHRSYLTPGDSSSGWTAGAAAYYVGYLQPRTFLLKYNENGTITDAVDCALDPLSETKCTLKSFTVEKGIYQTSNFRVQPTESIVRFPNITNLCPFGEVFNATRFASVYAWNRKRISNCVADYSVLYNSASFSTFKCYGVSPTKLNDLCFTNVYADSFVIRGDEVRQIAPGQTGKIADYNYKLPDDFTGCVIAWNSNNLDSKVGGNYNYLYRLFRKSNLKPFERDISTEIYQASSTPCNGVEGFNCYFPLQSYGFQPTNGVGYQPYRVVVLSFELLHAPATVCGPKKSTNLVKNKCVNFNFNGLTGTGVLTESNKKFLPFQQFGRDIADTTDAVRDPQTLEILDITPCSFGGVSVITPGTNTSNQVAVLYQDVNCTEVPVAIHADQLTPTWRVYSTGSNVFQTRAGCLIGAEHVNNSYECDIPIGAGICASYQTQTNSPRRARSVASQSIIAYTMSLGAENSVAYSNNSCAIPTNFTISVTTEILPVSMTKTSVDCTMYICGDSTECSNLLLQYGSFCTQLNRALTGIAVEQDKNTQEVFAQVKQIYKTPPIKDFGGFNFSQILPDPSKPSKRSFIEDLLFNKVTLADAGFIKQYGDCLGDIAARDLICAQKFNGLTVLPPLLTDEMIAQYTSALLAGTITSGWTFGAGAALQIPFAMQMAYRFNGIGVTQNVLYENQKLIANQFNSAIGKIQDSLSSTASALGKLQDVVNQNAQALNTLVKQLSSNFGAISSVLNDILSRLDKVEAEVQIDRLITGRLQSLQTYVTQQLIRAAEIRASANLAATKMSECVLGQSKRVDFCGKGYHLMSFPQSAPHGVVFLHVTYVPAQEKNFTCAPAICHDGKAHFPREGVFVSNGTHWFVTQRNFYEPQIITTDNTFVSGNCDVVIGIVNNTVYDPLQPELDSGGGGSDIDPYKEFGSSYQLLNFLPLDFFPDLNALVDTATALYEEELTGREHCSPHHTAIRQALVCWDELTKLIAWMSSNITSEQVRTIIVNHVNDTWGLKVRQSLWFHLSCLTFGQHTVQEFLVSFGVWIRTPAPYRPPNAPILSTLPEHTVIC

SEQ ID NO: 11035 - protein, 1301 aa, Artificial Sequence
  SARS-CoV-2/Iceland/192/2020__EPI_ISL_417819 spike protein (1-1147)(I712C_T1077C) WhcAg construct
MFVFFVLLPLVSSQCVNLTTRTQLPPAYTNSFTRGVYYPDKVFRSSVLHSTQDLFLPFFSNVTWFHAIHVSGTNGTKRFDNPVLPFNDGVYFASTEKSNIIRGWIFGTTLDSKTQSLLIVNNATNVVIKVCEFQFCNDPFLGVYYHKNNKSWMESEFRVYSSANNCTFEYVSQPFLMDLEGKQGNFKNLREFVFKNIDGYFKIYSKHTPINLVRDLPQGFSALEPLVDLPIGINITRFQTLLALHRSYLTPGDSSSGWTAGAAAYYVGYLQPRTFLLKYNENGTITDAVDCALDPLSETKCTLKSFTVEKGIYQTSNFRVQPTESIVRFPNITNLCPFGEVFNATRFASVYAWNRKRISNCVADYSVLYNSASFSTFKCYGVSPTKLNDLCFTNVYADSFVIRGDEVRQIAPGQTGKIADYNYKLPDDFTGCVIAWNSNNLDSKVGGNYNYLYRLFRKSNLKPFERDISTEIYQAGSTPCNGVEGFNCYFPLQSYGFQPTNGVGYQPYRVVVLSFELLHAPATVCGPKKSTNLVKNKCVNFNFNGLTGTGVLTESNKKFLPFQQFGRDIADTTDAVRDPQTLEILDITPCSFGGVSVITPGTNTSNQVAVLYQGVNCTEVPVAIHADQLTPTWRVYSTGSNVFQTRAGCLIGAEHVNNSYECDIPIGAGICASYQTQTNSPRRARSVASQSIIAYTMSLGAENSVAYSNNSCAIPTNFTISVTTEILPVSMTKTSVDCTMYICGDSTECSNLLLQYGSFCTQLNRALTGIAVEQDKNTQEVFAQVKQIYKTPPIKDFGGFNFSQILPDPSKPSKRSFIEDLLFNKVTLADAGFIKQYGDCLGDIAARDLICAQKFNGLTVLPPLLTDEMIAQYTSALLAGTITSGWTFGAGAALQIPFAMQMAYRFNGIGVTQNVLYENQKLIANQFNSAIGKIQDSLSSTASALGKLQDVVNQNAQALNTLVKQLSSNFGAISSVLNDILSRLDKVEAEVQIDRLITGRLQSLQTYVTQQLIRAAEIRASANLAATKMSECVLGQSKRVDFCGKGYHLMSFPQSAPHGVVFLHVTYVPAQEKNFTCAPAICHDGKAHFPREGVFVSNGTHWFVTQRNFYEPQIITTDNTFVSGNCDVVIGIVNNTVYDPLQPELDSGGGGSDIDPYKEFGSSYQLLNFLPLDFFPDLNALVDTATALYEEELTGREHCSPHHTAIRQALVCWDELTKLIAWMSSNITSEQVRTIIVNHVNDTWGLKVRQSLWFHLSCLTFGQHTVQEFLVSFGVWIRTPAPYRPPNAPILSTLPEHTVIC

SEQ ID NO: 11036 - protein, 1301 aa, Artificial Sequence
  SARS-CoV-2/Belgium/ULG-6939/2020__EPI_ISL_417020 spike protein (1-1147)(I712C_T1077C) WhcAg construct
MFVFLVLLPLVSSQCVNLTTRTQLPPAYTNSFTRGVYYPDKVFRSSVLHSTQDLFLPFFSNVTWFHAIHVSGTNGTKRFDNPVLPFNDGVYFASTEKSNIIRGWIFGTTLDSKTQSLLIVNNATNVVIKVCEFQFCNDPFLGVYYHKNNKSWMESEFRVYSSANNCTFEYVSQPFLMDLEGKQGNFKNLREFVFKNIDGYFKIYSKHTPINLVRDLPQGFSALEPLVDLPIGINITRFQTLLALHRSYLTPGDSSSGWTAGAAAYYVGYLQPRTFLLKYNENGTITDAVDCALDPLSETKCTLKSFTVEKGIYQTSNFRVQPTESIVRFPNITNLCPFGEVFNATRFASVYAWNRKRISNCVADYSVLYNSASFSTFKCYGVSPTKLNDLCFTNVYADSFVIRGDEVRQIAPGQTGKIADYNYKLPDDFTGCVIAWNSNNLDSKVGGNYNYLYRLFRKSNLKPFERDISTEIYQAGSTPCNGVEGFNCYFPLQSYGFQPTNGVGYQPYRVVVLSFELLHAPATVCGPKKSTNLVKNKCVNFNFNGLTGTGVLTESNKKFLPFQQFGRDIADTTDAVRDPQTLEILDITPCSFGGVSVITPGTNTSNQVAVLYQGVNCTEVPVAIHADQLTPTWRVYSTGSNVFQTRAGCLIGAEHVNNSYECDIPIGAGICASYQTQTNSPRRARSVASQSIIAYTMSLGAENSVVYSNNSCAIPTNFTISVTTEILPVSMTKTSVDCTMYICGDSTECSNLLLQYGSFCTQLNRALTGIAVEQDKNTQEVFAQVKQIYKTPPIKDFGGFNFSQILPDPSKPSKRSFIEDLLFNKVTLADAGFIKQYGDCLGDIAARDLICAQKFNGLTVLPPLLTDEMIAQYTSALLAGTITSGWTFGAGAALQIPFAMQMAYRFNGIGVTQNVLYENQKLIANQFNSAIGKIQDSLSSTASALGKLQDVVNQNAQALNTLVKQLSSNFGAISSVLNDILSRLDKVEAEVQIDRLITGRLQSLQTYVTQQLIRAAEIRASANLAATKMSECVLGQSKRVDFCGKGYHLMSFPQSAPHGVVFLHVTYVPAQEKNFTCAPAICHDGKAHFPREGVFVSNGTHWFVTQRNFYEPQIITTDNTFVSGNCDVVIGIVNNTVYDPLQPELDSGGGGSDIDPYKEFGSSYQLLNFLPLDFFPDLNALVDTATALYEEELTGREHCSPHHTAIRQALVCWDELTKLIAWMSSNITSEQVRTIIVNHVNDTWGLKVRQSLWFHLSCLTFGQHTVQEFLVSFGVWIRTPAPYRPPNAPILSTLPEHTVIC

SEQ ID NO: 11037 - protein, 1301 aa, Artificial Sequence
  SARS-CoV-2/France/HF2496/2020__EPI_ISL_418231 spike protein (1-1147)(I712C_T1077C) WhcAg construct
MFVFLVLLPLVSSQCVNLTTRTQLPPAYTNSFTRGVYYPDKVFRSSVLHSTQDLFLPFFSNVTWFHAIHVSGTNGTKRFDNPVLPFNDGVYFASTEKSNIIRGWIFGTTLDSKTQSLLIVNNATNVVIKVCEFQFCNDPFLGVYYHKNNKSWMESEFRVYSSANNCTFEYVSQPFLMDLEGKQGNFKNLREFVFKNIDGYFKIYSKHTPINLVRDLPQGFSALEPLVDLPIGINITRFQTLLALHRSYLTPGDSSSGWTAGAAAYYVGYLQPRTFLLKYNENGTITDAVDCALDPLSETKCTLKSFTVEKGIYQTSNFRVQPTESIVRFPNITNLCPFGEVFNATRFASVYAWNRKRISNCVADYSVLYNSASFSTFKCYGVSPTKLNDLCFTNVYADSFVIRGDEVRQIAPGQTGKIADYNYKLPDDFTGCVIAWNSNNLDSKVGGNYNYLYRLFRKSNLKPFERDISTEIYQAGSTPCNGVEGFNCYFPLQSYGFQPTNGVGYQPYRVVVLSFELLHAPATVCGPKKSTNLVKNKCVNFNFNGLTGTGVLTESNKKFLPFQQFGRDIADTTDAVRDPQTLEILDITPCSFGGVSVITPGTNTSNQVAVLYQGVNCTEVPVAIHADQLTPTWRVYSTGSNVFQTRAGCLIGAEHVNNSYECDIPIGAGICASYQTQTNSPRRARSVASQSIIAYTMSLGAENSVAYSNNSCAIPTNFTISVTTEILPVSMTKTSVDCTMYICGDSTECSNLLLQYGSFCTQLNRALTGIAVEQDKNTQEVFAQVKQIYKTPPIKDFGGFNFSQILPDPSKPSKRSFIEDLLFNKVTLADAGFIKQYGDCLGDIVARDLICAQKFNGLTVLPPLLTDEMIAQYTSALLAGTITSGWTFGAGAALQIPFAMQMAYRFNGIGVTQNVLYENQKLIANQFNSAIGKIQDSLSSTASALGKLQDVVNQNAQALNTLVKQLSSNFGAISSVLNDILSRLDKVEAEVQIDRLITGRLQSLQTYVTQQLIRAAEIRASANLAATKMSECVLGQSKRVDFCGKGYHLMSFPQSAPHGVVFLHVTYVPAQEKNFTCAPAICHDGKAHFPREGVFVSNGTHWFVTQRNFYEPQIITTDNTFVSGNCDVVIGIVNNTVYDPLQPELDSGGGGSDIDPYKEFGSSYQLLNFLPLDFFPDLNALVDTATALYEEELTGREHCSPHHTAIRQALVCWDELTKLIAWMSSNITSEQVRTIIVNHVNDTWGLKVRQSLWFHLSCLTFGQHTVQEFLVSFGVWIRTPAPYRPPNAPILSTLPEHTVIC

SEQ ID NO: 11038 - protein, 1301 aa, Artificial Sequence
  SARS-CoV-2/USA/WA-UW291/2020__EPI_ISL_418076 spike protein (1-1147)(I712C_T1077C) WhcAg construct
MFVFLVLLPLVSSQCVNLTTRTQLPPAYTNSFTRGVYYPDKVFRSSVLHSTQDLFLPFFSNVTWFHAIHVSGTNGTKRFDNPVLPFNDGVYFASTEKSNIIRGWIFGTTLDSKTQSLLIVNNATNVVIKVCEFQFCNDPFLGVYYHKNNKSWMESEFRVYSSANNCTFEYVSQPFLMDLEGKQGNFKNLREFVFKNIDGYFKIYSKHTPINLVRDLPQGFSALEPLVDLPIGINITRFQTLLALHRSYLTPGDSSSGWTAGAAAYYVGYLQPRTFLLKYNENGTITDAVDCALDPLSETKCTLKSFTVEKGIYQTSNFRVQPTESIVRFPNITNLCPFGEVFNATRFASVYAWNRKRISNCVADYSVLYNSASFSTFKCYGVSPTKLNDLCFTNVYADSFVIRGDEVRQIAPGQTGKIADYNYKLPDDFTGCVIAWNSNNLDSKVGGNYNYLYRLFRKSNLKPFERDISTEIYQAGSTPCNGVEGFNCYFPLQSYGFQPTNGVGYQPYRVVVLSFELLHAPATVCGPKKSTNLVKNKCVNFNFNGLTGTGVLTESNKKFLPFQQFGRDIADTTDAVRDPQTLEILDITPCSFGGVSVITPGTNTSNQVAVLYQGVNCTEVPVAIHADQLTPTWRVYSTGSNVFQTRAGCLIGAEHVNNSYECDIPIGAGICASYQTQTNSPRRARSVASQSIIAYTMSLGAENSVAYSNNSCAIPTNFTISVTTEILPVSMTKTSVDCTMYICGDSTECSNLLLQYGSFCTQLNRALTGIAVEQDKNTQEVFAQVKQIYKTPPIKDFGGFNFSQILPDPSKPSKRSFIEDLLFNKVTLADAGFIKQYGDCLGDIAARDLICAQKFNGLTVLPPLLTDEMIAQYTSALLAGTITSGWTFGAGAALQIPFAMQMAYRFNGIGVTQNVLYENQKLIANQFNSAIGKIQYSLSSTASALGKLQDVVNQNAQALNTLVKQLSSNFGAISSVLNDILSRLDKVEAEVQIDRLITGRLQSLQTYVTQQLIRAAEIRASANLAATKMSECVLGQSKRVDFCGKGYHLMSFPQSAPHGVVFLHVTYVPAQEKNFTCAPAICHDGKAHFPREGVFVSNGTHWFVTQRNFYEPQIITTDNTFVSGNCDVVIGIVNNTVYDPLQPELDSGGGGSDIDPYKEFGSSYQLLNFLPLDFFPDLNALVDTATALYEEELTGREHCSPHHTAIRQALVCWDELTKLIAWMSSNITSEQVRTIIVNHVNDTWGLKVRQSLWFHLSCLTFGQHTVQEFLVSFGVWIRTPAPYRPPNAPILSTLPEHTVIC

SEQ ID NO: 11039 - protein, 1301 aa, Artificial Sequence; identical to SEQ ID NO: 11002
  SARS-CoV-2/Portugal/PT0034/2020__EPI_ISL_418019 spike protein (1-1147)(I712C_T1077C) WhcAg construct

SEQ ID NO: 11040 - protein, 1301 aa, Artificial Sequence; identical to SEQ ID NO: 10994
  SARS-CoV-2/Iceland/202/2020__EPI_ISL_417750 spike protein (1-1147)(I712C_T1077C) WhcAg construct

SEQ ID NO: 11041 - protein, 1301 aa, Artificial Sequence
  SARS-CoV-2/USA/WA-UW261/2020__EPI_ISL_418046 spike protein (1-1147)(I712C_T1077C) WhcAg construct
MFVFLVLLPLVSSQCVNLTTRTQLPPAYTNSFTRGVYYPDKVFRSSVLHSTQDLFLPFFSNVTWFHAIHVSGTNGTKRFDNPVLPFNDGVYFASTEKSNIIRGWIFGTTLDSKTQSLLIVNNATNVVIKVCEFQFCNDPFLGVYYHKNNKSWMESEFRVYSSANNCTFEYVSQPFLMDLEGKQGNFKNLREFVFKNIDGYFKIYSKHTPINLVRDLPQGFSALEPLVDLPIGINITRFQTLLALHRSYLTPGDSSSGWTAGAAAYYVGYLQPRTFLLKYNENGTITDAVDCALDPLSETKCTLKSFTVEKGIYQTSNFRVQPTESIVRFPNITNLCPFGEVFNATRFTSVYAWNRKRISNCVADYSVLYNSASFSTFKCYGVSPTKLNDLCFTNVYADSFVIRGDEVRQIAPGQTGKIADYNYKLPDDFTGCVIAWNSNNLDSKVGGNYNYLYRLFRKSNLKPFERDISTEIYQAGSTPCNGVEGFNCYFPLQSYGFQPTNGVGYQPYRVVVLSFELLHAPATVCGPKKSTNLVKNKCVNFNFNGLTGTGVLTESNKKFLPFQQFGRDIADTTDAVRDPQTLEILDITPCSFGGVSVITPGTNTSNQVAVLYQDVNCTEVPVAIHADQLTPTWRVYSTGSNVFQTRAGCLIGAEHVNNSYECDIPIGAGICASYQTQTNSPRRARSVASQSIIAYTMSLGAENSVAYSNNSCAIPTNFTISVTTEILPVSMTKTSVDCTMYICGDSTECSNLLLQYGSFCTQLNRALTGIAVEQDKNTQEVFAQVKQIYKTPPIKDFGGFNFSQILPDPSKPSKRSFIEDLLFNKVTLADAGFIKQYGDCLGDIAARDLICAQKFNGLTVLPPLLTDEMIAQYTSALLAGTITSGWTFGAGAALQIPFAMQMAYRFNGIGVTQNVLYENQKLIANQFNSAIGKIQDSLSSTASALGKLQDVVNQNAQALNTLVKQLSSNFGAISSVLNDILSRLDKVEAEVQIDRLITGRLQSLQTYVTQQLIRAAEIRASANLAATKMSECVLGQSKRVDFCGKGYHLMSFPQSAPHGVVFLHVTYVPAQEKNFTCAPAICHDGKAHFPREGVFVSNGTHWFVTQRNFYEPQIITTDNTFVSGNCDVVIGIVNNTVYDPLQPELDSGGGGSDIDPYKEFGSSYQLLNFLPLDFFPDLNALVDTATALYEEELTGREHCSPHHTAIRQALVCWDELTKLIAWMSSNITSEQVRTIIVNHVNDTWGLKVRQSLWFHLSCLTFGQHTVQEFLVSFGVWIRTPAPYRPPNAPILSTLPEHTVIC

SEQ ID NO: 11042 - protein, 1301 aa, Artificial Sequence
  SARS-CoV-2/Portugal/PT0035/2020__EPI_ISL_418020 spike protein (1-1147)(I712C_T1077C) WhcAg construct
MFVFLVLLPLVSSQCVNLTTRTQLPPAYTNSFTRGVYYPDKVFRSSVLHSTQDLFLPFFSNVTWFHAIHVSGTNGTKRFDNPVLPFNDGVYFASTEKSNIIRGWIFGTTLDSKTQSLLIVNNATNVVIKVCEFQFCNDPFLGVYYHKNNKSWMESEFRVYSSANNCTFEYVSQPFLMDLEGKQGNFKNLREFVFKNIDGYFKIYSKHTPINLVRDLPQGFSALEPLVDLPIGINITRFQTLLALHRSYLTPGDSSSGWTAGAAAYYVGYLQPRTFLLKYNENGTITDAVDCALDPLSETKCTLKSFTVEKGIYQTSNFRVQPTESIVRFPNITNLCPFGEVFNATRFASVYAWNRKRISNCVADYSVLYNSASFSTFKCYGVSPTKLNDLCFTNVYADSFVIRGDEVRQIAPGQTGKIADYNYKLPDDFTGCVIAWNSNNLDSKVGGNYNYLYRLFRKSNLKPFERDISTEIYQAGSTPCNGVEGFNCYFPLQSYGFQPTNGVGYQPYRVVVLSFELLHAPATVCGPKKSTNLVKNKCVNFNFNGLTGTGVLTESNKKFLPFQQFGRDIADTTDAVRDPQTLEILDITPCSFGGVSVITPGTNTSNQVAVLYQDVNCTEVPVAIHADQLTPTWRVYSTGSNVFQTRAGCLIGAEHVNNSYECDIPIGAGICASYQTQTNSPRRARSVASQSIIAYTMSLGAENSVAYSNNSCAIPTNFTISVTTEILPVSMTKTSVDCTMYICGDSTECSNLLLQYGSFCTQLNRALTGIAVEQDKNTQEVFAQVKQIYKTPPIKDFGGFNFSQILPDPSKPSKRSFIEDLLFNKVTLADAGFIKQYGDCLGDISARDLICAQKFNGLTVLPPLLTDEMIAQYTSALLAGTITSGWTFGAGAALQIPFAMQMAYRFNGIGVTQNVLYENQKLIANQFNSAIGKIQDSLSSTASALGKLQDVVNQNAQALNTLVKQLSSNFGAISSVLNDILSRLDKVEAEVQIDRLITGRLQSLQTYVTQQLIRAAEIRASANLAATKMSECVLGQSKRVDFCGKGYHLMSFPQSAPHGVVFLHVTYVPAQEKNFTCAPAICHDGKAHFPREGVFVSNGTHWFVTQRNFYEPQIITTDNTFVSGNCDVVIGIVNNTVYDPLQPELDSGGGGSDIDPYKEFGSSYQLLNFLPLDFFPDLNALVDTATALYEEELTGREHCSPHHTAIRQALVCWDELTKLIAWMSSNITSEQVRTIIVNHVNDTWGLKVRQSLWFHLSCLTFGQHTVQEFLVSFGVWIRTPAPYRPPNAPILSTLPEHTVIC

SEQ ID NO: 11043 - protein, 1301 aa, Artificial Sequence
  SARS-CoV-2/USA/NY-NYUMC7/2020__EPI_ISL_418192 spike protein (1-1147)(I712C_T1077C) WhcAg construct
MFVFLVLLPLVSSQCVNLTTRTQLPPAYTNSFTRGVYYPDKVFRSSVLHSTQDLFLPFFSNVTWFHAIHVSGTNGTKRFDNPVLPFNDGVYFASTEKSNIIRGWIFGTTLDSKTQSLLIVNNATNVVIKVCEFQFCNDPFLGVYHHKNNKSWMESEFRVYSSANNCTFEYVSQPFLMDLEGKQGNFKNLREFVFKNIDGYFKIYSKHTPINLVRDLPQGFSALEPLVDLPIGINITRFQTLLALHRSYLTPGDSSSGWTAGAAAYYVGYLQPRTFLLKYNENGTITDAVDCALDPLSETKCTLKSFTVEKGIYQTSNFRVQPTESIVRFPNITNLCPFGEVFNATRFASVYAWNRKRISNCVADYSVLYNSASFSTFKCYGVSPTKLNDLCFTNVYADSFVIRGDEVRQIAPGQTGKIADYNYKLPDDFTGCVIAWNSNNLDSKVGGNYNYLYRLFRKSNLKPFERDISTEIYQAGSTPCNGVEGFNCYFPLQSYGFQPTNGVGYQPYRVVVLSFELLHAPATVCGPKKSTNLVKNKCVNFNFNGLTGTGVLTESNKKFLPFQQFGRDIADTTDAVRDPQTLEILDITPCSFGGVSVITPGTNTSNQVAVLYQGVNCTEVPVAIHADQLTPTWRVYSTGSNVFQTRAGCLIGAEHVNNSYECDIPIGAGICASYQTQTNSPRRARSVASQSIIAYTMSLGAENSVAYSNNSCAIPTNFTISVTTEILPVSMTKTSVDCTMYICGDSTECSNLLLQYGSFCTQLNRALTGIAVEQDKNTQEVFAQVKQIYKTPPIKDFGGFNFSQILPDPSKPSKRSFIEDLLFNKVTLADAGFIKQYGDCLGDIAARDLICAQKFNGLTVLPPLLTDEMIAQYTSALLAGTITSGWTFGAGAALQIPFAMQMAYRFNGIGVTQNVLYENQKLIANQFNSAIGKIQDSLSSTASALGKLQDVVNQNAQALNTLVKQLSSNFGAISSVLNDILSRLDKVEAEVQIDRLITGRLQSLQTYVTQQLIRAAEIRASANLAATKMSECVLGQSKRVDFCGKGYHLMSFPQSAPHGVVFLHVTYVPAQEKNFTCAPAICHDGKAHFPREGVFVSNGTHWFVTQRNFYEPQIITTDNTFVSGNCDVVIGIVNNTVYDPLQPELDSGGGGSDIDPYKEFGSSYQLLNFLPLDFFPDLNALVDTATALYEEELTGREHCSPHHTAIRQALVCWDELTKLIAWMSSNITSEQVRTIIVNHVNDTWGLKVRQSLWFHLSCLTFGQHTVQEFLVSFGVWIRTPAPYRPPNAPILSTLPEHTVIC

SEQ ID NO: 11044 - protein, 1301 aa, Artificial Sequence
  SARS-CoV-2/Iceland/189/2020__EPI_ISL_417709 spike protein (1-1147)(I712C_T1077C) WhcAg construct
MFVFLVLLPLVSSQCVNLTTRTQLPPAYTNSFTRGVYYPDKVFRSSVLHSTQDLFLPFFSNVTWFHAIHVSGTNGTKRFDNPVLPFNDGVYFASTEKSNIIRGWIFGTTLDSKTQSLLIVNNATNVVIKVCEFQFCNDPFLGVYYHKNNKSWMESEFRVYSSANNCTFEYVSQPFLMDLEGKQGNFKNLREFVFKNIDGYFKIYSKHTPINLVRDLPQGFSALEPLVDLPIGINITRFQTLLALHRSYLTPGDSSSGWTAGAAAYYVGYLQPRTFLLKYNENGTITDAVDCALDPLSETKCTLKSFTVEKGIYQTSNFRVQPTESIVRFPNITNLCPFGEVFNATRFASVYAWNRKRISNCVADYSVLYNSASFSTFKCYGVSPTKLNDLCFTNVYADSFVIRGDEVRQIAPGQTGKIADYNYKLPDDFTGCVIAWNSNNLDSKVGGNYNYLYRLFRKSNLKPFERDISTEIYQAGSTPCNGVEGFNCYFPLQSYGFQPTNGVGYQPYRVVVLSFELLHAPATVCGPKKSTNLVKNKCVNFNFNGLTGTGVLTESNKKFLPFQQFGRDIADTTDAVRDPQTLEILDITPCSFGGVSVITPGTNTSNQVAVLYQGVNCTEVPVAIHADQLTPTWRVYSTGSNVFQTRAGCLIGAEHVNNSYECDIPIGAGICASYQTQTNSPRRARSVASQSIIAYTMSLGAENSVAYSNNSCAIPTNFTISVTTEILPVSMTKTSVDCTMYICGDSTECSNLLLQYGSFCTQLNRALTGIAVEQDKNTQEVFAQVKQIYKTPPIKDFGGFNFSQILPDPSKPSKRSFIEDLLFNKVTLADAGFTKQYGDCLGDIAARDLICAQKFNGLTVLPPLLTDEMIAQYTSALLAGTITSGWTFGAGAALQIPFAMQMAYRFNGIGVTQNVLYENQKLIANQFNSAIGKIQDSLSSTASALGKLQDVVNQNAQALNTLVKQLSSNFGAISSVLNDILSRLDKVEAEVQIDRLITGRLQSLQTYVTQQLIRAAEIRASANLAATKMSECVLGQSKRVDFCGKGYHLMSFPQSAPHGVVFLHVTYVPAQEKNFTCAPAICHDGKAHFPREGVFVSNGTHWFVTQRNFYEPQIITTDNTFVSGNCDVVIGIVNNTVYDPLQPELDSGGGGSDIDPYKEFGSSYQLLNFLPLDFFPDLNALVDTATALYEEELTGREHCSPHHTAIRQALVCWDELTKLIAWMSSNITSEQVRTIIVNHVNDTWGLKVRQSLWFHLSCLTFGQHTVQEFLVSFGVWIRTPAPYRPPNAPILSTLPEHTVIC

SEQ ID NO: 11045 - protein, 1301 aa, Artificial Sequence
  SARS-CoV-2/Australia/NSW56/2020__EPI_ISL_417408 spike protein (1-1147)(I712C_T1077C) WhcAg construct
MFVFLVLLPLVSSQCVNLTTRTQLPPAYTNSFTRGVYYPDKVFRSSVLHSTQDLFLPFFSNVTWFHAIHVSGTNGTKRFDNPVLPFNDGVYFASTEKSNIIRGWIFGTTLDSKTQSLLIVNNATNVVIKVCEFQFCNDPFLGVYYHKNNKSWMESEFRVYSSANNCTFEYVSQPFLMDLEGKQGNFKNLREFVFKNIDGYFKIYSKHTPINLVRDLPQGFSALEPLVDLPIGINITRFQTLLALHRSYLTPGDSSSGWTAGAAAYYVGYLQPRTFLLKYNENGTITDAVDCALDPLSETKCTLKSFTVEKGIYQTSNFRVQPTESIVRFPNITNLCPFGEVFNATRFASVYAWNRKRISNCVADYSVLYNSASFSTFKCYGVSPTKLNDLCFTNVYADSFVIRGDEVRQIAPGQTGKIADYNYKLPDDFTGCVIAWNSNNLDSKVGGNYNYLYRLFRKSNLKPFERDISTEIYQAGSTPCNGVEGFNCYFPLQSYGFQPTNGVGYQPYRVVVLSFELLHAPATVCGPKKSTNLVKNKCVNFNFNGLTGTGVLTESNKKFLPFQQFGRDIADTTDAVRDPQTLEILDITPCSFGGVSVITPGTNTSNQVAVLYQDVNCTEVPVAIHADQLTPTWRVYSTGSNVFQTRAGCLIGAEHVNNSYECDIPIGAGICASYQTQTNSPRRARSVASQSIIAYTMSLGAENSVAYSNNSCAIPTNFTISVTTEILPVSMTKTSVDCTMYICGDSTECSNLLLQYGSFCTQLNRALTGIAVEQDKNTQEVFAQVKQIYKTPPIKDFGGFNFSQILPDSSKPSKRSFIEDLLFNKVTLADAGFIKQYGDCLGDIAARDLICAQKFNGLTVLPPLLTDEMIAQYTSALLAGTITSGWTFGAGAALQIPFAMQMAYRFNGIGVTQNVLYENQKLIANQFNSAIGKIQDSLSSTASALGKLQDVVNQNAQALNTLVKQLSSNFGAISSVLNDILSRLDKVEAEVQIDRLITGRLQSLQTYVTQQLIRAAEIRASANLAATKMSECVLGQSKRVDFCGKGYHLMSFPQSAPHGVVFLHVTYVPAQEKNFTCAPAICHDGKAHFPREGVFVSNGTHWFVTQRNFYEPQIITTDNTFVSGNCDVVIGIVNNTVYDPLQPELDSGGGGSDIDPYKEFGSSYQLLNFLPLDFFPDLNALVDTATALYEEELTGREHCSPHHTAIRQALVCWDELTKLIAWMSSNITSEQVRTIIVNHVNDTWGLKVRQSLWFHLSCLTFGQHTVQEFLVSFGVWIRTPAPYRPPNAPILSTLPEHTVIC

SEQ ID NO: 11046 - protein, 1301 aa, Artificial Sequence
  SARS-CoV-2/Iceland/280/2020__EPI_ISL_417608 spike protein (1-1147)(I712C_T1077C) WhcAg construct
MFVFLVLLPLVSSQCVNLTTRTQLPPAYTNSFTRGVYYPDKVFRSSVLHSTQDLFLPFFSNVTWFHAIHVSGTNGTKRFDNPVLPFNDGVYFASTEKSNIIRGWIFGTTLDSKTQSLLIVNNATNVVIKVCEFQFCNDPFLGVYYHKNNKSWMESEFRVYSSANNCTFEYVSQPFLMDLEGKQGNFKNLREFVFKNIDGYFKIYSKHTPINLVRDLPQGFSALEPLVDLPIGINITRFQTLLALHRSYLTPGDSSSGWTAGAAAYYVGYLQPRTFLLKYNENGTITDAVDCALDPLSETKCTLKSFTVEKGIYQTSNFRVQPTESIVRFPNITNLCPFGEVFNATRFASVYAWNRKRISNCVADYSVLYNSASFSTFKCYGVSPTKLNDLCFTNVYADSFVIRGDEVRQIAPGQTGKIADYNYKLPDDFTGCVIAWNSNNLDSKVGGNYNYLYRLFRKSNLKPFERDISTEIYQAGSTPCNGVEGFNCYFPLQSYGFQPTNGVGYQPYRVVVLSFELLHAPATVCGPKKSTNLVKNKCVNFNFNGLTGTGVLTESNKKFLPFQQFGRDIADTTDAVRDPQTLEILDITPCSFGGVSVITPGTNTSNQVAVLYQGVNCTEVPVAIHADQLTPTWRVYSTGSNVFQTRAGCLIGAEHVNNSYECDIPIGAGICASYHTQTNSPRRARSVASQSIIAYTMSLGAENSVAYSNNSCAIPTNFTISVTTEILPVSMTKTSVDCTMYICGDSTECSNLLLQYGSFCTQLNRALTGIAVEQDKNTQEVFAQVKQIYKTPPIKDFGGFNFSQILPDPSKPSKRSFIEDLLFNKVTLADAGFIKQYGDCLGDIAARDLICAQKFNGLTVLPPLLTDEMIAQYTSALLAGTITSGWTFGAGAALQIPFAMQMAYRFNGIGVTQNVLYENQKLIANQFNSAIGKIQDSLSSTASALGKLQDVVNQNAQALNTLVKQLSSNFGAISSVLNDILSRLDKVEAEVQIDRLITGRLQSLQTYVTQQLIRAAEIRASANLAATKMSECVLGQSKRVDFCGKGYHLMSFPQSAPHGVVFLHVTYVPAQEKNFTCAPAICHDGKAHFPREGVFVSNGTHWFVTQRNFYEPQIITTDNTFVSGNCDVVIGIVNNTVYDPLQPELDSGGGGSDIDPYKEFGSSYQLLNFLPLDFFPDLNALVDTATALYEEELTGREHCSPHHTAIRQALVCWDELTKLIAWMSSNITSEQVRTIIVNHVNDTWGLKVRQSLWFHLSCLTFGQHTVQEFLVSFGVWIRTPAPYRPPNAPILSTLPEHTVIC

SEQ ID NO: 11047 - protein, 1301 aa, Artificial Sequence; identical to SEQ ID NO: 11002
  SARS-CoV-2/Iceland/247/2020__EPI_ISL_417575 spike protein (1-1147)(I712C_T1077C) WhcAg construct

SEQ ID NO: 11048 - protein, 1301 aa, Artificial Sequence
  SARS-CoV-2/Iceland/238/2020__EPI_ISL_417566 spike protein (1-1147)(I712C_T1077C) WhcAg construct
MFVFLVLLPLVSSQCVNLTTRTQLPPAYTNSFTRGVYYPDKVFRSSVLHSTQDLFLPFFSNVTWFHAIHVSGTNGTKRFDNPVLPFNDGVYFASTEKSNIIRGWIFGTTLDSKTQSLLIVNNATNVVIKVCEFQFCNDPFLGVYYHKNNKSWMESEFRVYSSANNCTFEYVSQPFLMDLEGKQGNFKNLREFVFKNIDGYFKIYSKHTPINLVRDLPQGFSALEPLVDLPIGINITRFQTLLALHRSYLTPGDSSSGWTAGAAAYYVGYLQPRTFLLKYNENGTITDAVDCALDPLSETKCTLKSFTVEKGIYQTSNFRVQPTESIVRFPNITNLCPFGEVFNATRFASVYAWNRKRISNCVADYSVLYNSASFSTFKCYGVSPTKLNDLCFTNVYADSFVIRGDEVRQIAPGQTGKIADYNYKLPDDFTGCVIAWNSNNLDSKVGGNYNYLYRLFRKSNLKPFERDISTEIYQAGSTPCNGVEGFNCYFPLQSYGFQPTNGVGYQPYRVVVLSFELLHAPATVCGPKKSTNLVKNKCVNFNFNGLTGTGVLTESNKKFLPFQQFGRDIADTTDAVRDPQTLEILDITPCSFGGVSVITPGTNTSNQVAVLYQGVNCTEVPVAIHADQLTPTWRVYSTGSNVFQTRAGCLIGAEHVNNSYECDIPIGAGICASYQTQTNSPRRARSVASQSIIAYTMSLGAENSVAYSNNSCAIPTNFTISVTTEILPVSMTKTSVDCTMYICGDSTECSNLLLQYGSFCTQLNRALTGIAVEQDKNTQEVFAQVKQIYKTPPIKDFGGFNFSQILPDPSKPSKRSFIEDLLFNKVTLADVGFIKQYGDCLGDIAARDLICAQKFNGLTVLPPLLTDEMIAQYTSALLAGTITSGWTFGAGAALQIPFAMQMAYRFNGIGVTQNVLYENQKLIANQFNSAIGKIQDSLSSTASALGKLQDVVNQNAQALNTLVKQLSSNFGAISSVLNDILSRLDKVEAEVQIDRLITGRLQSLQTYVTQQLIRAAEIRASANLAATKMSECVLGQSKRVDFCGKGYHLMSFPQSAPHGVVFLHVTYVPAQEKNFTCAPAICHDGKAHFPREGVFVSNGTHWFVTQRNFYEPQIITTDNTFVSGNCDVVIGIVNNTVYDPLQPELDSGGGGSDIDPYKEFGSSYQLLNFLPLDFFPDLNALVDTATALYEEELTGREHCSPHHTAIRQALVCWDELTKLIAWMSSNITSEQVRTIIVNHVNDTWGLKVRQSLWFHLSCLTFGQHTVQEFLVSFGVWIRTPAPYRPPNAPILSTLPEHTVIC

SEQ ID NO: 11049 - protein, 1301 aa, Artificial Sequence
  SARS-CoV-2/Greece/16/2020__EPI_ISL_418265 spike protein (1-1147)(I712C_T1077C) WhcAg construct
MFVFLVLLPLVSSQCVNLTTRTQLPPAYTNSFTRGVYYPDKVFRSSVLHSTQDLFLPFFSNVTWFHAIHVSGTNGTKRFDNPVLPFNDGVYFASTEKSNIIRGWIFGTTLDSKTQSLLIVNNATNVVIKVCEFQFCNDPFLGVYYHKNNKSWMESEFRVYSSANNCTFEYVSQPFLMDLEGKQGNFKNLREFVFKNVDGYFKIYSKHTPINLVRDLPQGFSALEPLVDLPIGINITRFQTLLALHRSYLTPGDSSSGWTAGAAAYYVGYLQPRTFLLKYNENGTITDAVDCALDPLSETKCTLKSFTVEKGIYQTSNFRVQPTESIVRFPNITNLCPFGEVFNATRFASVYAWNRKRISNCVADYSVLYNSASFSTFKCYGVSPTKLNDLCFTNVYADSFVIRGDEVRQIAPGQTGKIADYNYKLPDDFTGCVIAWNSNNLDSKVGGNYNYLYRLFRKSNLKPFERDISTEIYQAGSTPCNGVEGFNCYFPLQSYGFQPTNGVGYQPYRVVVLSFELLHAPATVCGPKKSTNLVKNKCVNFNFNGLTGTGVLTESNKKFLPFQQFGRDIADTTDAVRDPQTLEILDITPCSFGGVSVITPGTNTSNQVAVLYQDVNCTEVPVAIHADQLTPTWRVYSTGSNVFQTRAGCLIGAEHVNNSYECDIPIGAGICASYQTQTNSPRRARSVASQSIIAYTMSLGAENSVAYSNNSCAIPTNFTISVTTEILPVSMTKTSVDCTMYICGDSTECSNLLLQYGSFCTQLNRALTGIAVEQDKNTQEVFAQVKQIYKTPPIKDFGGFNFSQILPDPSKPSKRSFIEDLLFNKVTLADAGFIKQYGDCLGDIAARDLICAQKFNGLTVLPPLLTDEMIAQYTSALLAGTITSGWTFGAGAALQIPFAMQMAYRFNGIGVTQNVLYENQKLIANQFNSAIGKIQDSLSSTASALGKLQDVVNQNAQALNTLVKQLSSNFGAISSVLNDILSRLDKVEAEVQIDRLITGRLQSLQTYVTQQLIRAAEIRASANLAATKMSECVLGQSKRVDFCGKGYHLMSFPQSAPHGVVFLHVTYVPAQEKNFTCAPAICHDGKAHFPREGVFVSNGTHWFVTQRNFYEPQIITTDNTFVSGNCDVVIGIVNNTVYDPLQPELDSGGGGSDIDPYKEFGSSYQLLNFLPLDFFPDLNALVDTATALYEEELTGREHCSPHHTAIRQALVCWDELTKLIAWMSSNITSEQVRTIIVNHVNDTWGLKVRQSLWFHLSCLTFGQHTVQEFLVSFGVWIRTPAPYRPPNAPILSTLPEHTVIC

SEQ ID NO: 11050 - protein, 1301 aa, Artificial Sequence
  SARS-CoV-2/Iceland/319/2020__EPI_ISL_417648 spike protein (1-1147)(I712C_T1077C) WhcAg construct
MFVFLVLLPLVSSQCVNLTTRTQLPPAYTNSFTRGVYYPDKVFRSSVLHSTQDLFLPFFSNVTWFHAIHVSGTNGTKRFDNPVLPFNDGVYFASTEKSNIIRGWIFGTTLDSKTQSLLIVNNATNVVIKVCEFQFCNDPFLGVYYHKNNKSWMESEFRVYSSANNCTFEYVSQPFLIDLEGKQGNFKNLREFVFKNIDGYFKIYSKHTPINLVRDLPQGFSALEPLVDLPIGINITRFQTLLALHRSYLTPGDSSSGWTAGAAAYYVGYLQPRTFLLKYNENGTITDAVDCALDPLSETKCTLKSFTVEKGIYQTSNFRVQPTESIVRFPNITNLCPFGEVFNATRFASVYAWNRKRISNCVADYSVLYNSASFSTFKCYGVSPTKLNDLCFTNVYADSFVIRGDEVRQIAPGQTGKIADYNYKLPDDFTGCVIAWNSNNLDSKVGGNYNYLYRLFRKSNLKPFERDISTEIYQAGSTPCNGVEGFNCYFPLQSYGFQPTNGVGYQPYRVVVLSFELLHAPATVCGPKKSTNLVKNKCVNFNFNGLTGTGVLTESNKKFLPFQQFGRDIADTTDAVRDPQTLEILDITPCSFGGVSVITPGTNTSNQVAVLYQGVNCTEVPVAIHADQLTPTWRVYSTGSNVFQTRAGCLIGAEHVNNSYECDIPIGAGICASYQTQTNSPRRARSVASQSIIAYTMSLGAENSVAYSNNSCAIPTNFTISVTTEILPVSMTKTSVDCTMYICGDSTECSNLLLQYGSFCTQLNRALTGIAVEQDKNTQEVFAQVKQIYKTPPIKDFGGFNFSQILPDPSKPSKRSFIEDLLFNKVTLADAGFIKQYGDCLGDIAARDLICAQKFNGLTVLPPLLTDEMIAQYTSALLAGTITSGWTFGAGAALQIPFAMQMAYRFNGIGVTQNVLYENQKLIANQFNSAIGKIQDSLSSTASALGKLQDVVNQNAQALNTLVKQLSSNFGAISSVLNDILSRLDKVEAEVQIDRLITGRLQSLQTYVTQQLIRAAEIRASANLAATKMSECVLGQSKRVDFCGKGYHLMSFPQSAPHGVVFLHVTYVPAQEKNFTCAPAICHDGKAHFPREGVFVSNGTHWFVTQRNFYEPQIITTDNTFVSGNCDVVIGIVNNTVYDPLQPELDSGGGGSDIDPYKEFGSSYQLLNFLPLDFFPDLNALVDTATALYEEELTGREHCSPHHTAIRQALVCWDELTKLIAWMSSNITSEQVRTIIVNHVNDTWGLKVRQSLWFHLSCLTFGQHTVQEFLVSFGVWIRTPAPYRPPNAPILSTLPEHTVIC

SEQ ID NO: 11051 - protein, 1301 aa, Artificial Sequence
  SARS-CoV-2/Congo/94/2020__EPI_ISL_417947 spike protein (1-1147)(I712C_T1077C) WhcAg construct
MFVFLVLLPLVSSQCVNLTTRTQLPPAYTNSFTRGVYYPDKVFRSSVLHSTQDLFLPFFSNVTWFHAIHVSGTNGTKRFDNPVLPFNDGVYFASTEKSNIIRGWIFGTTLDSKTQSLLIVNNATNVVIKVCEFQFCNDPFLGVYYHKNNKSWMESEFRVYSSANNCTFEYVSQPFLMDLEGKQGNFKNLREFVFKNIDGYFKIYSKHTPINLVRDLPQGFSALEPLVDLPIGINITRFQTLLALHRSYLTPGDSSSGWTAGAAAYYVGYLQPRTFLLKYNENGTITDAVDCALDPLSETKCTLKSFTVEKGIYQTSNFRVQPTESIVRFPNITNLCPFGEVFNATRFASVYAWNRKRISNCVADYSVLYNSASFSTFKCYGVSPTKLNDLCFTNVYADSFVIRGDEVRQIAPGQTGKIADYNYKLPDDFTGCVIAWNSNNLDSKVGGNYNYLYRLFRKSNLKPFERDISTEIYQAGSTPCNGVEGFNCYFPLQSYGFQPTNGVGYQPYRVVVLSFELLHAPATVCGPKKSTNLVKNKCVNFNFNGLTGTGVLTESNKKFLPFQQFGRDIADTTDAVRDPQTLEILDITPCSFGGVSVITPGTNTSNQVAVLYQGVNCTEVPVAIHADQLTPTWRVYSTGSNVFQTRAGCLIGAEHVNNSYECDIPIGAGICASYQTQTNSPRRARSVASQSIIAYTMSLGAENSVAYSNNSCAIPTNFTISVTTEILPVSMTKTSVDCTMYICGDSTECSNLLLQYGSFCTQLNRALTGIAVEQDKNTQEVFAQVKQIYKTPPIKDFGGFNFSQILPDPSKPSKRSFIEDILFNKVTLADAGFIKQYGDCLGDIAARDLICAQKFNGLTVLPPLLTDEMIAQYTSALLAGTITSGWTFGAGAALQIPFAMQMAYRFNGIGVTQNVLYENQKLIANQFNSAIGKIQDSLSSTASALGKLQDVVNQNAQALNTLVKQLSSNFGAISSVLNDILSRLDKVEAEVQIDRLITGRLQSLQTYVTQQLIRAAEIRASANLAATKMSECVLGQSKRVDFCGKGYHLMSFPQSAPHGVVFLHVTYVPAQEKNFTCAPAICHDGKAHFPREGVFVSNGTHWFVTQRNFYEPQIITTDNTFVSGNCDVVIGIVNNTVYDPLQPELDSGGGGSDIDPYKEFGSSYQLLNFLPLDFFPDLNALVDTATALYEEELTGREHCSPHHTAIRQALVCWDELTKLIAWMSSNITSEQVRTIIVNHVNDTWGLKVRQSLWFHLSCLTFGQHTVQEFLVSFGVWIRTPAPYRPPNAPILSTLPEHTVIC

SEQ ID NO: 11052 - protein, 1301 aa, Artificial Sequence
  SARS-CoV-2/Congo/158/2020__EPI_ISL_417950 spike protein (1-1147)(I712C_T1077C) WhcAg construct
MFVFLVLLPLVSSQCVNLTTRTQLPPAYTNSFTRGVYYPDKVFRSSVLHSTQDLFLPFFSNVTWFHAIHVSGTNGTKRFDNPVLPFNDGVYFASTEKSNIIRGWIFGTTLDSKTQSLLIVNNATNVVIKVCEFQFCNDPFLGVYYHKNNKSWMESEFRVYSSANNCTFEYVSQPFLMDLEGKQGNFKNLREFVFKNIDGYFKIYSKHTPINLVRDLPQGFSALEPLVDLPIGINITRFQTLLALHRSYLTPGDSSSGWTAGAAAYYVGYLQPRTFLLKYNENGTITDAVDCALDPLSETKCTLKSFTVEKGIYQTSNFRVQPTESIVRFPNITNLCPFGEVFNATRFASVYAWNRKRISNCVADYSVLYNSASFSTFKCYGVSPTKLNDLCFTNVYADSFVIRGDEVRQIAPGQTGKIADYNYKLPDDFTGCVIAWNSNNLDSKVGGNYNYLYRLFRKSNLKPFERDISTEIYQAGSTPCNGVEGFNCYFPLQSYGFQPTNGVGYQPYRVVVLSFELLHAPATVCGPKKSTNLVKNKCVNFNFNGLTGTGVLTESNKKFLPFQQFGRDIADTTDAVRDPQTLEILDITPCSFGGVSVITPGTNTSNQVAVLYQDVNCTEVPVAIHADQLTPTWRVYSTGSNVFQTRAGCLIGAEHVNNSYECDIPIGAGICASYQTQTNSPRRARSVASQSIIAYTMSLGAENSVAYSNNSCAIPTNFTISVTTEILPVSMTKTSVDCTMYICGDSTECSNLLLQYGSFCTQLNRALTGIAVEQDKNTQEVFAQVKQIYKTPPIKDFGGFNFSQILPDPSKPSKRSFIEDLLFNKVTLADAGFIKQYGDCLGDIAARDLICAQKFNGLTVLPPLLTDEMIAQYTSALLAGTITSGWTFGAGAALQIPFAMQMAYRFNGIGVTQNVLYENQKLIANQFNSAIGKIQDSLSSTASALGKLQDVVNQNAQALNTLVKQLSSNFGAISSVLNDILSRLDKVEAEVQIDRLITGRLQSLQTYVTQQLIRAAEIRASANLAATKMSECVLGQSKRVDFCGKGYHLMSFPQSAPHGVVFLHVTYVPAQEKNFTCAPAICHDGKAHFPREGVFVSNGTHWFVTQRNFYEPQIITTDNTFLSGNCDVVIGIVNNTVYDPLQPELDSGGGGSDIDPYKEFGSSYQLLNFLPLDFFPDLNALVDTATALYEEELTGREHCSPHHTAIRQALVCWDELTKLIAWMSSNITSEQVRTIIVNHVNDTWGLKVRQSLWFHLSCLTFGQHTVQEFLVSFGVWIRTPAPYRPPNAPILSTLPEHTVIC

SEQ ID NO: 11053 - protein, 1301 aa, Artificial Sequence
  SARS-CoV-2/USA/UT-00034/2020__EPI_ISL_417977 spike protein (1-1147)(I712C_T1077C) WhcAg construct
MFVFLVLLPLVSSQCVNLTTRTQLPPAYTNSFTRGVYYPDKVFRSSVLHSTQDLFLPFFSNVTWFHAIHVSGTNGTKRFDNPVLPFNDGVYFASTEKSNIIRGWIFGTTLDSKTQSLLIVNNATNVVIKVCEFQFCNDPFLGVYYYKNNKSWMESEFRVYSSANNCTFEYVSQPFLMDLEGKQGNFKNLREFVFKNIDGYFKIYSKHTPINLVRDLPQGFSALEPLVDLPIGINITRFQTLLALHRSYLTPGDSSSGWTAGAAAYYVGYLQPRTFLLKYNENGTITDAVDCALDPLSETKCTLKSFTVEKGIYQTSNFRVQPTESIVRFPNITNLCPFGEVFNATRFASVYAWNRKRISNCVADYSVLYNSASFSTFKCYGVSPTKLNDLCFTNVYADSFVIRGDEVRQIAPGQTGKIADYNYKLPDDFTGCVIAWNSNNLDSKVGGNYNYLYRLFRKSNLKPFERDISTEIYQAGSTPCNGVEGFNCYFPLQSYGFQPTNGVGYQPYRVVVLSFELLHAPATVCGPKKSTNLVKNKCVNFNFNGLTGTGVLTESNKKFLPFQQFGRDIADTTDAVRDPQTLEILDITPCSFGGVSVITPGTNTSNQVAVLYQGVNCTEVPVAIHADQLTPTWRVYSTGSNVFQTRAGCLIGAEHVNNSYECDIPIGAGICASYQTQTNSPRRARSVASQSIIAYTMSLGAENSVAYSNNSCAIPTNFTISVTTEILPVSMTKTSVDCTMYICGDSTECSNLLLQYGSFCTQLNRALTGIAVEQDKNTQEVFAQVKQIYKTPPIKDFGGFNFSQILPDPSKPSKRSFIEDLLFNKVTLADAGFIKQYGDCLGDIAARDLICAQKFNGLTVLPPLLTDEMIAQYTSALLAGTITSGWTFGAGAALQIPFAMQMAYRFNGIGVTQNVLYENQKLIANQFNSAIGKIQDSLSSTASALGKLQDVVNQNAQALNTLVKQLSSNFGAISSVLNDILSRLDKVEAEVQIDRLITGRLQSLQTYVTQQLIRAAEIRASANLAATKMSECVLGQSKRVDFCGKGYHLMSFPQSAPHGVVFLHVTYVPAQEKNFTCAPAICHDGKAHFPREGVFVSNGTHWFVTQRNFYEPQIITTDNTFVSGNCDVVIGIVNNTVYDPLQPELDSGGGGSDIDPYKEFGSSYQLLNFLPLDFFPDLNALVDTATALYEEELTGREHCSPHHTAIRQALVCWDELTKLIAWMSSNITSEQVRTIIVNHVNDTWGLKVRQSLWFHLSCLTFGQHTVQEFLVSFGVWIRTPAPYRPPNAPILSTLPEHTVIC

SEQ ID NO: 11054 - protein, 1301 aa, Artificial Sequence
  SARS-CoV-2/USA/UT-00033/2020__EPI_ISL_417976 spike protein (1-1147)(I712C_T1077C) WhcAg construct
MFVFLVLLPLVSSQCVNLTTRTQLPPAYTNSFTRGVYYPDKVFRSSVLHSTQDLFLPFFSNVTWFHAIHVSGTNGTKRFDNPVLPFNDGVYFASTEKSNIIRGWIFGTTLDSKTQSLLIVNNATNVVIKVCEFQFCNDPFLGVYYHKNNKSWMESEFRVYSSANNCTFEYVSQPFLMDLEGKQGNFKNLREFVFKNIDGYFKIYSKHTPINLVRDLPQGFSALEPLVDLPIGINITRFQTLLALHRSYLTPGDSSSGLTAGAAAYYVGYLQPRTFLLKYNENGTITDAVDCALDPLSETKCTLKSFTVEKGIYQTSNFRVQPTESIVRFPNITNLCPFGEVFNATRFASVYAWNRKRISNCVADYSVLYNSASFSTFKCYGVSPTKLNDLCFTNVYADSFVIRGDEVRQIAPGQTGKIADYNYKLPDDFTGCVIAWNSNNLDSKVGGNYNYLYRLFRKSNLKPFERDISTEIYQAGSTPCNGVEGFNCYFPLQSYGFQPTNGVGYQPYRVVVLSFELLHAPATVCGPKKSTNLVKNKCVNFNFNGLTGTGVLTESNKKFLPFQQFGRDIADTTDAVRDPQTLEILDITPCSFGGVSVITPGTNTSNQVAVLYQGVNCTEVPVAIHADQLTPTWRVYSTGSNVFQTRAGCLIGAEHVNNSYECDIPIGAGICASYQTQTNSPRRARSVASQSIIAYTMSLGAENSVAYSNNSCAIPTNFTISVTTEILPVSMTKTSVDCTMYICGDSTECSNLLLQYGSFCTQLNRALTGIAVEQDKNTQEVFAQVKQIYKTPPIKDFGGFNFSQILPDPSKPSKRSFIEDLLFNKVTLADAGFIKQYGDCLGDIAARDLICAQKFNGLTVLPPLLTDEMIAQYTSALLAGTITSGWTFGAGAALQIPFAMQMAYRFNGIGVTQNVLYENQKLIANQFNSAIGKIQDSLSSTASALGKLQDVVNQNAQALNTLVKQLSSNFGAISSVLNDILSRLDKVEAEVQIDRLITGRLQSLQTYVTQQLIRAAEIRASANLAATKMSECVLGQSKRVDFCGKGYHLMSFPQSAPHGVVFLHVTYVPAQEKNFTCAPAICHDGKAHFPREGVFVSNGTHWFVTQRNFYEPQIITTDNTFVSGNCDVVIGIVNNTVYDPLQPELDSGGGGSDIDPYKEFGSSYQLLNFLPLDFFPDLNALVDTATALYEEELTGREHCSPHHTAIRQALVCWDELTKLIAWMSSNITSEQVRTIIVNHVNDTWGLKVRQSLWFHLSCLTFGQHTVQEFLVSFGVWIRTPAPYRPPNAPILSTLPEHTVIC

SEQ ID NO: 11055 - protein, 1301 aa, Artificial Sequence
  SARS-CoV-2/USA/WI-13/2020__EPI_ISL_417516 spike protein (1-1147)(I712C_T1077C) WhcAg construct
MFVFLVLLPLVSSQCVNLTTRTQLPPAYTNSFTRGVYYPDKVFRSSVLHSTQDLFLPFFSNVTWFHAIHVSGTNGTKRFDNPVLPFNDGVYFASTEKSNIIRGWIFGTTLDSKTQSLLIVNNATNVVIKVCEFQFCNDPFLGVYYHKNNKSWMESEFRVYSSANNCTFEYVSQPFLMDLEGKQGNFKNLREFVFKNIDGYFKIYSKHTPINLVRDLPQGFSALEPLVDLPIGINITRFQTLLALHRSYLTPGDSSSGWTAGAAAYYVGYLQPRTFLLKYNENGTITDAVDCALDPLSETKCTLKSFTVEKGIYQTSNFRVLPTESIVRFPNITNLCPFGEVFNATRFASVYAWNRKRISNCVADYSVLYNSASFSTFKCYGVSPTKLNDLCFTNVYADSFVIRGDEVRQIAPGQTGKIADYNYKLPDDFTGCVIAWNSNNLDSKVGGNYNYLYRLFRKSNLKPFERDISTEIYQAGSTPCNGVEGFNCYFPLQSYGFQPTNGVGYQPYRVVVLSFELLHAPATVCGPKKSTNLVKNKCVNFNFNGLTGTGVLTESNKKFLPFQQFGRDIADTTDAVRDPQTLEILDITPCSFGGVSVITPGTNTSNQVAVLYQGVNCTEVPVAIHADQLTPTWRVYSTGSNVFQTRAGCLIGAEHVNNSYECDIPIGAGICASYQTQTNSPRRARSVASQSIIAYTMSLGAENSVAYSNNSCAIPTNFTISVTTEILPVSMTKTSVDCTMYICGDSTECSNLLLQYGSFCTQLNRALTGIAVEQDKNTQEVFAQVKQIYKTPPIKDFGGFNFSQILPDPSKPSKRSFIEDLLFNKVTLADAGFIKQYGDCLGDIAARDLICAQKFNGLTVLPPLLTDEMIAQYTSALLAGTITSGWTFGAGAALQIPFAMQMAYRFNGIGVTQNVLYENQKLIANQFNSAIGKIQDSLSSTASALGKLQDVVNQNAQALNTLVKQLSSNFGAISSVLNDILSRLDKVEAEVQIDRLITGRLQSLQTYVTQQLIRAAEIRASANLAATKMSECVLGQSKRVDFCGKGYHLMSFPQSAPHGVVFLHVTYVPAQEKNFTCAPAICHDGKAHFPREGVFVSNGTHWFVTQRNFYEPQIITTDNTFVSGNCDVVIGIVNNTVYDPLQPELDSGGGGSDIDPYKEFGSSYQLLNFLPLDFFPDLNALVDTATALYEEELTGREHCSPHHTAIRQALVCWDELTKLIAWMSSNITSEQVRTIIVNHVNDTWGLKVRQSLWFHLSCLTFGQHTVQEFLVSFGVWIRTPAPYRPPNAPILSTLPEHTVIC

SEQ ID NO: 11056 - protein, 1300 aa, Artificial Sequence
  SARS-CoV-2/India/1-27/2020__EPI_ISL_413522 spike protein (1-1146)(I711C_T1076C) WhcAg construct
MFVFLVLLPLVSSQCVNLTTRTQLPPAYTNSFTRGVYYPDKVFRSSVLHSTQDLFLPFFSNVTWFHAIHVSGTNGTKRFDNPVLPFNDGVYFASTEKSNIIRGWIFGTTLDSKTQSLLIVNNATNVVIKVCEFQFCNDPFLGVYHKNNKSWMESEFRVYSSANNCTFEYVSQPFLMDLEGKQGNFKNLREFVFKNIDGYFKIYSKHTPINLVRDLPQGFSALEPLVDLPIGINITRFQTLLALHRSYLTPGDSSSGWTAGAAAYYVGYLQPRTFLLKYNENGTITDAVDCALDPLSETKCTLKSFTVEKGIYQTSNFRVQPTESIVRFPNITNLCPFGEVFNATRFASVYAWNRKRISNCVADYSVLYNSASFSTFKCYGVSPTKLNDLCFTNVYADSFVIRGDEVIQIAPGQTGKIADYNYKLPDDFTGCVIAWNSNNLDSKVGGNYNYLYRLFRKSNLKPFERDISTEIYQAGSTPCNGVEGFNCYFPLQSYGFQPTNGVGYQPYRVVVLSFELLHAPATVCGPKKSTNLVKNKCVNFNFNGLTGTGVLTESNKKFLPFQQFGRDIADTTDAVRDPQTLEILDITPCSFGGVSVITPGTNTSNQVAVLYQDVNCTEVPVAIHADQLTPTWRVYSTGSNVFQTRAGCLIGAEHVNNSYECDIPIGAGICASYQTQTNSPRRARSVASQSIIAYTMSLGAENSVAYSNNSCAIPTNFTISVTTEILPVSMTKTSVDCTMYICGDSTECSNLLLQYGSFCTQLNRALTGIAVEQDKNTQEVFAQVKQIYKTPPIKDFGGFNFSQILPDPSKPSKRSFIEDLLFNKVTLADAGFIKQYGDCLGDIAARDLICAQKFNGLTVLPPLLTDEMIAQYTSALLAGTITSGWTFGAGAALQIPFAMQMAYRFNGIGVTQNVLYENQKLIANQFNSAIGKIQDSLSSTASALGKLQDVVNQNAQALNTLVKQLSSNFGAISSVLNDILSRLDKVEAEVQIDRLITGRLQSLQTYVTQQLIRAAEIRASANLAATKMSECVLGQSKRVDFCGKGYHLMSFPQSAPHGVVFLHVTYVPAQEKNFTCAPAICHDGKAHFPREGVFVSNGTHWFVTQRNFYEPQIITTDNTFVSGNCDVVIGIVNNTVYDPLQPELDSGGGGSDIDPYKEFGSSYQLLNFLPLDFFPDLNALVDTATALYEEELTGREHCSPHHTAIRQALVCWDELTKLIAWMSSNITSEQVRTIIVNHVNDTWGLKVRQSLWFHLSCLTFGQHTVQEFLVSFGVWIRTPAPYRPPNAPILSTLPEHTVIC

SEQ ID NO: 11057 - protein, 1295 aa, Artificial Sequence
  SARS-CoV-2/pangolin/Guangxi/P4L/2017__EPI_ISL_410538 spike protein (1-1141)(I706C_T1071C) WhcAg construct
MFVFLFVLPLVSSQCVNLTTRTGIPPGYTNSSTRGVYYPDKVFRSSILHLTQDLFLPFFSNVTWFNTINYQGGFKKFDNPVLPFNDGVYFASTEKSNIIRGWIFGTTLDARTQSLLIVNNATNVVIKVCEFQFCTDPFLGVYYHNNNKTWVENEFRVYSSANNCTFEYISQPFLMDLEGKQGNFKNLREFVFKNVDGYFKIYSKHTPIDLVRDLPRGFAALEPLVDLPIGINITRFQTLLALHRSYLTPGNLESGWTTGAAAYYVGYLQQRTFLLSYNQNGTITDAVDCSLDPLSETKCTLKSLTVEKGIYQTSNFRVQPTISIVRFPNITNLCPFGEVFNASKFASVYAWNRKRISNCVADYSVLYNSTSFSTFKCYGVSPTKLNDLCFTNVYADSFVVKGDEVRQIAPGQTGVIADYNYKLPDDFTGCVIAWNSVKQDALTGGNYGYLYRLFRKSKLKPFERDISTEIYQAGSTPCNGQVGLNCYYPLERYGFHPTTGVNYQPFRVVVLSFELLNGPATVCGPKLSTTLVKDKCVNFNFNGLTGTGVLTTSKKQFLPFQQFGRDISDTTDAVRDPQTLEILDITPCSFGGVSVITPGTNTSNQVAVLYQDVNCTEVPMAIHAEQLTPAWRVYSAGANVFQTRAGCLVGAEHVNNSYECDIPVGAGICASYHSMSSLRSVNQRSIIAYTMSLGAENSVAYSNNSCAIPTNFTISVTTEILPVSMTKTSVDCTMYICGDSIECSNLLLQYGSFCTQLNRALTGIAVEQDKNTQEVFAQVKQIYKTPPIKDFGGFNFSQILPDPSKPSKRSFIEDLLFNKVTLADAGFIKQYGDCLGDIAARDLICAQKFNGLTVLPPLLTDEMIAQYTSALLAGTITSGWTFGAGAALQIPFAMQMAYRFNGIGVTQNVLYENQKLIANQFNSAIGKIQDSLSSTASALGKLQDVVNQNAQALNTLVKQLSSNFGAISSVLNDILSRLDKVEAEVQIDRLITGRLQSLQTYVTQQLIRAAEIRASANLAATKMSECVLGQSKRVDFCGKGYHLMSFPQSAPHGVVFLHVTYVPAQEKNFTCAPAICHEGKAHFPREGVFVSNGTHWFITQRNFYEPQIITTDNTFVSGSCDVVIGIVNNTVYDPLQPELDSGGGGSDIDPYKEFGSSYQLLNFLPLDFFPDLNALVDTATALYEEELTGREHCSPHHTAIRQALVCWDELTKLIAWMSSNITSEQVRTIIVNHVNDTWGLKVRQSLWFHLSCLTFGQHTVQEFLVSFGVWIRTPAPYRPPNAPILSTLPEHTVIC

SEQ ID NO: 11058 - protein, 1295 aa, Artificial Sequence
  SARS-CoV-2/pangolin/Guangxi/P5L/2017__EPI_ISL_410540 spike protein (1-1141)(I706C_T1071C) WhcAg construct
MFVFLFVLPLVSSQCVNLTTRTGIPPGYTNSSTRGVYYPDKVFRSSILHLTQDLFLPFFSNVTWFNTINYQGGFKKFDNPVLPFNDGVYFASTEKSNIIRGWIFGTTLDARTQSLLIVNNATNVVIKVCEFQFCTDPFLGVYYHNNNKTWVENEFRVYSSANNCTFEYISQPFLMDLEGKQGNFKNLREFVFKNVDGYFKIYSKHTPIDLVRDLPRGFAALEPLVDLPIGINITRFQTLLALHRSYLTPGKLESGWTTGAAAYYVGYLQQRTFLLSYNQNGTITDAVDCSLDPLSETKCTLKSLTVEKGIYQTSNFRVQPTISIVRFPNITNLCPFGEVFNASKFASVYAWNRKRISNCVADYSVLYNSTSFSTFKCYGVSPTKLNDLCFTNVYADSFVVKGDEVRQIAPGQTGVIADYNYKLPDDFTGCVIAWNSVKQDALTGGNYGYLYRLFRKSKLKPFERDISTEIYQAGSTPCNGQVGLNCYYPLERYGFHPTTGVNYQPFRVVVLSFELLNGPATVCGPKLSTTLVKDKCVNFNFNGLTGTGVLTTSKKQFLPFQQFGRDISDTTDAVRDPQTLEILDITPCSFGGVSVITPGTNTSNQVAVLYQDVNCTEVPMAIHAEQLTPAWRVYSAGANVFQTRAGCLVGAEHVNNSYECDIPVGAGICASYHSMSSFRSVNQRSIIAYTMSLGAENSVAYSNNSCAIPTNFTISVTTEILPVSMTKTSVDCTMYICGDSIECSNLLLQYGSFCTQLNRALTGIAVEQDKNTQEVFAQVKQIYKTPPIKDFGGFNFSQILPDPSKPSKRSFIEDLLFNKVTLADAGFIKQYGDCLGDIAARDLICAQKFNGLTVLPPLLTDEMIAQYTSALLAGTITSGWTFGAGAALQIPFAMQMAYRFNGIGVTQNVLYENQKLIANQFNSAIGKIQDSLSSTASALGKLQDVVNQNAQALNTLVKQLSSNFGAISSVLNDILSRLDKVEAEVQIDRLITGRLQSLQTYVTQQLIRAAEIRASANLAATKMSECVLGQSKRVDFCGKGYHLMSFPQSAPHGVVFLHVTYVPAQEKNFTCAPAICHEGKAHFPREGVFVSNGTHWFITQRNFYEPQIITTDNTFVSGSCDVVIGIVNNTVYDPLQPELDSGGGGSDIDPYKEFGSSYQLLNFLPLDFFPDLNALVDTATALYEEELTGREHCSPHHTAIRQALVCWDELTKLIAWMSSNITSEQVRTIIVNHVNDTWGLKVRQSLWFHLSCLTFGQHTVQEFLVSFGVWIRTPAPYRPPNAPILSTLPEHTVIC

SEQ ID NO: 11059 - protein, 1295 aa, Artificial Sequence
  SARS-CoV-2/pangolin/Guangxi/P5E/2017__EPI_ISL_410541 spike protein (1-1141)(I706C_T1071C) WhcAg construct
MFVFLFVLPLVSSQCVNLTTRTGIPPGYTNSSTRGVYYPDKVFRSSILHLTQDLFLPFFSNVTWFNTITYQGGSKKFDNPVLPFNDGVYFASTEKSNIIRGWIFGTTLDARTQSLLIVNNATNVVIKVCEFQFCTDPFLGVYYHNNNKTWVENEFRVYSSANNCTFEYISQPFLMDLEGKQGNFKNLREFVFKNVDGYFKIYSKHTPIDLVRDLPRGFAALEPLVDLPIGINITRFQTLLALHRSYLTPGKLESGWTTGAAAYYVGYLQQRTFLLSYNQNGTITDAVDCSLDPLSETKCTLKSLTVEKGIYQTSNFRVQPTISIVRFPNITNLCPFGEVFNASKFASVYAWNRKRISNCVADYSVLYNSTSFSTFKCYGVSPTKLNDLCFTNVYADSFVVKGDEVRQIAPGQTGVIADYNYKLPDDFTGCVIAWNSVKQDALTGDNYGYLYRLFRKSKLKPFERDISTEIYQAGSTPCNGQVGLNCYYPLERYGFHPTTGVNYQPFRVVVLSFELLNGPATVCGPKLSTTLVKDKCVNFNFNGLTGTGVLTTSKKQFLPFQQFGRDISDTTDAVRDPQTLEILDITPCSFGGVSVITPGTNTSNQVAVLYQDVNCTEVPMAIHAEQLTPAWRVYSAGANVFQTRAGCLVGAEHVNNSYECDIPVGAGICASYHSMSSFRSVNQRSIIAYTMSLGAENSVAYSNNSCAIPTNFTISVTTEILPVSMTKTSVDCTMYICGDSIECSNLLLQYGSFCTQLNRALTGIAVEQDKNTQEVFAQVKQIYKTPPIKDFGGFNFSQILPDPSKPSKRSFIEDLLFNKVTLADAGFIKQYGDCLGDIAARDLICAQKFNGLTVLPPLLTDEMIAQYTSALLAGTITSGWTFGAGAALQIPFAMQMAYRFNGIGVTQNVLYENQKLIANQFNSAIGKIQDSLSSTASALGKLQDVVNQNAQALNTLVKQLSSNFGAISSVLNDILSRLDKVEAEVQIDRLITGRLQSLQTYVTQQLIRAAEIRASANLAATKMSECVLGQSKRVDFCGKGYHLMSFPQSAPHGVVFLHVTYVPAQEKNFTCAPAICHEGKAHFPREGVFVSNGTHWFITQRNFYEPQIITTDNTFVSGSCDVVIGIVNNTVYDPLQPELDSGGGGSDIDPYKEFGSSYQLLNFLPLDFFPDLNALVDTATALYEEELTGREHCSPHHTAIRQALVCWDELTKLIAWMSSNITSEQVRTIIVNHVNDTWGLKVRQSLWFHLSCLTFGQHTVQEFLVSFGVWIRTPAPYRPPNAPILSTLPEHTVIC

SEQ ID NO: 11060 - protein, 1293 aa, Artificial Sequence
  SARS-CoV-2/pangolin/Guangxi/P1E/2017__EPI_ISL_410539 spike protein (1-1139)(I704C_T1069C) WhcAg construct
MFVFLFVLPLVSSQCVNLTTRTGIQPGYTNSSTRGVYYPDKVFRSSILHLTQDLFLPFFSNVTWFNTINYQGGFKKFDNPVLPFNDGVYFASTEKSNIIRGWIFGTTLDARTQSLLIVNNATNVVIKVCEFQFCTDPFLGVYYHNNNKTWVENEFRVYSSANNCTFEYISQPFLMDLEGKQGNFKNLREFVFKNVDGYFKIYSKHTPIDLVRDLPRGFAALEPLVDLPIGINITRFQTLLALHRSYLTPGKLESGWTTGAAAYYVGYLQQRTFLLSYNQNGTITDAVDCSLDPLSETKCTLKSLTVEKGIYQTSNFRVQPTISIVRFPNITNLCPFGEVFNASKFASVYAWNRKRISNCVADYSVLYNSTSFSTFKCYGVSPTKLNDLCFTNVYADSFVVKGDEVRQIAPGQTGVIADYNYKLPDDFTGCVIAWNSVKQDALTGGNYLYRLFRKSKLKPFERDISTEIYQAGSTPCNGQVGLNCYYPLERYGFHPTTGVNYQPFRVVVLSFELLNGPATVCGPKLSTTLVKDKCVNFNFNGLTGTGVLTTSKKQFLPFQQFGRDISDTTDAVRDPQTLEILDITPCSFGGVSVITPGTNTSNQVAVLYQDVNCTEVPMAIHAEQLTPAWRVYSAGANVFQTRAGCLVGAEHVNNSYECDIPVGAGICASYHSMSSLRSVNQRSIIAYTMSLGAENSVAYSNNSCAIPTNFTISVTTEILPVSMTKTSVDCTMYICGDSIECSNLLLQYGSFCTQLNRALTGIAVEQDKNTQEVFAQVKQIYKTPPIKDFGGFNFSQILPDPSKPSKRSFIEDLLFNKVTLADAGFIKQYGDCLGDIAARDLICAQKFNGLTVLPPLLTDEMIAQYTSALLAGTITSGWTFGAGAALQIPFAMQMAYRFNGIGVTQNVLYENQKLIANQFNSAIGKIQDSLSSTASALGKLQDVVNQNAQALNTLVKQLSSNFGAISSVLNDILSRLDKVEAEVQIDRLITGRLQSLQTYVTQQLIRAAEIRASANLAATKMSECVLGQSKRVDFCGKGYHLMSFPQSAPHGVVFLHVTYVPAQEKNFTCAPAICHEGKAHFPREGVFVSNGTHWFITQRNFYEPQIITTDNTFVSGSCDVVIGIVNNTVYDPLQPELDSGGGGSDIDPYKEFGSSYQLLNFLPLDFFPDLNALVDTATALYEEELTGREHCSPHHTAIRQALVCWDELTKLIAWMSSNITSEQVRTIIVNHVNDTWGLKVRQSLWFHLSCLTFGQHTVQEFLVSFGVWIRTPAPYRPPNAPILSTLPEHTVIC

SEQ ID NO: 11061 - protein, 1301 aa, Artificial Sequence
  SARS-CoV-2/Wuhan/WIV05/2019__EPI_ISL_402128 spike protein (1-1147)(I714C_Y1110C) WhcAg construct
MFVFLVLLPLVSSQCVNLTTRTQLPPAYTNSFTRGVYYPDKVFRSSVLHSTQDLFLPFFSNVTWFHAIHVSGTNGTKRFDNPVLPFNDGVYFASTEKSNIIRGWIFGTTLDSKTQSLLIVNNATNVVIKVCEFQFCNDPFLGVYYHKNNKSWMESEFRVYSSANNCTFEYVSQPFLMDLEGKQGNFKNLREFVFKNIDGYFKIYSKHTPINLVRDLPQGFSALEPLVDLPIGINITRFQTLLALHRSYLTPGDSSSGWTAGAAAYYVGYLQPRTFLLKYNENGTITDAVDCALDPLSETKCTLKSFTVEKGIYQTSNFRVQPTESIVRFPNITNLCPFGEVFNATRFASVYAWNRKRISNCVADYSVLYNSASFSTFKCYGVSPTKLNDLCFTNVYADSFVIRGDEVRQIAPGQTGKIADYNYKLPDDFTGCVIAWNSNNLDSKVGGNYNYLYRLFRKSNLKPFERDISTEIYQAGSTPCNGVEGFNCYFPLQSYGFQPTNGVGYQPYRVVVLSFELLHAPATVCGPKKSTNLVKNKCVNFNFNGLTGTGVLTESNKKFLPFQQFGRDIADTTDAVRDPQTLEILDITPCSFGGVSVITPGTNTSNQVAVLYQDVNCTEVPVAIHADQLTPTWRVYSTGSNVFQTRAGCLIGAEHVNNSYECDIPIGAGICASYQTQTNSPRRARSVASQSIIAYTMSLGAENSVAYSNNSIACPTNFTISVTTEILPVSMTKTSVDCTMYICGDSTECSNLLLQYGSFCTQLNRALTGIAVEQDKNTQEVFAQVKQIYKTPPIKDFGGFNFSQILPDPSKPSKRSFIEDLLFNKVTLADAGFIKQYGDCLGDIAARDLICAQKFNGLTVLPPLLTDEMIAQYTSALLAGTITSGWTFGAGAALQIPFAMQMAYRFNGIGVTQNVLYENQKLIANQFNSAIGKIQDSLSSTASALGKLQDVVNQNAQALNTLVKQLSSNFGAISSVLNDILSRLDKVEAEVQIDRLITGRLQSLQTYVTQQLIRAAEIRASANLAATKMSECVLGQSKRVDFCGKGYHLMSFPQSAPHGVVFLHVTYVPAQEKNFTTAPAICHDGKAHFPREGVFVSNGTHWFVTQRNFCEPQIITTDNTFVSGNCDVVIGIVNNTVYDPLQPELDSGGGGSDIDPYKEFGSSYQLLNFLPLDFFPDLNALVDTATALYEEELTGREHCSPHHTAIRQALVCWDELTKLIAWMSSNITSEQVRTIIVNHVNDTWGLKVRQSLWFHLSCLTFGQHTVQEFLVSFGVWIRTPAPYRPPNAPILSTLPEHTVIC

SEQ ID NO: 11062 - protein, 1297 aa, Artificial Sequence
  SARS-CoV-2/bat/Yunnan/RaTG13/2013__EPI_ISL_402131 spike protein (1-1143)(I710C_Y1106C) WhcAg construct
MFVFLVLLPLVSSQCVNLTTRTQLPPAYTNSSTRGVYYPDKVFRSSVLHLTQDLFLPFFSNVTWFHAIHVSGTNGIKRFDNPVLPFNDGVYFASTEKSNIIRGWIFGTTLDSKTQSLLIVNNATNVVIKVCEFQFCNDPFLGVYYHKNNKSWMESEFRVYSSANNCTFEYVSQPFLMDLEGKQGNFKNLREFVFKNIDGYFKIYSKHTPINLVRDLPPGFSALEPLVDLPIGINITRFQTLLALHRSYLTPGDSSSGWTAGAAAYYVGYLQPRTFLLKYNENGTITDAVDCALDPLSETKCTLKSFTVEKGIYQTSNFRVQPTDSIVRFPNITNLCPFGEVFNATTFASVYAWNRKRISNCVADYSVLYNSTSFSTFKCYGVSPTKLNDLCFTNVYADSFVITGDEVRQIAPGQTGKIADYNYKLPDDFTGCVIAWNSKHIDAKEGGNFNYLYRLFRKANLKPFERDISTEIYQAGSKPCNGQTGLNCYYPLYRYGFYPTDGVGHQPYRVVVLSFELLNAPATVCGPKKSTNLVKNKCVNFNFNGLTGTGVLTESNKKFLPFQQFGRDIADTTDAVRDPQTLEILDITPCSFGGVSVITPGTNASNQVAVLYQDVNCTEVPVAIHADQLTPTWRVYSTGSNVFQTRAGCLIGAEHVNNSYECDIPIGAGICASYQTQTNSRSVASQSIIAYTMSLGAENSVAYSNNSIACPTNFTISVTTEILPVSMTKTSVDCTMYICGDSTECSNLLLQYGSFCTQLNRALTGIAVEQDKNTQEVFAQVKQIYKTPPIKDFGGFNFSQILPDPSKPSKRSFIEDLLFNKVTLADAGFIKQYGDCLGDIAARDLICAQKFNGLTVLPPLLTDEMIAQYTSALLAGTITSGWTFGAGAALQIPFAMQMAYRFNGIGVTQNVLYENQKLIANQFNSAIGKIQDSLSSTASALGKLQDVVNQNAQALNTLVKQLSSNFGAISSVLNDILSRLDKVEAEVQIDRLITGRLQSLQTYVTQQLIRAAEIRASANLAATKMSECVLGQSKRVDFCGKGYHLMSFPQSAPHGVVFLHVTYVPAQEKNFTTAPAICHDGKAHFPREGVFVSNGTHWFVTQRNFCEPQIITTDNTFVSGSCDVVIGIVNNTVYDPLQPELDSGGGGSDIDPYKEFGSSYQLLNFLPLDFFPDLNALVDTATALYEEELTGREHCSPHHTAIRQALVCWDELTKLIAWMSSNITSEQVRTIIVNHVNDTWGLKVRQSLWFHLSCLTFGQHTVQEFLVSFGVWIRTPAPYRPPNAPILSTLPEHTVIC

SEQ ID NO: 11063 - protein, 1301 aa, Artificial Sequence
  SARS-CoV-2/Wuhan/HBCDC-HB-01/2019__EPI_ISL_402132 spike protein (1-1147)(I714C_Y1110C) WhcAg construct
MFVFLVLLPLVSSQCVNLTTRTQLPPAYTNSITRGVYYPDKVFRSSVLHSTQDLFLPFFSNVTWFHAIHVSGTNGTKRFDNPVLPFNDGVYFASTEKSNIIRGWIFGTTLDSKTQSLLIVNNATNVVIKVCEFQFCNDPFLGVYYHKNNKSWMESEFRVYSSANNCTFEYVSQPFLMDLEGKQGNFKNLREFVFKNIDGYFKIYSKHTPINLVRDLPQGFSALEPLVDLPIGINITRFQTLLALHRSYLTPGDSSSGWTAGAAAYYVGYLQPRTFLLKYNENGTITDAVDCALDPLSETKCTLKSFTVEKGIYQTSNFRVQPTESIVRFPNITNLCPFGEVFNATRFASVYAWNRKRISNCVADYSVLYNSASFSTFKCYGVSPTKLNDLCFTNVYADSFVIRGDEVRQIAPGQTGKIADYNYKLPDDFTGCVIAWNSNNLDSKVGGNYNYLYRLFRKSNLKPFERDISTEIYQAGSTPCNGVEGFNCYFPLQSYGFQPTNGVGYQPYRVVVLSFELLHAPATVCGPKKSTNLVKNKCVNFNFNGLTGTGVLTESNKKFLPFQQFGRDIADTTDAVRDPQTLEILDITPCSFGGVSVITPGTNTSNQVAVLYQDVNCTEVPVAIHADQLTPTWRVYSTGSNVFQTRAGCLIGAEHVNNSYECDIPIGAGICASYQTQTNSPRRARSVASQSIIAYTMSLGAENSVAYSNNSIACPTNFTISVTTEILPVSMTKTSVDCTMYICGDSTECSNLLLQYGSFCTQLNRALTGIAVEQDKNTQEVFAQVKQIYKTPPIKDFGGFNFSQILPDPSKPSKRSFIEDLLFNKVTLADAGFIKQYGDCLGDIAARDLICAQKFNGLTVLPPLLTDEMIAQYTSALLAGTITSGWTFGAGAALQIPFAMQMAYRFNGIGVTQNVLYENQKLIANQFNSAIGKIQDSLSSTASALGKLQDVVNQNAQALNTLVKQLSSNFGAISSVLNDILSRLDKVEAEVQIDRLITGRLQSLQTYVTQQLIRAAEIRASANLAATKMSECVLGQSKRVDFCGKGYHLMSFPQSAPHGVVFLHVTYVPAQEKNFTTAPAICHDGKAHFPREGVFVSNGTHWFVTQRNFCEPQIITTDNTFVSGNCDVVIGIVNNTVYDPLQPELDSGGGGSDIDPYKEFGSSYQLLNFLPLDFFPDLNALVDTATALYEEELTGREHCSPHHTAIRQALVCWDELTKLIAWMSSNITSEQVRTIIVNHVNDTWGLKVRQSLWFHLSCLTFGQHTVQEFLVSFGVWIRTPAPYRPPNAPILSTLPEHTVIC

SEQ ID NO: 11064 - protein, 1301 aa, Artificial Sequence
  SARS-CoV-2/Guangdong/20SF028/2020__EPI_ISL_403936 spike protein (1-1147)(I714C_Y1110C) WhcAg construct
MFVFLVLLPLVSSQCVNLTTRTQLPPAYTNSFTRGVYYPDKVFRSSVLYSTQDLFLPFFSNVTWFHAIHVSGTNGTKRFDNPVLPFNDGVYFASTEKSNIIRGWIFGTTLDSKTQSLLIVNNATNVVIKVCEFQFCNDPFLGVYYHKNNKSWMESEFRVYSSANNCTFEYVSQPFLMDLEGKQGNFKNLREFVFKNIDGYFKIYSKHTPINLVRDLPQGFSALEPLVDLPIGINITRFQTLLALHRSYLTPGDSSSGWTAGAAAYYVGYLQPRTFLLKYNENGTITDAVDCALDPLSETKCTLKSFTVEKGIYQTSNFRVQPTESIVRFPNITNLCPFGEVFNATRFASVYAWNRKRISNCVADYSVLYNSASFSTFKCYGVSPTKLNDLCFTNVYADSFVIRGDEVRQIAPGQTGKIADYNYKLPDDFTGCVIAWNSNNLDSKVGGNYNYLYRLFRKSNLKPFERDISTEIYQAGSTPCNGVEGFNCYFPLQSYGFQPTNGVGYQPYRVVVLSFELLHAPATVCGPKKSTNLVKNKCVNFNFNGLTGTGVLTESNKKFLPFQQFGRDIADTTDAVRDPQTLEILDITPCSFGGVSVITPGTNTSNQVAVLYQDVNCTEVPVAIHADQLTPTWRVYSTGSNVFQTRAGCLIGAEHVNNSYECDIPIGAGICASYQTQTNSPRRARSVASQSIIAYTMSLGAENSVAYSNNSIACPTNFTISVTTEILPVSMTKTSVDCTMYICGDSTECSNLLLQYGSFCTQLNRALTGIAVEQDKNTQEVFAQVKQIYKTPPIKDFGGFNFSQILPDPSKPSKRSFIEDLLFNKVTLADAGFIKQYGDCLGDIAARDLICAQKFNGLTVLPPLLTDEMIAQYTSALLAGTITSGWTFGAGAALQIPFAMQMAYRFNGIGVTQNVLYENQKLIANQFNSAIGKIQDSLSSTASALGKLQDVVNQNAQALNTLVKQLSSNFGAISSVLNDILSRLDKVEAEVQIDRLITGRLQSLQTYVTQQLIRAAEIRASANLAATKMSECVLGQSKRVDFCGKGYHLMSFPQSAPHGVVFLHVTYVPAQEKNFTTAPAICHDGKAHFPREGVFVSNGTHWFVTQRNFCEPQIITTDNTFVSGNCDVVIGIVNNTVYDPLQPELDSGGGGSDIDPYKEFGSSYQLLNFLPLDFFPDLNALVDTATALYEEELTGREHCSPHHTAIRQALVCWDELTKLIAWMSSNITSEQVRTIIVNHVNDTWGLKVRQSLWFHLSCLTFGQHTVQEFLVSFGVWIRTPAPYRPPNAPILSTLPEHTVIC

SEQ ID NO: 11065 - protein, 1301 aa, Artificial Sequence
  SARS-CoV-2/Shenzhen/SZTH-001/2020__EPI_ISL_406592 spike protein (1-1147)(I714C_Y1110C) WhcAg construct
MFVFLVLLPLVSSQCVNLTTRTQLPPAYTNSFTRGVYYPDKVFRSSVLHSTQDLFLPFFSNVTWFHAIHVSGTNGTKRFDNPVLPFNDGVYFASTEKSNIIRGWIFGTTLDSKTQSLLIVNNATNVVIKVCEFQFCNDPFLGVYYHKNNKSWMESEFRVYSSANNCTFEYVSQPFLMDLEGKQGNFKNLREFVFKNIDGYFKIYSKHTPINLVRDLPQGFSALEPLVDLPIGINITRFQTLLALHRSYLTPGDSSSGWTAGAAAYYVGYLQPRTFLLKYNENGTITDAVDCALDPLSETKCTLKSFTVEKGIYQTSNFRVQPTESIVRFPNITNLCPFGEVFNATRFASVYAWNRKRISNCVADYSVLYNSASFSTFKCYGVSPTKLNDLCFTNVYADSFVIRGDEVRQIAPGQTGKIADYNYKLPDDFTGCVIAWNSNNLDSKVGGNYNYLYRLFRKSNLKPFERDISTEIYQAGSTPCNGVEGFNCYFPLQSYGFQPTNGVGYQPYRVVVLSFELLHAPATVCGPKKSTNLVKNKCVNFNFNGLTGTGVLTESNKKFLPFQQFGRDIADTTDAVRDPQTLEILDITPCSFGGVSVITPGTNTSNQVAVLYQDVNCTEVPVAIHADQLTPTWRVYSTGSNVFQTRAGCLIGAEHVNNSYECDIPIGAGICASYQTQTNSPRRARSVASQSIIAYTMSLGAENSVAYSNNSIACPTNFTISVTTEILPVSMTKTSVDCTMYICGDSTECSNLLLQYGSFCTQLNRALTGIAVEQDKNTQEVFAQVKQIYKTPPIKDFGGFNFSQILPDPSKPSKRSFIEDLLFNKVTLADAGFIKQYGDCLGDIAARDLICAQKFNGLTVLPPLLTDEMIAQYTSALLAGTITSGWTFGAGAALQIPFAMQMAYRFNGIGVTQNVLYENQKLIANQFNSAIGKIQDSLSSTASALGKLQDVVNQNAQALNTLVKQLSSNFGAISSVLNDILSRLDKVEAEVQIDRLITGRLQSLQTYVTQQLIRAAEIRASANLAATKMSECVLGQSKRVDFCGKGYHLMSFPQSAPHGVVFLHVTYVPAQEKNFTTAPAICHDGKAHFPREGVFVSNGTHWFVTQRNFCEPQIITTDNTFVSGNCDVLIGIVNNTVYDPLQPELDSGGGGSDIDPYKEFGSSYQLLNFLPLDFFPDLNALVDTATALYEEELTGREHCSPHHTAIRQALVCWDELTKLIAWMSSNITSEQVRTIIVNHVNDTWGLKVRQSLWFHLSCLTFGQHTVQEFLVSFGVWIRTPAPYRPPNAPILSTLPEHTVIC

SEQ ID NO: 11066 - protein, 1301 aa, Artificial Sequence
  SARS-CoV-2/Shenzhen/SZTH-004/2020__EPI_ISL_406595 spike protein (1-1147)(I714C_Y1110C) WhcAg construct
MFVFLVLLPLVSSQCVNLTTRTQLPPAYTNSFTRGVYYPDKVFRSSVLHSTQDLFLPFFSNVTWFHAIHVSGTNGTKRFDNPVLPFNDGVYFASTEKSNIIRGWIFGTTLDSKTQSLLIVNNATNVVIKVCEFQFCNDPFLGVYYHKNNKSWMESEFRVYSSANNCTFEYVSQPFLMDLEGKQGNFKNLREFVFKNIDGYFKIYSKHTPINLVRDLPQGFSALEPLVDLPIGINITRFQTLLALHRSYLTPGDSSSGWTAGAAAYYVGYLQPRTFLLKYNENGTITDAVDCALDPLSETKCTLKSFTVEKGIYQTSNFRVQPTESIVRFPNITNLCPFGEVFNATRFASVYAWDRKRISNCVAYYSVLYNSASFSTFKCYGVSPTKLNDLCFTNVYADSFVIRGDEVRQIAPGQTGKIADYNYKLPDDFTGCVIAWNSNNLDSKVGGNYNYLYRLFRKSNLKPFERDISTEIYQAGSTPCNGVEGFNCYFPLQSYGFQPTNGVGYQPYRVVVLSFELLHAPATVCGPKKSTNLVKNKCVNFNFNGLTGTGVLTESNKKFLPFQQFGRDIADTTDAVRDPQTLEILDITPCSFGGVSVITPGTNTSNQVAVLYQDVNCTEVPVAIHADQLTPTWRVYSTGSNVFQTRAGCLIGAEHVNNSYECDIPIGAGICASYQTQTNSPRRARSVASQSIIAYTMSLGAENSVAYSNNSIACPTNFTISVTTEILPVSMTKTSVDCTMYICGDSTECSNLLLQYGSFCTQLNRALTGIAVEQDKNTQEVFAQVKQIYKTPPIKDFGGFNFSQILPDPSKPSKRSFIEDLLFNKVTLADAGFIKQYGDCLGDIAARDLICAQKFNGLTVLPPLLTDEMIAQYTSALLAGTITSGWTFGAGAALQIPFAMQMAYRFNGIGVTQNVLYENQKLIANQFNSAIGKIQDSLSSTASALGKLQDVVNQNAQALNTLVKQLSSNFGAISSVLNDILSRLDKVEAEVQIDRLITGRLQSLQTYVTQQLIRAAEIRASANLAATKMSECVLGQSKRVDFCGKGYHLMSFPQSAPHGVVFLHVTYVPAQEKNFTTAPAICHDGKAHFPREGVFVSNGTHWFVTQRNFCEPQIITTDNTFVSGNCDVVIGIVNNTVYDPLQPELDSGGGGSDIDPYKEFGSSYQLLNFLPLDFFPDLNALVDTATALYEEELTGREHCSPHHTAIRQALVCWDELTKLIAWMSSNITSEQVRTIIVNHVNDTWGLKVRQSLWFHLSCLTFGQHTVQEFLVSFGVWIRTPAPYRPPNAPILSTLPEHTVIC

SEQ ID NO: 11067 - protein, 1301 aa, Artificial Sequence
  SARS-CoV-2/France/IDF0372/2020__EPI_ISL_406596 spike protein (1-1147)(I714C_Y1110C) WhcAg construct
MFVFLVLLPLVSSQCVNLTTRTQLPPAYTNSFTRGVYYPDKVFRSSVLHSTQDLFLPFFSNVTWFHAIHVSGTNGTKRFDNPVLPFNDGVYFASTEKSNIIRGWIFGTTLDSKTQSLLIVNNATNVVIKVCEFQFCNDPFLGVYYHKNNKSWMESEFRVYSSANNCTFEYVSQPFLMDLEGKQGNFKNLREFVFKNIDGYFKIYSKHTPINLVRDLPQGFSALEPLVDLPIGINITRFQTLLALHRSYLTPGDSSSGWTAGAAAYYVGYLQPRTFLLKYNENGTITDAVDCALDPLSETKCTLKSFTVEKGIYQTSNFRVQPTESIVRFPNITNLCPFGEVFNATRFASVYAWNRKRISNCVADYSFLYNSASFSTFKCYGVSPTKLNDLCFTNVYADSFVIRGDEVRQIAPGQTGKIADYNYKLPDDFTGCVIAWNSNNLDSKVGGNYNYLYRLFRKSNLKPFERDISTEIYQAGSTPCNGVEGFNCYFPLQSYGFQPTNGVGYQPYRVVVLSFELLHAPATVCGPKKSTNLVKNKCVNFNFNGLTGTGVLTESNKKFLPFQQFGRDIADTTDAVRDPQTLEILDITPCSFGGVSVITPGTNTSNQVAVLYQDVNCTEVPVAIHADQLTPTWRVYSTGSNVFQTRAGCLIGAEHVNNSYECDIPIGAGICASYQTQTNSPRRARSVASQSIIAYTMSLGAENSVAYSNNSIACPTNFTISVTTEILPVSMTKTSVDCTMYICGDSTECSNLLLQYGSFCTQLNRALTGIAVEQDKNTQEVFAQVKQIYKTPPIKDFGGFNFSQILPDPSKPSKRSFIEDLLFNKVTLADAGFIKQYGDCLGDIAARDLICAQKFNGLTVLPPLLTDEMIAQYTSALLAGTITSGWTFGAGAALQIPFAMQMAYRFNGIGVTQNVLYENQKLIANQFNSAIGKIQDSLSSTASALGKLQDVVNQNAQALNTLVKQLSSNFGAISSVLNDILSRLDKVEAEVQIDRLITGRLQSLQTYVTQQLIRAAEIRASANLAATKMSECVLGQSKRVDFCGKGYHLMSFPQSAPHGVVFLHVTYVPAQEKNFTTAPAICHDGKAHFPREGVFVSNGTHWFVTQRNFCEPQIITTDNTFVSGNCDVVIGIVNNTVYDPLQPELDSGGGGSDIDPYKEFGSSYQLLNFLPLDFFPDLNALVDTATALYEEELTGREHCSPHHTAIRQALVCWDELTKLIAWMSSNITSEQVRTIIVNHVNDTWGLKVRQSLWFHLSCLTFGQHTVQEFLVSFGVWIRTPAPYRPPNAPILSTLPEHTVIC

SEQ ID NO: 11068 - protein, 1301 aa, Artificial Sequence
  SARS-CoV-2/Australia/VIC01/2020__EPI_ISL_406844 spike protein (1-1147)(I714C_Y1110C) WhcAg construct
MFVFLVLLPLVSSQCVNLTTRTQLPPAYTNSFTRGVYYPDKVFRSSVLHSTQDLFLPFFSNVTWFHAIHVSGTNGTKRFDNPVLPFNDGVYFASTEKSNIIRGWIFGTTLDSKTQSLLIVNNATNVVIKVCEFQFCNDPFLGVYYHKNNKSWMESEFRVYSSANNCTFEYVSQPFLMDLEGKQGNFKNLREFVFKNIDGYFKIYSKHTPINLVRDLPQGFSALEPLVDLPIGINITRFQTLLALHRRYLTPGDSSSGWTAGAAAYYVGYLQPRTFLLKYNENGTITDAVDCALDPLSETKCTLKSFTVEKGIYQTSNFRVQPTESIVRFPNITNLCPFGEVFNATRFASVYAWNRKRISNCVADYSVLYNSASFSTFKCYGVSPTKLNDLCFTNVYADSFVIRGDEVRQIAPGQTGKIADYNYKLPDDFTGCVIAWNSNNLDSKVGGNYNYLYRLFRKSNLKPFERDISTEIYQAGSTPCNGVEGFNCYFPLQSYGFQPTNGVGYQPYRVVVLSFELLHAPATVCGPKKSTNLVKNKCVNFNFNGLTGTGVLTESNKKFLPFQQFGRDIADTTDAVRDPQTLEILDITPCSFGGVSVITPGTNTSNQVAVLYQDVNCTEVPVAIHADQLTPTWRVYSTGSNVFQTRAGCLIGAEHVNNSYECDIPIGAGICASYQTQTNSPRRARSVASQSIIAYTMSLGAENSVAYSNNSIACPTNFTISVTTEILPVSMTKTSVDCTMYICGDSTECSNLLLQYGSFCTQLNRALTGIAVEQDKNTQEVFAQVKQIYKTPPIKDFGGFNFSQILPDPSKPSKRSFIEDLLFNKVTLADAGFIKQYGDCLGDIAARDLICAQKFNGLTVLPPLLTDEMIAQYTSALLAGTITSGWTFGAGAALQIPFAMQMAYRFNGIGVTQNVLYENQKLIANQFNSAIGKIQDSLSSTASALGKLQDVVNQNAQALNTLVKQLSSNFGAISSVLNDILSRLDKVEAEVQIDRLITGRLQSLQTYVTQQLIRAAEIRASANLAATKMSECVLGQSKRVDFCGKGYHLMSFPQSAPHGVVFLHVTYVPAQEKNFTTAPAICHDGKAHFPREGVFVSNGTHWFVTQRNFCEPQIITTDNTFVSGNCDVVIGIVNNTVYDPLQPELDSGGGGSDIDPYKEFGSSYQLLNFLPLDFFPDLNALVDTATALYEEELTGREHCSPHHTAIRQALVCWDELTKLIAWMSSNITSEQVRTIIVNHVNDTWGLKVRQSLWFHLSCLTFGQHTVQEFLVSFGVWIRTPAPYRPPNAPILSTLPEHTVIC

SEQ ID NO: 11069 - protein, 1301 aa, Artificial Sequence
  SARS-CoV-2/Germany/BavPat1/2020__EPI_ISL_406862 spike protein (1-1147)(I714C_Y1110C) WhcAg construct
MFVFLVLLPLVSSQCVNLTTRTQLPPAYTNSFTRGVYYPDKVFRSSVLHSTQDLFLPFFSNVTWFHAIHVSGTNGTKRFDNPVLPFNDGVYFASTEKSNIIRGWIFGTTLDSKTQSLLIVNNATNVVIKVCEFQFCNDPFLGVYYHKNNKSWMESEFRVYSSANNCTFEYVSQPFLMDLEGKQGNFKNLREFVFKNIDGYFKIYSKHTPINLVRDLPQGFSALEPLVDLPIGINITRFQTLLALHRSYLTPGDSSSGWTAGAAAYYVGYLQPRTFLLKYNENGTITDAVDCALDPLSETKCTLKSFTVEKGIYQTSNFRVQPTESIVRFPNITNLCPFGEVFNATRFASVYAWNRKRISNCVADYSVLYNSASFSTFKCYGVSPTKLNDLCFTNVYADSFVIRGDEVRQIAPGQTGKIADYNYKLPDDFTGCVIAWNSNNLDSKVGGNYNYLYRLFRKSNLKPFERDISTEIYQAGSTPCNGVEGFNCYFPLQSYGFQPTNGVGYQPYRVVVLSFELLHAPATVCGPKKSTNLVKNKCVNFNFNGLTGTGVLTESNKKFLPFQQFGRDIADTTDAVRDPQTLEILDITPCSFGGVSVITPGTNTSNQVAVLYQGVNCTEVPVAIHADQLTPTWRVYSTGSNVFQTRAGCLIGAEHVNNSYECDIPIGAGICASYQTQTNSPRRARSVASQSIIAYTMSLGAENSVAYSNNSIACPTNFTISVTTEILPVSMTKTSVDCTMYICGDSTECSNLLLQYGSFCTQLNRALTGIAVEQDKNTQEVFAQVKQIYKTPPIKDFGGFNFSQILPDPSKPSKRSFIEDLLFNKVTLADAGFIKQYGDCLGDIAARDLICAQKFNGLTVLPPLLTDEMIAQYTSALLAGTITSGWTFGAGAALQIPFAMQMAYRFNGIGVTQNVLYENQKLIANQFNSAIGKIQDSLSSTASALGKLQDVVNQNAQALNTLVKQLSSNFGAISSVLNDILSRLDKVEAEVQIDRLITGRLQSLQTYVTQQLIRAAEIRASANLAATKMSECVLGQSKRVDFCGKGYHLMSFPQSAPHGVVFLHVTYVPAQEKNFTTAPAICHDGKAHFPREGVFVSNGTHWFVTQRNFCEPQIITTDNTFVSGNCDVVIGIVNNTVYDPLQPELDSGGGGSDIDPYKEFGSSYQLLNFLPLDFFPDLNALVDTATALYEEELTGREHCSPHHTAIRQALVCWDELTKLIAWMSSNITSEQVRTIIVNHVNDTWGLKVRQSLWFHLSCLTFGQHTVQEFLVSFGVWIRTPAPYRPPNAPILSTLPEHTVIC

SEQ ID NO: 11070 - protein, 1301 aa, Artificial Sequence
  SARS-CoV-2/Wuhan/HBCDC-HB-02/2020__EPI_ISL_412978 spike protein (1-1147)(I714C_Y1110C) WhcAg construct
MFVFLVLLPLVSSQCVNLTTRTQLPPAYTNSFTRGVYYPDKVFRSSVLHSTQDLFLPFFSNVTWFHAIHVSGTNGTKRFDNPVLPFNDGVYFASTEKSNIIRGWIFGTTLDSKTQSLLIVNNATNVVIKVCEFQFCNDPFLGVYYHKNNKSWMESEFRVYSSANNCTFEYVSQPFLMDLEGKQGNFKNLREFVFKNIDGYFKIYSKHTPINLVRDLPQGFSALEPLVDLPIGINITRFQTLLALHRSYLTPGDSSSGWTAGAAAYYVGYLQPRTFLLKYNENGTITDAVDCALDPLSETKCTLKSFTVEKGIYQTSNFRVQPTESIVRFPNITNLCPFGEVFNATRFASVYAWNRKRISNCVADYSVLYNSASFSTFKCYGVSPTKLNDLCFTNVYADSFVIRGDEVRQIAPGQTGKIADYNYKLPDDFTGCVIAWNSNNLDSKVGGNYNYLYRLFRKSNLKPFERDISTEIYQAGSTPCNGVEGFNCYFPLQSYGFQPTNGVGYQPYRVVVLSFELLHAPATVCGPKKSTNLVKNKCVNFNFNGLTGTGVLTESNKKFLPFQQFGRDIADTTDAVRDPQTLEILDITPCSFGGVSVITPGTNTSNQVAVLYQDVNCTEVPVAIHADQLTPTWRVYSTGSNVFQTRAGCLIGAEHVNNSYECDIPIGAGICASYQTQTNSPRRARSVASQSIIAYTMSLGAENSVAYSNNSIACPTNFTISVTTEILPVSMTKTSVDCTMYICGDSTECSNFLLQYGSFCTQLNRALTGIAVEQDKNTQEVFAQVKQIYKTPPIKDFGGFNFSQILPDPSKPSKRSFIEDLLFNKVTLADAGFIKQYGDCLGDIAARDLICAQKFNGLTVLPPLLTDEMIAQYTSALLAGTITSGWTFGAGAALQIPFAMQMAYRFNGIGVTQNVLYENQKLIANQFNSAIGKIQDSLSSTASALGKLQDVVNQNAQALNTLVKQLSSNFGAISSVLNDILSRLDKVEAEVQIDRLITGRLQSLQTYVTQQLIRAAEIRASANLAATKMSECVLGQSKRVDFCGKGYHLMSFPQSAPHGVVFLHVTYVPAQEKNFTTAPAICHDGKAHFPREGVFVSNGTHWFVTQRNFCEPQIITTDNTFVSGNCDVVIGIVNNTVYDPLQPELDSGGGGSDIDPYKEFGSSYQLLNFLPLDFFPDLNALVDTATALYEEELTGREHCSPHHTAIRQALVCWDELTKLIAWMSSNITSEQVRTIIVNHVNDTWGLKVRQSLWFHLSCLTFGQHTVQEFLVSFGVWIRTPAPYRPPNAPILSTLPEHTVIC

SEQ ID NO: 11071 - protein, 1301 aa, Artificial Sequence
  SARS-CoV-2/Australia/QLD02/2020__EPI_ISL_407896 spike protein (1-1147)(I714C_Y1110C) WhcAg construct
MFVFLVLLPLVSSQCVNLTTRTQLPPAYTNSFTRGVYYPDKVFRSSVLHSTQDLFLPFFSNVTWFHAIHVSGTNGTKRFDNPVLPFNDGVYFASTEKSNIIRGWIFGTTLDSKTQSLLIVNNATNVVIKVCEFQFCNDPFLGVYYHKNNKSWMESEFRVYSSANNCTFEYVSQPFLMDLEGKQGNFKNLREFVFKNIDGYFKIYSKHTPINLVRDLPQGFSALEPLVDLPIGINITRFQTLLALHRSYLTPGDSSSGWTAGAAAYYVGYLQPRTFLLKYNENGTITDAVDCALDPLSETKCTLKSFTVEKGIYQTSNFRVQPTESIVRFPNITNLCPFGEVFNATRFASVYAWNRKRISNCVADYSVLYNSASFSTFKCYGVSPTKLNDLCFTNVYADSFVIRGDEVRQIAPGQTGKIADYNYKLPDDFTGCVIAWNSNNLDSKVGGNYNYLYRLFRKSNLKPFERDISTEIYQAGSTPCNGVEGFNCYFPLQSYGFQPTNGVGYQPYRVVVLSFELLHAPATVCGPKKSTNLVKNKCVNFNFNGLTGTGVLTESNKKFLPFQQFGRDIADTTDAVRDPQTLEILDITPCSFGGVSVITPGTNTSNQVAVLYQDVNCTEVPVAIHADQLTPTWRVYSTGSNVFQTRAGCLIGAEHVNNSYECDIPIGAGICASYQTQTNSPRRARSVASQSIIAYTMSLGAENSVAYSNNSIACPTNFTISVTTEILPVSMTKTSVDCTMYICGDSTECSNLLLQYGSFCTQLNRALTGIAVEQDKNTQEVFAQVKQIYKTPPIKDFGGFNFSQILPDPSKPSKRSFIEDLLFNKVTLADAGFIKQYGDCLGDIAARDLICAQKFNGLTVLPPLLTDEMIAQYTSALLAGTITSGWTFGAGAALQIPFAMQMAYRFNGIGVTQNVLYENQKLIANQFNSAIGKIQDSLSSTASALGKLQDVVNQNAQALNTLVKQLSSNFGAISSVLNDILSRLDKVEAEVQIDRLITGRLQSLQTYVTQQLIRAAEIRASANLAATKMSECVLGQSKRVDFCGKGYHLMSFPQSAPHGVVFLHVTYVPAQEKNFTTAPAICHDGKAHFPREGVFVSNGTHWFVTQRNFCEPQIITTDNTFVSGNCDVVIGIVNNTVYDPLQLELDSGGGGSDIDPYKEFGSSYQLLNFLPLDFFPDLNALVDTATALYEEELTGREHCSPHHTAIRQALVCWDELTKLIAWMSSNITSEQVRTIIVNHVNDTWGLKVRQSLWFHLSCLTFGQHTVQEFLVSFGVWIRTPAPYRPPNAPILSTLPEHTVIC

SEQ ID NO: 11072 - protein, 1301 aa, Artificial Sequence
  SARS-CoV-2/India/1-31/2020__EPI_ISL_413523 spike protein (1-1147)(I714C_Y1110C) WhcAg construct
MFVFLVLLPLVSSQCVNLTTRTQLPPAYTNSFTRGVYYPDKVFRSSVLHSTQDLFLPFFSNVTWFHAIHVSGTNGTKRFDNPVLPFNDGVYFASTEKSNIIRGWIFGTTLDSKTQSLLIVNNATNVVIKVCEFQFCNDPFLGVYYHKNNKSWMESEFRVYSSANNCTFEYVSQPFLMDLEGKQGNFKNLREFVFKNIDGYFKIYSKHTPINLVRDLPQGFSALEPLVDLPIGINITRFQTLLALHRSYLTPGDSSSGWTAGAAAYYVGYLQPRTFLLKYNENGTITDAVDCALDPLSETKCTLKSFTVEKGIYQTSNFRVQPTESIVRFPNITNLCPFGEVFNATRFASVYAWNRKRISNCVADYSVLYNSASFSTFKCYGVSPTKLNDLCFTNVYADSFVIRGDEVRQIAPGQTGKIADYNYKLPDDFTGCVIAWNSNNLDSKVGGNYNYLYRLFRKSNLKPFERDISTEIYQAGSTPCNGVEGFNCYFPLQSYGFQPTNGVGYQPYRVVVLSFELLHAPATVCGPKKSTNLVKNKCVNFNFNGLTGTGVLTESNKKFLPFQQFGRDIADTTDAVRDPQTLEILDITPCSFGGVSVITPGTNTSNQVAVLYQDVNCTEVPVAIHADQLTPTWRVYSTGSNVFQTRAGCLIGAEHVNNSYECDIPIGAGICASYQTQTNSPRRARSVASQSIIAYTMSLGAENSVAYSNNSIACPTNFTISVTTEILPVSMTKTSVDCTMYICGDSTECSNLLLQYGSFCTQLNRALTGIAVEQDKNTQEVFAQVKQIYKTPPIKDFGGFNFSQILPDPSKPSKRSFIEDLLFNKVTLADAGFIKQYGDCLGDIAARDLICAQKFNGLTVLPPLLTDEMIAQYTSALLAGTITSGWTFGAGAALQIPFAMQMAYRFNGIGVTQNVLYENQKLIANQFNSVIGKIQDSLSSTASALGKLQDVVNQNAQALNTLVKQLSSNFGAISSVLNDILSRLDKVEAEVQIDRLITGRLQSLQTYVTQQLIRAAEIRASANLAATKMSECVLGQSKRVDFCGKGYHLMSFPQSAPHGVVFLHVTYVPAQEKNFTTAPAICHDGKAHFPREGVFVSNGTHWFVTQRNFCEPQIITTDNTFVSGNCDVVIGIVNNTVYDPLQPELDSGGGGSDIDPYKEFGSSYQLLNFLPLDFFPDLNALVDTATALYEEELTGREHCSPHHTAIRQALVCWDELTKLIAWMSSNITSEQVRTIIVNHVNDTWGLKVRQSLWFHLSCLTFGQHTVQEFLVSFGVWIRTPAPYRPPNAPILSTLPEHTVIC

SEQ ID NO: 11073 - protein, 1301 aa, Artificial Sequence
  SARS-CoV-2/Guangdong/GD2020087-P0008/2020__EPI_ISL_413863 spike protein (1-1147)(I714C_Y1110C) WhcAg construct
MFVFLVLLPLVSSQCVNLTTRTQLPPAYTNSFTRGVYYPDKVFRSSVLHSTQDLFLPFFSNVTWFHAIHVSGTNGTKRFDNPVLPFNDGVYFASTEKSNIIRGWIFGTTLDSKTQSLLIVNNATNVVIKVCEFQFCNDPFLGVYYHKNNKSWMESEFRVYSSANNCTFEYVSQPFLMDLEGKQGNFKNLREFVFKNIDGYFKIYSKHTPINLVRDLPQGFSALEPLVDLPIGINITRFQTLLALHRSYLTPGDSSSGWTAGAAAYYVGYLQPRTFLLKYNENGTITDAVDCALDPLSETKCTLKSFTVEKGIYQTSNFRVQPTESIVRFPNITNLCPFGEVFNATRFASVYAWNRKRISNCVADYSVLYNSASFSTFKCYGVSPTKLNDLCFTNVYADSFVIRGDEVREIAPGQTGKIADYNYKLPDDFTGCVIAWNSNNLDSKVGGNYNYLYRLFRKSNLKPFERDISTEIYQAGSTPCNGVEGFNCYFPLQSYGFQPTNGVGYQPYRVVVLSFELLHAPATVCGPKKSTNLVKNKCVNFNFNGLTGTGVLTESNKKFLPFQQFGRDIADTTDAVRDPQTLEILDITPCSFGGVSVITPGTNTSNQVAVLYQDVNCTEVPVAIHADQLTPTWRVYSTGSNVFQTRAGCLIGAEHVNNSYECDIPIGAGICASYQTQTNSPRRARSVASQSIIAYTMSLGAENSVAYSNNSIACPTNFTISVTTEILPVSMTKTSVDCTMYICGDSTECSNLLLQYGSFCTQLNRALTGIAVEQDKNTQEVFAQVKQIYKTPPIKDFGGFNFSQILPDPSKPSKRSFIEDLLFNKVTLADAGFIKQYGDCLGDIAARDLICAQKFNGLTVLPPLLTDEMIAQYTSALLAGTITSGWTFGAGAALQIPFAMQMAYRFNGIGVTQNVLYENQKLIANQFNSAIGKIQDSLSSTASALGKLQDVVNQNAQALNTLVKQLSSNFGAISSVLNDILSRLDKVEAEVQIDRLITGRLQSLQTYVTQQLIRAAEIRASANLAATKMSECVLGQSKRVDFCGKGYHLMSFPQSAPHGVVFLHVTYVPAQEKNFTTAPAICHDGKAHFPREGVFVSNGTHWFVTQRNFCEPQIITTDNTFVSGNCDVVIGIVNNTVYDPLQPELDSGGGGSDIDPYKEFGSSYQLLNFLPLDFFPDLNALVDTATALYEEELTGREHCSPHHTAIRQALVCWDELTKLIAWMSSNITSEQVRTIIVNHVNDTWGLKVRQSLWFHLSCLTFGQHTVQEFLVSFGVWIRTPAPYRPPNAPILSTLPEHTVIC

SEQ ID NO: 11074 - protein, 1301 aa, Artificial Sequence
  SARS-CoV-2/Sweden/01/2020__EPI_ISL_411951 spike protein (1-1147)(I714C_Y1110C) WhcAg construct
MFVFLVLLPLVSSQCVNLTTRTQLPPAYTNSFTRGVYYPDKVFRSSVLHSTQDLFLPFFSNVTWFHAIHVSGTNGTKRFDNPVLPFNDGVYFASTEKSNIIRGWIFGTTLDSKTQSLLIVNNATNVVIKVCEFQFCNDPFLGVYYHKNNKSWMESEFRVYSSANNCTFEYVSQPFLMDLEGKQGNFKNLREFVFKNIDGYFKIYSKHTPINLVRDLPQGFSALEPLVDLPIGINITRFQTLLALHRSYLTPGDSSSGWTAGAAAYYVGYLQPRTFLLKYNENGTITDAVDCALDPLSETKCTLKSFTVEKGIYQTSNFRVQPTESIVRFPNITNLCPFGEVFNATRFASVYAWNRKRISNCVADYSVLYNSASFSTFKCYGVSPTKLNDLCFTNVYADSFVIRGDEVRQIAPGQTGKIADYNYKLPDDFTGCVIAWNSNNLDSKVGGNYNYLYRLFRKSNLKPFERDISTEIYQAGSTPCNGVEGFNCYFPLQSYGFQPTNGVGYQPYRVVVLSFELLHAPATVCGPKKSTNLVKNKCVNFNFNGLTGTGVLTESNKKFLPFQQFGRDIADTTDAVRDPQTLEILDITPCSFGGVSVITPGTNTSNQVAVLYQDVNCTEVPVAIHADQLTPTWRVYSTGSNVFQTRAGCLIGAEHVNNSYECDIPIGAGICASYQTQTNSPRRARSVASQSIIAYTMSLGAENSVAYSNNSIACPTNFTISVTTEILPVSMTKTSVDCTMYICGDSTECSNLLLQYGSFCTQLNRALTGIAVEQDKNTQEVFAQVKQIYKTPPIKDCGGFNFSQILPDPSKPSKRSFIEDLLFNKVTLADAGFIKQYGDCLGDIAARDLICAQKFNGLTVLPPLLTDEMIAQYTSALLAGTITSGWTFGAGAALQIPFAMQMAYRFNGIGVTQNVLYENQKLIANQFNSAIGKIQDSLSSTASALGKLQDVVNQNAQALNTLVKQLSSNFGAISSVLNDILSRLDKVEAEVQIDRLITGRLQSLQTYVTQQLIRAAEIRASANLAATKMSECVLGQSKRVDFCGKGYHLMSFPQSAPHGVVFLHVTYVPAQEKNFTTAPAICHDGKAHFPREGVFVSNGTHWFVTQRNFCEPQIITTDNTFVSGNCDVVIGIVNNTVYDPLQPELDSGGGGSDIDPYKEFGSSYQLLNFLPLDFFPDLNALVDTATALYEEELTGREHCSPHHTAIRQALVCWDELTKLIAWMSSNITSEQVRTIIVNHVNDTWGLKVRQSLWFHLSCLTFGQHTVQEFLVSFGVWIRTPAPYRPPNAPILSTLPEHTVIC

SEQ ID NO: 11075 - protein, 1301 aa, Artificial Sequence
  SARS-CoV-2/Tianmen/HBCDC-HB-07/2020__EPI_ISL_412983 spike protein (1-1147)(I714C_Y1110C) WhcAg construct
MFVFLVLLPLVSSQCVNLTTRTQLPPAYTNSFTRGVYYPDKVFRSSVLHSTQDLFLPFFSNVTWFHAIHVSGTNGTKRFDNPVLPFNDGVYFASTEKSNIIRGWIFGTTLDSKTQSLLIVNNATNVVIKVCEFQFCNDPFLGVYYHKNNKSWMESEFRVYSSANNCTFEYVSQPFLMDLEGKQGNFKNLREFVFKNIDGYFKIYSKHTPINLVRDLPQGFSALEPLVDLPIGINITRFQTLLALHRSYLTPGDSSSGWTAGAAAYYVGYLQPRTFLLKYNENGTITDAVDCALDPLSETKCTLKSFTVEKGIYQTSNFRVQPTESIVRFPNITNLCPFGEVFNATRFASVYAWNRKRISNCVADYSVLYNSASFSTFKCYGVSPTKLNDLCFTNVYADSFVIRGDEVRQIAPGQTGKIADYNYKLPDDFTGCVIAWNSNNLDSKVGGNYNYLYRLFRKSNLKPFERDISTEIYQAGSTPCNGVEGFNCYFPLQSYGFQPTNGVGYQPYRVVVLSFELLHAPATVCGPKKSTNLVKNKCVNFNFNGLTGTGVLTESNKKFLPFQQFGRDIADTTDAVRDPQTLEILDITPCSFGGVSVITPGTNTSNQVAVLYQDLNCTEVPVAIHADQLTPTWRVYSTGSNVFQTRAGCLIGAEHVNNSYECDIPIGAGICASYQTQTNSPRRARSVASQSIIAYTMSLGAENSVAYSNNSIACPTNFTISVTTEILPVSMTKTSVDCTMYICGDSTECSNLLLQYGSFCTQLNRALTGIAVEQDKNTQEVFAQVKQIYKTPPIKDFGGFNFSQILPDPSKPSKRSFIEDLLFNKVTLADAGFIKQYGDCLGDIAARDLICAQKFNGLTVLPPLLTDEMIAQYTSALLAGTITSGWTFGAGAALQIPFAMQMAYRFNGIGVTQNVLYENQKLIANQFNSAIGKIQDSLSSTASALGKLQDVVNQNAQALNTLVKQLSSNFGAISSVLNDILSRLDKVEAEVQIDRLITGRLQSLQTYVTQQLIRAAEIRASANLAATKMSECVLGQSKRVDFCGKGYHLMSFPQSAPHGVVFLHVTYVPAQEKNFTTAPAICHDGKAHFPREGVFVSNGTHWFVTQRNFCEPQIITTDNTFVSGNCDVVIGIVNNTVYDPLQPELDSGGGGSDIDPYKEFGSSYQLLNFLPLDFFPDLNALVDTATALYEEELTGREHCSPHHTAIRQALVCWDELTKLIAWMSSNITSEQVRTIIVNHVNDTWGLKVRQSLWFHLSCLTFGQHTVQEFLVSFGVWIRTPAPYRPPNAPILSTLPEHTVIC

SEQ ID NO: 11076 - protein, 1301 aa, Artificial Sequence
  SARS-CoV-2/Hong Kong/case42_VM20002493/2020__EPI_ISL_414527 spike protein (1-1147)(I714C_Y1110C) WhcAg construct
MFVFLVLLPLVSSQCVNLTTRTQLPPAYTNSFTRGVYYPDKVFRSSVLHSTQDLFLPFFSNVTWFHAIHVSGTNGTKRFDNPVLPFNDGVYFASTEKSNIIRGWIFGTTLDSKTQSLLIVNNATNVVIKVCEFQFCNDPFLGVYYHKNNKSWMESEFRVYSSANNCTFEYVSQPFLMDLEGKQGNFKNLREFVFKNIDGYFKIYSKHTPINLVRDLPQGFSALEPLVDLPIGINITRFQTLLALHRSYLTPGDSSSGWTAGAAAYYVGYLQPRTFLLKYNENGTITDAVDCALDPLSETKCTLKSFTVEKGIYQTSNFRVQPTESIVRFPNITNLCPFGEVFNATRFASVYAWNRKRISNCVADYSVLYNSASFSTFKCYGVSPTKLNDLCFTNVYADSFVIRGDEVRQIAPGQTGKIADYNYKLPDDFTGCVIAWNSNNLDSKVGGNYNYLYRLFRKSNLKPFERDISTEIYQAGSTPCNGVEGFNCYFPLQSYGFQPTNGVGYQPYRVVVLSFELLHAPATVCGPKKSTNLVKNKCVNFNFNGLTGTGVLTESNKKFLPFQQFGRDIADTTDAVRDPQTLEILDITPCSFGGVSVITPGTNTSNQVAVLYQDVNCTEVPVAIHADQLTPTWRVYSTGSNVFQTRAGCLIGAEHVNNSYECDIPIGAGICASYQTQTNSPRRARSVASQSIIAYTMSLGAENSVAYSNNSIACPTNFAISVTTEILPVSMTKTSVDCTMYICGDSTECSNLLLQYGSFCTQLNRALTGIAVEQDKNTQEVFAQVKQIYKTPPIKDFGGFNFSQILPDPSKPSKRSFIEDLLFNKVTLADAGFIKQYGDCLGDIAARDLICAQKFNGLTVLPPLLTDEMIAQYTSALLAGTITSGWTFGAGAALQIPFAMQMAYRFNGIGVTQNVLYENQKLIANQFNSAIGKIQDSLSSTASALGKLQDVVNQNAQALNTLVKQLSSNFGAISSVLNDILSRLDKVEAEVQIDRLITGRLQSLQTYVTQQLIRAAEIRASANLAATKMSECVLGQSKRVDFCGKGYHLMSFPQSAPHGVVFLHVTYVPAQEKNFTTAPAICHDGKAHFPREGVFVSNGTHWFVTQRNFCEPQIITTDNTFVSGNCDVVIGIVNNTVYDPLQPELDSGGGGSDIDPYKEFGSSYQLLNFLPLDFFPDLNALVDTATALYEEELTGREHCSPHHTAIRQALVCWDELTKLIAWMSSNITSEQVRTIIVNHVNDTWGLKVRQSLWFHLSCLTFGQHTVQEFLVSFGVWIRTPAPYRPPNAPILSTLPEHTVIC

SEQ ID NO: 11077 - protein, 1301 aa, Artificial Sequence
  SARS-CoV-2/USA/CruiseA-23/2020__EPI_ISL_414482 spike protein (1-1147)(I714C_Y1110C) WhcAg construct
MFVFLVLLPLVSSQCVNLTTRTQLPPAYTNSFTRGVYYPDKVFRSSVLHSTQDLFLPFFSNVTWFHAIHVSGTNGTKRFDNPVLPFNDGVYFASTEKSNIIRGWIFGTTLDSKTQSLLIVNNATNVVIKVCEFQFCNDPFLGVYYHKNNKSWMESEFRVYSSANNCTFEYVSQPFLMDLEVKQGNFKNLREFVFKNIDGYFKIYSKHTPINLVRDLPQGFSALEPLVDLPIGINITRFQTLLALHRSYLTPGDSSSGWTAGAAAYYVGYLQPRTFLLKYNENGTITDAVDCALDPLSETKCTLKSFTVEKGIYQTSNFRVQPTESIVRFPNITNLCPFGEVFNATRFASVYAWNRKRISNCVADYSVLYNSASFSTFKCYGVSPTKLNDLCFTNVYADSFVIRGDEVRQIAPGQTGKIADYNYKLPDDFTGCVIAWNSNNLDSKVGGNYNYLYRLFRKSNLKPFERDISTEIYQAGSTPCNGVEGFNCYFPLQSYGFQPTNGVGYQPYRVVVLSFELLHAPATVCGPKKSTNLVKNKCVNFNFNGLTGTGVLTESNKKFLPFQQFGRDIADTTDAVRDPQTLEILDITPCSFGGVSVITPGTNTSNQVAVLYQDVNCTEVPVAIHADQLTPTWRVYSTGSNVFQTRAGCLIGAEHVNNSYECDIPIGAGICASYQTQTNSPRRARSVASQSIIAYTMSLGAENSVAYSNNSIACPTNFTISVTTEILPVSMTKTSVDCTMYICGDSTECSNLLLQYGSFCTQLNRALTGIAVEQDKNTQEVFAQVKQIYKTPPIKDFGGFNFSQILPDPSKPSKRSFIEDLLFNKVTLADAGFIKQYGDCLGDIAARDLICAQKFNGLTVLPPLLTDEMIAQYTSALLAGTITSGWTFGAGAALQIPFAMQMAYRFNGIGVTQNVLYENQKLIANQFNSAIGKIQDSLSSTASALGKLQDVVNQNAQALNTLVKQLSSNFGAISSVLNDILSRLDKVEAEVQIDRLITGRLQSLQTYVTQQLIRAAEIRASANLAATKMSECVLGQSKRVDFCGKGYHLMSFPQSAPHGVVFLHVTYVPAQEKNFTTAPAICHDGKAHFPREGVFVSNGTHWFVTQRNFCEPQIITTDNTFVSGNCDVVIGIVNNTVYDPLQPELDSGGGGSDIDPYKEFGSSYQLLNFLPLDFFPDLNALVDTATALYEEELTGREHCSPHHTAIRQALVCWDELTKLIAWMSSNITSEQVRTIIVNHVNDTWGLKVRQSLWFHLSCLTFGQHTVQEFLVSFGVWIRTPAPYRPPNAPILSTLPEHTVIC

SEQ ID NO: 11078 - protein, 1301 aa, Artificial Sequence
  SARS-CoV-2/Hong Kong/case85_VM20002868/2020__EPI_ISL_414519 spike protein (1-1147)(I714C_Y1110C) WhcAg construct
MFVFLVLVPLVSSQCVNLTTRTQLPPAYTNSFTRGVYYPDKVFRSSVLHSTQDLFLPFFSNVTWFHAIHVSGTNGTKRFDNPVLPFNDGVYFASTEKSNIIRGWIFGTTLDSKTQSLLIVNNATNVVIKVCEFQFCNDPFLGVYYHKNNKSWMESEFRVYSSANNCTFEYVSQPFLMDLEGKQGNFKNLREFVFKNIDGYFKIYSKHTPINLVRDLPQGFSALEPLVDLPIGINITRFQTLLALHRSYLTPGDSSSGWTAGAAAYYVGYLQPRTFLLKYNENGTITDAVDCALDPLSETKCTLKSFTVEKGIYQTSNFRVQPTESIVRFPNITNLCPFGEVFNATRFASVYAWNRKRISNCVADYSVLYNSASFSTFKCYGVSPTKLNDLCFTNVYADSFVIRGDEVRQIAPGQTGKIADYNYKLPDDFTGCVIAWNSNNLDSKVGGNYNYLYRLFRKSNLKPFERDISTEIYQAGSTPCNGVEGFNCYFPLQSYGFQPTNGVGYQPYRVVVLSFELLHAPATVCGPKKSTNLVKNKCVNFNFNGLTGTGVLTESNKKFLPFQQFGRDIADTTDAVRDPQTLEILDITPCSFGGVSVITPGTNTSNQVAVLYQDVNCTEVPVAIHADQLTPTWRVYSTGSNVFQTRAGCLIGAEHVNNSYECDIPIGAGICASYQTQTNSPRRARSVASQSIIAYTMSLGAENSVAYSNNSIACPTNFTISVTTEILPVSMTKTSVDCTMYICGDSTECSNLLLQYGSFCTQLNRALTGIAVEQDKNTQEVFAQVKQIYKTPPIKDFGGFNFSQILPDPSKPSKRSFIEDLLFNKVTLADAGFIKQYGDCLGDIAARDLICAQKFNGLTVLPPLLTDEMIAQYTSALLAGTITSGWTFGAGAALQIPFAMQMAYRFNGIGVTQNVLYENQKLIANQFNSAIGKIQDSLSSTASALGKLQDVVNQNAQALNTLVKQLSSNFGAISSVLNDILSRLDKVEAEVQIDRLITGRLQSLQTYVTQQLIRAAEIRASANLAATKMSECVLGQSKRVDFCGKGYHLMSFPQSAPHGVVFLHVTYVPAQEKNFTTAPAICHDGKAHFPREGVFVSNGTHWFVTQRNFCEPQIITTDNTFVSGNCDVVIGIVNNTVYDPLQPELDSGGGGSDIDPYKEFGSSYQLLNFLPLDFFPDLNALVDTATALYEEELTGREHCSPHHTAIRQALVCWDELTKLIAWMSSNITSEQVRTIIVNHVNDTWGLKVRQSLWFHLSCLTFGQHTVQEFLVSFGVWIRTPAPYRPPNAPILSTLPEHTVIC

SEQ ID NO: 11079 - protein, 1301 aa, Artificial Sequence; identical to SEQ ID NO: 11069
  SARS-CoV-2/England/200990660/2020__EPI_ISL_414523 spike protein (1-1147)(I714C_Y1110C) WhcAg construct

SEQ ID NO: 11080 - protein, 1301 aa, Artificial Sequence
  SARS-CoV-2/Australia/NSW09/2020__EPI_ISL_413595 spike protein (1-1147)(I714C_Y1110C) WhcAg construct
MFVFLVLLPLVSSQCVNLTTRTQLPPAYTNSFTRGVYYPDKVFRSSVLHSTQDLFLPFFSNVTWFHAIHVSGTNGTKRFDNPVLPFNDGVYFASTEKSNIIRGWIFGTTLDSKTQSLLIVNNATNVVIKVCEFQFCNDPFLGVYYHKNNKSWMESEFRVYSSANNCTFEYVSQPFLMDLEGKQGNFKNLREFVFKNIDGYFKIYSKHTPINLVRDLPQGFSALEPLVDLPIGINITRFQTLLALHRSYLTPGDSSSGWTAGAAAYYVGYLQPRTFLLKYNENGTITDAVDCALDPLSETKCTLKSFTVEKGIYQTSNFRVQPTESIVRFPNITNLCPFGEVFNATRFASVYAWNRKRISNCVADYSVLYNSASFSTFKCYGVSPTKLNDLCFTNVYADSFVIRGDEVRQIAPGQTGKIADYNYKLPDDFTGCVIAWNSNNLDSKVGGNYNYLYRLFRKSNLKPFERDISTEIYQAGSTPCNGVEGFNCYFPLQSYGFQPTNGVGYQPYRVVVLSFELLHAPATVCGPKKSTNLVKNKCVNFNFNGLTGTGVLTESNKKFLPFQQFGRDIADTTDAVRDPQTLEILDITPCSFGGVSVITPGTNTSNQVAVLYQDVNCTEVPVAIHADQLTPTWRVYSTGSNVFQTRAGCLIGAEHVNNSYECDIPIGAGICASYQTQTNSPRRARSVASQSIIAYTMSLGAENSVAYSNNSIACPTNFTISVTTEILPVSMTKTSVDCTMYICGDSTECSNLLLQYGSFCTQLNRALTGIAVEQDKNTQEVFAQVKQIYKTPPIKDFGGFNFSQILPDPSKPSKRSFIEDLLFNKVTLADAGFIKQYGDCLGDIAARDLICAQKFNGLTVLPPLLTDEMIAQYTSALLAGTITSGWTFGAGAALQIPFAMQMAYRFNGIGVTQNVLYENQKLIANQFNSAIGKIQDSLSFTASALGKLQDVVNQNAQALNTLVKQLSSNFGAISSVLNDILSRLDKVEAEVQIDRLITGRLQSLQTYVTQQLIRAAEIRASANLAATKMSECVLGQSKRVDFCGKGYHLMSFPQSAPHGVVFLHVTYVPAQEKNFTTAPAICHDGKAHFPREGVFVSNGTHWFVTQRNFCEPQIITTDNTFVSGNCDVVIGIVNNTVYDPLQPELDSGGGGSDIDPYKEFGSSYQLLNFLPLDFFPDLNALVDTATALYEEELTGREHCSPHHTAIRQALVCWDELTKLIAWMSSNITSEQVRTIIVNHVNDTWGLKVRQSLWFHLSCLTFGQHTVQEFLVSFGVWIRTPAPYRPPNAPILSTLPEHTVIC

SEQ ID NO: 11081 - protein, 1301 aa, Artificial Sequence; identical to SEQ ID NO: 11061
  SARS-CoV-2/Australia/NSW10/2020__EPI_ISL_413596 spike protein (1-1147)(I714C_Y1110C) WhcAg construct

SEQ ID NO: 11082 - protein, 1301 aa, Artificial Sequence
  SARS-CoV-2/Switzerland/1000477797/2020__EPI_ISL_413023 spike protein (1-1147)(I714C_Y1110C) WhcAg construct
MFVFLVLLPLVSSQCVNLTTRTQLPPAYTNSFTRGVYYPDKVFRSSVLHSTQDLFLPFFSNVTWFHAIHVSGTNGTKRFDNPVLPFNDGVYFASTEKSNIIRGWIFGTTLDSKTQSLLIVNNATNVVIKVCEFQFCNDPFLGVYYHKNNKSWMESEFRVYSSANNCTFEYVSQPFLMDLEGKQGNFKNLREFVFKNIDGYFNIYSKHTPINLVRDLPQGFSALEPLVDLPIGINITRFQTLLALHRSYLTPGDSSSGWTAGAAAYYVGYLQPRTFLLKYNENGTITDAVDCALDPLSETKCTLKSFTVEKGIYQTSNFRVQPTESIVRFPNITNLCPFGEVFNATRFASVYAWNRKRISNCVADYSVLYNSASFSTFKCYGVSPTKLNDLCFTNVYADSFVIRGDEVRQIAPGQTGKIADYNYKLPDDFTGCVIAWNSNNLDSKVGGNYNYLYRLFRKSNLKPFERDISTEIYQAGSTPCNGVEGFNCYFPLQSYGFQPTNGVGYQPYRVVVLSFELLHAPATVCGPKKSTNLVKNKCVNFNFNGLTGTGVLTESNKKFLPFQQFGRDIADTTDAVRDPQTLEILDITPCSFGGVSVITPGTNTSNQVAVLYQGVNCTEVPVAIHADQLTPTWRVYSTGSNVFQTRAGCLIGAEHVNNSYECDIPIGAGICASYQTQTNSPRRARSVASQSIIAYTMSLGAENSVAYSNNSIACPTNFTISVTTEILPVSMTKTSVDCTMYICGDSTECSNLLLQYGSFCTQLNRALTGIAVEQDKNTQEVFAQVKQIYKTPPIKDFGGFNFSQILPDPSKPSKRSFIEDLLFNKVTLADAGFIKQYGDCLGDIAARDLICAQKFNGLTVLPPLLTDEMIAQYTSALLAGTITSGWTFGAGAALQIPFAMQMAYRFNGIGVTQNVLYENQKLIANQFNSAIGKIQDSLSSTASALGKLQDVVNQNAQALNTLVKQLSSNFGAISSVLNDILSRLDKVEAEVQIDRLITGRLQSLQTYVTQQLIRAAEIRASANLAATKMSECVLGQSKRVDFCGKGYHLMSFPQSAPHGVVFLHVTYVPAQEKNFTTAPAICHDGKAHFPREGVFVSNGTHWFVTQRNFCEPQIITTDNTFVSGNCDVVIGIVNNTVYDPLQPELDSGGGGSDIDPYKEFGSSYQLLNFLPLDFFPDLNALVDTATALYEEELTGREHCSPHHTAIRQALVCWDELTKLIAWMSSNITSEQVRTIIVNHVNDTWGLKVRQSLWFHLSCLTFGQHTVQEFLVSFGVWIRTPAPYRPPNAPILSTLPEHTVIC

SEQ ID NO: 11083 - protein, 1301 aa, Artificial Sequence
  SARS-CoV-2/Belgium/BA-02291/2020__EPI_ISL_415159 spike protein (1-1147)(I714C_Y1110C) WhcAg construct
MFVFLVLLPLVSSQCVNLTTRTQLPPAYTNSFTRGVYYPDKVFRSSVLHSTQDLFLPFFSNVTWFHAIHVSGTNGTKRFDNPVLPFNDGVYFASTEKSNIIRGWIFGTTLDSKTQSLLIVNNATNVVIKVCEFQFCNDPFLGVYYHKNNKSWMESEFRVYSSANNCTFEYVSQPFLMDLEGKQGNFKNLREFVFKNIDGYFKIYSKHTPINLVRDLPQGFSALEPLVDLPIGINITRFQTLLALHRSYLTPGDSSSGWTAGAAAYYVGYLQPRTFLLKYNENGTITDAVDCALDPLSETKCTLKSFTVEKGIYQTSNFRVQPTESIVRFPNITNLCPFGEVFNATRFASVYAWNRKRISNCVADYSVLYNSASFSTFKCYGVSPTKLNDLCFTNVYADSFVIRGDEVRQIAPGQTGKIADYNYKLPDDFTGCVIAWNSNNLDSKVGGNYNYLYRLFRRSNLKPFERDISTEIYQAGSTPCNGVEGFNCYFPLQSYGFQPTNGVGYQPYRVVVLSFELLPAPATVCGPKKSTNLVKNKCVNFNFNGLTGTGVLTESNKKFLPFQQFGRDIADTTDAVRDPQTLEILDITPCSFGGVSVITPGTNTSNQVAVLYQGVNCTEVPVAIHADQLTPTWRVYSTGSNVFQTRAGCLIGAEHVNNSYECDIPIGAGICASYQTQTNSPRRARSVASQSIIAYTMSLGAENSVAYSNNSIACPTNFTISVTTEILPVSMTKTSVDCTMYICGDSTECSNLLLQYGSFCTQLNRALTGIAVEQDKNTQEVFAQVKQIYKTPPIKDFGGFNFSQILPDPSKPSKRSFIEDLLFNKVTLADAGFIKQYGDCLGDIAARDLICAQKFNGLTVLPPLLTDEMIAQYTSALLAGTITSGWTFGAGAALQIPFAMQMAYRFNGIGVTQNVLYENQKLIANQFNSAIGKIQDSLSSAAPALGKLQDVVNQNAQALNTLVKQLSSNFGAISSVLNDILSRLDKVEAEVQIDRLITGRLQSLQTYVTQQLIRAAEIRASANLAATKMSECVLGQSKRVDFCGKGYHLMSFPQSAPHGVVFLHVTYVPAQEKNFTTAPAICHDGKAHFPREGVFVSNGTHWFVTQRNFCEPQIITTDNTFVSGNCDVVIGIVNNTVYDPLQPELDSGGGGSDIDPYKEFGSSYQLLNFLPLDFFPDLNALVDTATALYEEELTGREHCSPHHTAIRQALVCWDELTKLIAWMSSNITSEQVRTIIVNHVNDTWGLKVRQSLWFHLSCLTFGQHTVQEFLVSFGVWIRTPAPYRPPNAPILSTLPEHTVIC

SEQ ID NO: 11084 - protein, 1301 aa, Artificial Sequence
  SARS-CoV-2/USA/WA8-UW5/2020__EPI_ISL_413486 spike protein (1-1147)(I714C_Y1110C) WhcAg construct
MFVFLVLLPLVSSQCVNLTTRTQLPPAYTNSFTRGVYYPDKVFRSSVLHSTQDLFLPFFSNVTWFHAIHVSGTNGTKRFDNPVLPFNDGVYFASTEKSNIIRGWIFGTTLDSKTQSLLIVNNATNVVIKVCEFQFCNDPFLGVYYHKNNKSWMESEFRVYSSANNCTFEYVSQPFLMDLEGKQGNFKNLREFVFKNIDGYFKIYSKHTPINLVRDLPQGFSALEPLVDLPIGINITRFQTLLALHRSYLTPGDSSSGWTAGAAAYYVGYLQPRTFLLKYNENGTITDAVDCALDPLSETKCTLKSFTVEKGIYQTSNFRVQPTESIVRFPNITNLCPFGEVFNATRFASVYAWNRKRISNCVADYSVLYNSASFSTFKCYGVSPTKLNDLCFTNVYADSFVIRGDEVRQIAPGQTGKIADYNYKLPDDFTGCVIAWNSNNLDSKVGGNYNYLYRLFRKSNLKPFERDISTEIYQAGSTPCNGVEGFNCYFPLQSYGFQPTNGVGYQPYRVVVLSFELLHAPATVCGPKKSTNLVKNKCVNFNFNGLTGTGVLTESNKKFLPFQQFGRDIADTTDAVRDPQTLEILDITPCSFGGVSVITPGTNTSNQVAVLYQDVNCTEVPVAIHADQLTPTWRVYSTGSNVFQTRAGCLIGAEYVNNSYECDIPIGAGICASYQTQTNSPRRARSVASQSIIAYTMSLGAENSVAYSNNSIACPTNFTISVTTEILPVSMTKTSVDCTMYICGDSTECSNLLLQYGSFCTQLNRALTGIAVEQDKNTQEVFAQVKQIYKTPPIKDFGGFNFSQILPDPSKPSKRSFIEDLLFNKVTLADAGFIKQYGDCLGDIAARDLICAQKFNGLTVLPPLLTDEMIAQYTSALLAGTITSGWTFGAGAALQIPFAMQMAYRFNGIGVTQNVLYENQKLIANQFNSAIGKIQDSLSSTASALGKLQDVVNQNAQALNTLVKQLSSNFGAISSVLNDILSRLDKVEAEVQIDRLITGRLQSLQTYVTQQLIRAAEIRASANLAATKMSECVLGQSKRVDFCGKGYHLMSFPQSAPHGVVFLHVTYVPAQEKNFTTAPAICHDGKAHFPREGVFVSNGTHWFVTQRNFCEPQIITTDNTFVSGNCDVVIGIVNNTVYDPLQPELDSGGGGSDIDPYKEFGSSYQLLNFLPLDFFPDLNALVDTATALYEEELTGREHCSPHHTAIRQALVCWDELTKLIAWMSSNITSEQVRTIIVNHVNDTWGLKVRQSLWFHLSCLTFGQHTVQEFLVSFGVWIRTPAPYRPPNAPILSTLPEHTVIC

SEQ ID NO: 11085 - protein, 1301 aa, Artificial Sequence
  SARS-CoV-2/England/20102000506/2020__EPI_ISL_415147 spike protein (1-1147)(I714C_Y1110C) WhcAg construct
MFVFLVLLPLVSSQCVNLTTRTQLPPAYTNSFTRGVYYPDKVFRSSVLHSTQDLFLPFFSNVTWFHAIHVSGTNGTKRFDNPVLPFNDGVYFASTEKSNIIRGWIFGTTLDSKTQSLLIVNNATNVVIKVCEFQFCNDPFLGVYYHKNNKSWMESEFRVYSSANNCTFEYVSQPFLMDLEGKQGNFKNLREFVFKNIDGYFKIYSKHTPINLVRDLPQGFSALEPLVDLPIGINITRFQTLLALHRSYLTPGDSSSGWTAGAAAYYVGYLQPRTFLLKYNENGTITDAVDCALDPLSETKCTLKSFTVEKGIYQTSNFRVQPTESIVRFPNITNLCPFGEVFNATRFASVYAWNRKRISNCVADYSVLYNSASFSTFKCYGVSPTKLNDLCFTNVYADSFVIRGDEVRQIAPGQTGKIADYNYKLPDDFTGCVIAWNSNNLDSKVGGNYNYLYRLFRKSNLKPFERDISTEIYQAGSTPCNGVEGFNCYFPLQSYGFQPTNGVGYQPYRVVVLSFELLHAPATVCGPKKSTNLVKNKCVNFNFNGLTGTGVLTESNKKFLPFQQFGRDIADTTDAVRDPQTLEILDITPCSFGGVSVITPGTNTSNQVAVLYQGVNCTEVPVAIHADQLTPTWRVYSTGSNVFQTRAGCLIGAEHVNNSYECDIPIGAGICASYQTQTNSPRRARSVASQSIIAYTMSLGAENSVAYSNNSIACPTNFTISVTTEILPVSMTKTSVDCTMYICGDSTECSNLLLQYGSFCTQLNRALTGIAVEQDKNTQEVFAQVKQIYKTPPIKDFGGFNFSQILPDPSKPSKRSFIEDLLFNKVTLADAGFIKQYGYCLGDIAARDLICAQKFNGLTVLPPLLTDEMIAQYTSALLAGTITSGWTFGAGAALQIPFAMQMAYRFNGIGVTQNVLYENQKLIANQFNSAIGKIQDSLSSTASALGKLQDVVNQNAQALNTLVKQLSSNFGAISSVLNDILSRLDKVEAEVQIDRLITGRLQSLQTYVTQQLIRAAEIRASANLAATKMSECVLGQSKRVDFCGKGYHLMSFPQSAPHGVVFLHVTYVPAQEKNFTTAPAICHDGKAHFPREGVFVSNGTHWFVTQRNFCEPQIITTDNTFVSGNCDVVIGIVNNTVYDPLQPELDSGGGGSDIDPYKEFGSSYQLLNFLPLDFFPDLNALVDTATALYEEELTGREHCSPHHTAIRQALVCWDELTKLIAWMSSNITSEQVRTIIVNHVNDTWGLKVRQSLWFHLSCLTFGQHTVQEFLVSFGVWIRTPAPYRPPNAPILSTLPEHTVIC

SEQ ID NO: 11086 - protein, 1301 aa, Artificial Sequence
  SARS-CoV-2/Belgium/VAG-03013/2020__EPI_ISL_415155 spike protein (1-1147)(I714C_Y1110C) WhcAg construct
MFVFLVLLPLVSSQCVNLTTRTQLPPAYTNSFTRGVYYPDKVFRSSVLHSTQDLFLPFFSNVTWFHAIHVSGTNGTKRFDNPVLPFNDGVYFASTEKSNIIRGWIFGTTLDSKTQSLLIVNNATNVVIKVCEFQFCNDPFLGVYYHKNNKSWMESEFRVYSSANNCTFEYVSQPFLMDLEGKQGNFKNLREFVFKNIDGYFKIYSKHTPINLVRDLPQGFSALEPLVDLPIGINITRFQTLLALHRSYLTPGDSSSGWTAGAAAYYVGYLQPRTFLLKYNENGTITDAVDCALDPLSETKCTLKSFTVEKGIYQTSNFRVQPTESIVRFPNITNLCPFGEVFNATRFASVYAWNRKRISNCVADYSVLYNSASFSTFKCYGVSPTKLNDLCFTNVYADSFVIRGDEVRQIAPGQTGKIADYNYKLPDDFTGCVIAWNSNNLDSKVGGNYNYLYRLFRKSNLKPFERDISTEIYQAGSTPCNGVEGFNCYFPLQSYGFQPTNGVGYQPYRVVVLSFELLHAPATVCGPKKSTNLVKNKCVNFNFNGLTGTGVLTESNKKFLPFQQFGRDIADTTDAVRDPQTLEILDITPCSFGGVSVITPGTNTSNQVAVLYQGVNCTEVPVAIHADQLTPTWRVYSTGSNVFQTRAGCLIGAEHVNNSYECDIPIGAGICASYQTQTNSPRRARSVASQSIIAYTMSLGAENSVAYSNNSIACPTNFTISVTTEILPVSMTKTSVDCTMYICGDSTECSNLLLQYGSFCTQLNRALTGIAVEQDKNTQEVFAQVKQIYKTPPIKDFGGFNFSQILPDPSKPSKRSFIEDLLFNKVTLADAGFIKQYGDCLGDIAARDLICAQKFNGLTVLPPLLTDEMIAQYTSALLAGTITSGWTFGAGAALQIPFAMQMAYRFNGIGVTQNVLYENQKLIANQFNSAIGKIQDSLSSTATALGKLQDVVNQNAQALNTLVKQLSSNFGAISSVLNDILSRLDKVEAEVQIDRLITGRLQSLQTYVTQQLIRAAEIRASANLAATKMSECVLGQSKRVDFCGKGYHLMSFPQSAPHGVVFLHVTYVPAQEKNFTTAPAICHDGKAHFPREGVFVSNGTHWFVTQRNFCEPQIITTDNTFVSGNCDVVIGIVNNTVYDPLQPELDSGGGGSDIDPYKEFGSSYQLLNFLPLDFFPDLNALVDTATALYEEELTGREHCSPHHTAIRQALVCWDELTKLIAWMSSNITSEQVRTIIVNHVNDTWGLKVRQSLWFHLSCLTFGQHTVQEFLVSFGVWIRTPAPYRPPNAPILSTLPEHTVIC

SEQ ID NO: 11087 - protein, 1301 aa, Artificial Sequence
  SARS-CoV-2/Belgium/BC-03016/2020__EPI_ISL_415157 spike protein (1-1147)(I714C_Y1110C) WhcAg construct
MFVFLVLLPLVSSQCVNLTTRTQLPPAYTNSFTRGVYYPDKVFRSSVLHSTQDLFLPFFSNVTWFHAIHVSGTNGTKRFDNPVLPFNDGVYFASTEKSNIIRGWIFGTTLDSKTQSLLIVNNATNVVIKVCEFQFCNDPFLGVYYHKNNKSWMESEFRVYSSANNCTFEYVSQPFLMDLEGKQGNFKNLREFVFKNIDGYFKIYSKHTPINLVRDLPQGFSALEPLVDLPIGINITRFQTLLALHRSYLTPGDSSSGWTAGAAAYYVGYLQPRTFLLKYNENGTITDAVDCALDPLSETKCTLKSFTVEKGIYQTSNFRVQPTESIVRFPNITNLCPFGEVFNATRFASVYAWNRKRISNCVADYSVLYNSASFSTFKCYGVSPTKLNDLCFTNVYADSFVIRGDEVRQIAPGQTGKIADYNYKLPDDFTGCVIAWNSNNLDSKVGGNYNYLYRLFRKSNLKPFERDISTEIYQAGSTPCNGVEGFNCYFPLQSYGFQPTNGVGYQPYRVVVLSFELLHAPATVCGPKKSTNLVKNKCVNFNFNGLTGTGVLTESNKKFLPFQQFGRDIADTTDAVRDPQTLEILDITPCSFGGVSVITPGTNTSNQVAVLYQGVNCTEVPVAIHADQLTPTWRVYSTGSNVFQTRAGCLIGAEHVNNSYECDIPIGAGICASYQTQTNSPRRARSVASQSIIAYTMSLGAENSVAYSNNSIACPTNFTISVTTEILPVSMTKTSVDCTMYICGDSTECSNLLLQYGSFCTQLNRALTGIAVEQDKNTQEVFAQVKQIYKTPPIKDFGGFNFSQILPDPSKPSKRSFIEDLLFNKVTLADAGFIKQYGDCLGDIAARDLICAQKFNGLTVLPPLLTDEMIAQYTSALLAGTITSGWTFGAGAALQIPFAMQMAYRFNGIGVTQNVLYENQKLIANQFNSAIGKIQDSLSSTAPALGKLQDVVNQNAQALNTLVKQLSSNFGAISSVLNDILSRLDKVEAEVQIDRLITGRLQSLQTYVTQQLIRAAEIRASANLAATKMSECVLGQSKRVDFCGKGYHLMSFPQSAPHGVVFLHVTYVPAQEKNFTTAPAICHDGKAHFPREGVFVSNGTHWFVTQRNFCEPQIITTDNTFVSGNCDVVIGIVNNTVYDPLQPELDSGGGGSDIDPYKEFGSSYQLLNFLPLDFFPDLNALVDTATALYEEELTGREHCSPHHTAIRQALVCWDELTKLIAWMSSNITSEQVRTIIVNHVNDTWGLKVRQSLWFHLSCLTFGQHTVQEFLVSFGVWIRTPAPYRPPNAPILSTLPEHTVIC

SEQ ID NO: 11088 - protein, 1301 aa, Artificial Sequence
  SARS-CoV-2/Germany/BavPat3/2020__EPI_ISL_414521 spike protein (1-1147)(I714C_Y1110C) WhcAg construct
MFVFLVLLPLVSSQCVNLTTRTQLPPAYTNSFTRGVYYPDKVFRSSVLHSTQDLFLPFFSNVTWFHAIHVSGTNGTKRFDNPVLPFNDGVYFASTEKSNIIRGWIFGTTLDSKTQSLLIVNNATNVVIKVCEFQFCNDPFLGVYYHKNNKSWMESEFRVYSSANNCTFEYVSQPFLMDLEGKQGNFKNLREFVFKNIDGYFKIYSKHTPINLVRDLPQGFSALEPLVDLPIGINITRFQTLLALHRSYLTPGDSSSGWTAGAAAYYVGYLQPRTFLLKYNENGTITDAVDCALDPLSETKCTLKSFTVEKGIYQTSNFRVQPTESIVRFPNITNLCPFGEVFNATRFASVYAWNRKRISNCVADYSVLYNSASFSTFKCYGVSPTKLNDLCFTNVYADSFVIRGDEVRQIAPGQTGKIADYNYKLPDDFTGCVIAWNSNNLDSKVGGNYNYLYRLFRKSNLKPFERDISTEIYQAGSTPCNGVEGFNCYFPLQSYGFQPTNGVGYQPYRVVVLSFELLHAPATVCGPKKSTNLVKNKCVNFNFNGLTGTGVLTESNKKFLPFQQFGRDIADTTDAVRDPQTLEILDITPCSFGGVSVITPGTNTSNQVAVLYQDVNCTEVPVAIHADQLTPTWRVYSTGSNVFQTRAGCLIGAEHVNNSYECDIPIGAGICASYQTQTNSPRRARSVASQSIIAYTMSLGAENSVAYSNNSIACPTNFTISVTTEILPVSMTKTSVDCTMYICGDSTECSNLLLQYGSFCTQLNRALTGIAVEQDKNTQQVFAQVKQIYKTPPIKDFGGFNFSQILPDPSKPSKRSFIEDLLFNKVTLADAGFIKQYGDCLGDIAARDLICAQKFNGLTVLPPLLTDEMIAQYTSALLAGTITSGWTFGAGAALQIPFAMQMAYRFNGIGVTQNVLYENQKLIANQFNSAIGKIQDSLSSTASALGKLQDVVNQNAQALNTLVKQLSSNFGAISSVLNDILSRLDKVEAEVQIDRLITGRLQSLQTYVTQQLIRAAEIRASANLAATKMSECVLGQSKRVDFCGKGYHLMSFPQSAPHGVVFLHVTYVPAQEKNFTTAPAICHDGKAHFPREGVFVSNGTHWFVTQRNFCEPQIITTDNTFVSGNCDVVIGIVNNTVYDPLQPELDSGGGGSDIDPYKEFGSSYQLLNFLPLDFFPDLNALVDTATALYEEELTGREHCSPHHTAIRQALVCWDELTKLIAWMSSNITSEQVRTIIVNHVNDTWGLKVRQSLWFHLSCLTFGQHTVQEFLVSFGVWIRTPAPYRPPNAPILSTLPEHTVIC

SEQ ID NO: 11089 - protein, 1301 aa, Artificial Sequence
  SARS-CoV-2/France/HF1805/2020__EPI_ISL_414628 spike protein (1-1147)(I714C_Y1110C) WhcAg construct
MFVFLVLLPLVSSQCVNLTTRTQLPPAYTNSFTRGVYYPDKVFRSSVLHSTQDLFLPFFSNVTWFHAIHVSGTNGTKRFDNPVLPFNDGVYFASTEKSNIIRGWIFGTTLDSKTQSLLIVNNATNVVIKVCEFQFCNDPFLGVYYHKNNKSWMESEFRVYSSANNCTFEYVSQPFLMDLEGKQGNFKNLREFVFKNIDGYFKIYSKHTPINLVRDLPQGFSALEPLVDLPIGINITRFQTLLALHRSYLTPGDSSSGWTAGAAAYYVGYLQPRTFLLKYNENGTITDAVDCALDPLSETKCTLKSFTVEKGIYQTSNFRVQPTESIVRFPNITNLCPFGEVFNATRFASVYAWNRKRISNCVADYSVLYNSASFSTFKCYGVSPTKLNDLCFTNVYADSFVIRGDEVRQIAPGQTGKIADYNYKLPDDFTGCVIAWNSNNLDSKVGGNYNYLYRLFRKSNLKPFERDISTEIYQAGSTPCNGVEGFNCYFPLQSYGFQPTNGVGYQPYRVVVLSFELLHAPATVCGPKKSTNLVKNKCVNFNFNGLTGTGVLTESNKKFLPFQQFGRDIADTTDAVRDPQTLEILDITPCSFGGVSVITPGTNTSNQVAVLYQGVNCTEVPVAIHADQLTPTWRVYSTGSNVFQTRAGCLIGAEHVNNSYECDIPIGAGICASYQTQTNSPRRARSVASQSIIAYTMSLGAENSVAYSNNSIACPTNFTISVTTEILPVSMTKTSVDCTMYICGDSTECSNLLLQYGSFCTQLNRALTGIAVEQDKNTQEVFAQVKQIYKTPPIKDFGGFNFSQILPDPSKPSKRSFIEDLLFNKVTLADAGFIKQYGDCLGDIAARDLICAQKFNGLTVLPPLLTDEMIAQYTSALLAGTITSGWTFGAGAALQIPFAMQMAYRFNGIGVTQNVLYENQKLIANQFNSAIGKIQDSLSSTASALGKLQDVVNQNAQALNTLVKQLSSNFGAISSVLNDILSRLDKVEAEVQIDRLITGRLQSLQTYVTQQLIRAAEIRASANLAATKMSECVLGQSKRVDFCGKGYHLMSFPQSAPHGVVFLHVTYVPAQEKNFTTAPAICHDGKAHFPREGVFVSNGTHWFVTQRNFCEPQIITTDNTFVSGNCDVVIGVVNNTVYDPLQPELDSGGGGSDIDPYKEFGSSYQLLNFLPLDFFPDLNALVDTATALYEEELTGREHCSPHHTAIRQALVCWDELTKLIAWMSSNITSEQVRTIIVNHVNDTWGLKVRQSLWFHLSCLTFGQHTVQEFLVSFGVWIRTPAPYRPPNAPILSTLPEHTVIC

SEQ ID NO: 11090 - protein, 1301 aa, Artificial Sequence
  SARS-CoV-2/Netherlands/ZuidHolland_9/2020__EPI_ISL_414445 spike protein (1-1147)(I714C_Y1110C) WhcAg construct
MFVFLVLLPLVSSQCVNLTTRTQLPPAYTNSFTRGVYYPDKVFRSSVLHSTQDLFLPFFSNVTWFHAIHVSGTNGTKRFDNPVLPFNDGVYFASTEKSNIIRGWIFGTTLDSKTQSLLIVNNATNVVIKVCEFQFCNDPFLGVYYHKNNKSWMESEFRVYSSANNCTFEYVSQPFLMDLEGKQGNFKNLREFVFKNIDGYFKIYSKHTPINLVRDLPQGFSALEPLVDLPIGINITRFQTLLALHRSYLTPGDSSSGWTAGAAAYYVGYLQPRTFLLKYNENGTITDAVDCALDPLSETKCTLKSFTVEKGIYQTSNFRVQPTESIVRFPNITNLCPFGEVFNATRFASVYAWNRKRISNCVADYSVLYNSASFSTFKCYGVSPTKLNDLCFTNVYADSFVIRGDEVRQIAPGQTGKIADYNYKLPDDFTGCVIAWNSNNLDSKVGGNYNYLYRLFRKSNLKPFERDISTEIYQAGSTPCNGVEGFNCYFPLQSYGFQPTNGVGYQPYRVVVLSFELLHAPATVCGPKKSTNLVKNKCVNFNFNGLTGTGVLTESNKKFLPFQQFGRDIADTTDAVRDPQTLEILDITPCSFGGVSVITPGTNTSNQVAVLYQGVNCTEVPVAIHADQLTPTWRVYSTGSNVFQTRAGCLIGAEHVNNSYECDIPIGAGICASYQTQTNSPRRARSVASQSIIAYTMSLGAENSVAYSNNSIACPTNFTISVTTEILPVSMTKTSVDCTMYICGDSTECSNLLLQYGSFCTQLNRALTGIAVEQDKNTQEVFAQVKQIYKTPPIKDFGGFNFSQILPDPSKPSKRSFIEDLLFNKVTLADAGFIKQYGDCLGDIAARDLICVQKFNGLTVLPPLLTDEMIAQYTSALLAGTITSGWTFGAGAALQIPFAMQMAYRFNGIGVTQNVLYENQKLIANQFNSAIGKIQDSLSSTASALGKLQDVVNQNAQALNTLVKQLSSNFGAISSVLNDILSRLDKVEAEVQIDRLITGRLQSLQTYVTQQLIRAAEIRASANLAATKMSECVLGQSKRVDFCGKGYHLMSFPQSAPHGVVFLHVTYVPAQEKNFTTAPAICHDGKAHFPREGVFVSNGTHWFVTQRNFCEPQIITTDNTFVSGNCDVVIGIVNNTVYDPLQPELDSGGGGSDIDPYKEFGSSYQLLNFLPLDFFPDLNALVDTATALYEEELTGREHCSPHHTAIRQALVCWDELTKLIAWMSSNITSEQVRTIIVNHVNDTWGLKVRQSLWFHLSCLTFGQHTVQEFLVSFGVWIRTPAPYRPPNAPILSTLPEHTVIC

SEQ ID NO: 11091 - protein, 1301 aa, Artificial Sequence
  SARS-CoV-2/Finland/FIN03032020A/2020__EPI_ISL_413602 spike protein (1-1147)(I714C_Y1110C) WhcAg construct
MFVFLVLLPLVSSQCVNLTTRTQLPPAYTNSFTRGVYYPDKVFRSSVLHSTQDLFLPFFSNVTWFHAIHVSGTNGTKRFDNPVLPFNDGVYFASTEKSNIIRGWIFGTTLDSKTQSLLIVNNATNVVIKVCEFQFCNDPFLGVYYHKNNKSWMESEFRVYSSANNCTFEYVSQPFLMDLEGKQGNFKNLREFVFKNIDGYFKIYSKHTPINLVRDLPQGFSALEPLVDLPIGINITRFQTLLALHRSYLTPGDSSSGWTAGAAAYYVGYLQPRTFLLKYNENGTITDAVDCALDPLSETKCTLKSFTVEKGIYQTSNFRVQPTESIVRFPNITNLCPFGEVFNATRFASVYAWNRKRISNCVADYSVLYNSASFSTFKCYGVSPTKLNDLCFTNVYADSFVIRGDEVRQIAPGQTGKIADYNYKLPDDFTGCVISWNSNNLDSKVGGNYNYLYRLFRKSNLKPFERDISTEIYQAGSTPCNGVEGFNCYFPLQSYGFQPTNGVGYQPYRVVVLSFELLHAPATVCGPKKSTNLVKNKCVNFNFNGLTGTGVLTESNKKFLPFQQFGRDIADTTDAVRDPQTLEILDITPCSFGGVSVITPGTNTSNQVAVLYQGVNCTEVPVAIHADQLTPTWRVYSTGSNVFQTRAGCLIGAEHVNNSYECDIPIGAGICASYQTQTNSPRRARSVASQSIIAYTMSLGAENSVAYSNNSIACPTNFTISVTTEILPVSMTKTSVDCTMYICGDSTECSNLLLQYGSFCTQLNRALTGIAVEQDKNTQEVFAQVKQIYKTPPIKDFGGFNFSQILPDPSKPSKRSFIEDLLFNKVTLADAGFIKQYGDCLGDIAARDLICAQKFNGLTVLPPLLTDEMIAQYTSALLAGTITSGWTFGAGAALQIPFAMQMAYRFNGIGVTQNVLYENQKLIANQFNSAIGKIQDSLSSTASALGKLQDVVNQNAQALNTLVKQLSSNFGAISSVLNDILSRLDKVEAEVQIDRLITGRLQSLQTYVTQQLIRAAEIRASANLAATKMSECVLGQSKRVDFCGKGYHLMSFPQSAPHGVVFLHVTYVPAQEKNFTTAPAICHDGKAHFPREGVFVSNGTHWFVTQRNFCEPQIITTDNTFVSGNCDVVIGIVNNTVYDPLQPELDSGGGGSDIDPYKEFGSSYQLLNFLPLDFFPDLNALVDTATALYEEELTGREHCSPHHTAIRQALVCWDELTKLIAWMSSNITSEQVRTIIVNHVNDTWGLKVRQSLWFHLSCLTFGQHTVQEFLVSFGVWIRTPAPYRPPNAPILSTLPEHTVIC

SEQ ID NO: 11092 - protein, 1301 aa, Artificial Sequence
  SARS-CoV-2/France/GE1977/2020__EPI_ISL_414632 spike protein (1-1147)(I714C_Y1110C) WhcAg construct
MFVFLVLLPLVSSQCVNLTTRTQLPPAYTNSFTRGVYYPDKVFRSSVLHSTQDLFLPFFSNVTWFHAIHVSGTNGTKRFDNPVLPFNDGVYFASTEKSNIIRGWIFGTTLDSKTQSLLIVNNATNVVIKVCEFQFCNDPFLGVYYHKNNKSWMESEFRVYSSANNCTFEYVSQPFLMDLEGKQGNFKNLREFVFKNIDGYFKIYSKHTPINLVRDLPQGFSALEPLVDLPIGINITRFQTLLALHRSYLTPGDSSSGWTAGAAAYYVGYLQPRTFLLKYNENGTITDAVDCALDPLSETKCTLKSFTVEKGIYQTSNFRVQPTESIVRFPNITNLCPFGEVFNATRFASVYAWNRKRISNCVADYSVLYNSASFSTFKCYGVSPTKLNDLCFTNVYADSFVIRGDEVRQIAPGQTGKIADYNYKLPDDFTGCVIAWNSNNLDSKVGGNYNYLYRLFRKSNLKPFERDISTEIYQAGSTPCNGVEGFNCYFPLQSYGFQPTNGVGYQPYRVVVLSFELLHAPATVCGPKKSTNLVKNKCVNFNFNGLTGTGVLTESNKKFLPFQQFGRDIADTTDAVRDPQTLEILDITPCSFGGVSVITPGTNTSNQVAVLYQGVNCTEVPVAIHADQLTPTWRVYSTGSNVFQTRAGCLIGAEHVNNSYECDIPIGAGICASYQTQTNSPRRARSVASQSIIAYTMSLGAENSVAYSNNSIACPTNFTISVTTEILPVSMTKTSVDCTMYICGDSTECSNLLLQYGSFCTQLNRALTGIAVEQDKNTQEVFAQVKQIYKTPPIKDFGGFNFSQILPDPSKPSKRSFIEDLLFNKVTLADAGFIKQYGDCLGDIAARDLICAQKFNGLTVLPPLLTDEMIAQYTSALLAGTITSGWTFGAGAALQIPFAMQMAYRFNGIGVTQNVLYENQKLIANQFNSAIGKIQDSLFSTASALGKLQDVVNQNAQALNTLVKQLSSNFGAISSVLNDILSRLDKVEAEVQIDRLITGRLQSLQTYVTQQLIRAAEIRASANLAATKMSECVLGQSKRVDFCGKGYHLMSFPQSAPHGVVFLHVTYVPAQEKNFTTAPAICHDGKAHFPREGVFVSNGTHWFVTQRNFCEPQIITTDNTFVSGNCDVVIGIVNNTVYDPLQPELDSGGGGSDIDPYKEFGSSYQLLNFLPLDFFPDLNALVDTATALYEEELTGREHCSPHHTAIRQALVCWDELTKLIAWMSSNITSEQVRTIIVNHVNDTWGLKVRQSLWFHLSCLTFGQHTVQEFLVSFGVWIRTPAPYRPPNAPILSTLPEHTVIC

SEQ ID NO: 11093 - protein, 1301 aa, Artificial Sequence
  SARS-CoV-2/Finland/FIN-313/2020__EPI_ISL_414641 spike protein (1-1147)(I714C_Y1110C) WhcAg construct
MFVFLVLLPLVSSQCVNLTTRTQLPPAYTNSFTRGVYYPDKVFRSSVLHSTQDLFLPFFSNVTWFHAIHVSGTNGTKRFDNPVLPFNDGVYFASTEKSNIIRGWIFGTTLDSKTQSLLIVNNATNVVIKVCEFQFCNDPFLGVYYHKNNKSWMESEFRVYSSANNCTFEYVSQPFLMDLEGKQGNFKNLREFVFKNIDGYFKIYSKHTPINLVRDLPQGFSALEPLVDLPIGINITRFKTLLALHRSYLTPGDSSSGWTAGAAAYYVGYLQPRTFLLKYNENGTITDAVDCALDPLSETKCTLKSFTVEKGIYQTSNFRVQPTESIVRFPNITNLCPFGEVFNATRFASVYAWNRKRISNCVADYSVLYNSASFSTFKCYGVSPTKLNDLCFTNVYADSFVIRGDEVRQIAPGQTGKIADYNYKLPDDFTGCVIAWNSNNLDSKVGGNYNYLYRLFRKSNLKPFERDISTEIYQAGSTPCNGVEGFNCYFPLQSYGFQPTNGVGYQPYRVVVLSFELLHAPATVCGPKKSTNLVKNKCVNFNFNGLTGTGVLTESNKKFLPFQQFGRDIADTTDAVRDPQTLEILDITPCSFGGVSVITPGTNTSNQVAVLYQGVNCTEVPVAIHADQLTPTWRVYSTGSNVFQTRAGCLIGAEHVNNSYECDIPIGAGICASYQTQTNSPRRARSVASQSIIAYTMSLGAENSVAYSNNSIACPTNFTISVTTEILPVSMTKTSVDCTMYICGDSTECSNLLLQYGSFCTQLNRALTGIAVEQDKNTQEVFAQVKQIYKTPPIKDFGGFNFSQILPDPSKPSKRSFIEDLLFNKVTLADAGFIKQYGDCLGDIAARDLICAQKFNGLTVLPPLLTDEMIAQYTSALLAGTITSGWTFGAGAALQIPFAMQMAYRFNGIGVTQNVLYENQKLIANQFNSAIGKIQDSLSSTASALGKLQDVVNQNAQALNTLVKQLSSNFGAISSVLNDILSRLDKVEAEVQIDRLITGRLQSLQTYVTQQLIRAAEIRASANLAATKMSECVLGQSKRVDFCGKGYHLMSFPQSAPHGVVFLHVTYVPAQEKNFTTAPAICHDGKAHFPREGVFVSNGTHWFVTQRNFCEPQIITTDNTFVSGNCDVVIGIVNNTVYDPLQPELDSGGGGSDIDPYKEFGSSYQLLNFLPLDFFPDLNALVDTATALYEEELTGREHCSPHHTAIRQALVCWDELTKLIAWMSSNITSEQVRTIIVNHVNDTWGLKVRQSLWFHLSCLTFGQHTVQEFLVSFGVWIRTPAPYRPPNAPILSTLPEHTVIC

SEQ ID NO: 11094 - protein, 1301 aa, Artificial Sequence
  SARS-CoV-2/Netherlands/ZuidHolland_2/2020__EPI_ISL_414556 spike protein (1-1147)(I714C_Y1110C) WhcAg construct
MFVFLVLLPLVSSQCVNLTTRTQLPPAYTNSFTRGVYYPDKVFRSSVLHSTQDLFLPFFSNVTWFHAIHVSGTNGTKRFDNPVLPFNDGVYFASTEKSNIIRGWIFGTTLDSKTQSLLIVNNATNVVIKVCEFQFCNDPFLGVYYHKNNKSWMESEFRVYSSANNCTFEYVSQPFLMDLEGKQGNFKNLREFVFKNIDGYFKIYSKHTPINLVRDLPQGFSALEPLVDLPIGINITRFQTLLALHRSYLTPGDSSSGWTAGAAAYYVGYLQPRTFLLKYNENGTITDAVDCALDPLSETKCTLKSFTVEKGIYQTSNFRVQPTESIVRFPNITNLCPFGEVFNATRFASVYAWNRKRISNCVADYSVLYNSASFSTFKCYGVSPTKLNDLCFTNVYADSFVIRGDEVRQIAPGQTGKIADYNYKLPDDFTGCVIAWNSNNLDSKVGGNYNYLYRLFRKSNLKPFERDISTEIYQAGSTPCNGVEGFNCYFPLQSYGFQPTNGVGYQPYRVVVLSFELLHAPATVCGPKKSTNLVKNKCVNFNFNGLTGTGVLTESNKKFLPFQQFGRDIADTTDAVRDPQTLEILDITPCSFGGVSVITPGTNTSNQVAVLYQGVNCTEVPVAIHADQLTPTWRVYSTGSNVFQTRAGCLIGAEHVNNSYECDIPIGAGICASYQTQTNSPRRARSVASQSIIAYTMSLGAENSVAYSNNSIACPTNFTISVTTEILPVSMTKTSVDCTMYICGDSTECSNLLLQYGSFCTQLNRALTGIALEQDKNTQEVFAQVKQIYKTPPIKDFGGFNFSQILPDPSKPSKRSFIEDLLFNKVTLADAGFIKQYGDCLGDIAARDLICAQKFNGLTVLPPLLTDEMIAQYTSALLAGTITSGWTFGAGAALQIPFAMQMAYRFNGIGVTQNVLYENQKLIANQFNSAIGKIQDSLSSTASALGKLQDVVNQNAQALNTLVKQLSSNFGAISSVLNDILSRLDKVEAEVQIDRLITGRLQSLQTYVTQQLIRAAEIRASANLAATKMSECVLGQSKRVDFCGKGYHLMSFPQSAPHGVVFLHVTYVPAQEKNFTTAPAICHDGKAHFPREGVFVSNGTHWFVTQRNFCEPQIITTDNTFVSGNCDVVIGIVNNTVYDPLQPELDSGGGGSDIDPYKEFGSSYQLLNFLPLDFFPDLNALVDTATALYEEELTGREHCSPHHTAIRQALVCWDELTKLIAWMSSNITSEQVRTIIVNHVNDTWGLKVRQSLWFHLSCLTFGQHTVQEFLVSFGVWIRTPAPYRPPNAPILSTLPEHTVIC

SEQ ID NO: 11095 - protein, 1301 aa, Artificial Sequence
  SARS-CoV-2/USA/WA-UW31/2020__EPI_ISL_414618 spike protein (1-1147)(I714C_Y1110C) WhcAg construct
MFVFLVLLPLVSSQCVNLTTRTQLPPAYTNSFTRGVYYPDKVFRSSVLHSTQDLFLPFFSNVTWFHAIHVSGTNGTKRFDNPVLPFNDGVYFASTEKSNIIRGWIFGTTLDSKTQSLLIVNNATNVVIKVCEFQFCNDPFLGVYYHKNNKSWMESEFRVYSSANNCTFEYVSQPFLMDLEGKQGNFKNLREFVFKNIDGYFKIYSKHTPINLVRDLPQGFSALEPLVDLPIGINITRFQTLLALHRSYLTPGDSSSGWTAGAAAYYVGYLQPRTFLLKYNENGTITDAVDCALDPLSETKCTLKSFTVEKGIYQTSNFRVQPTESIVRFPNITNLCPFGEVFNATRFASVYAWNRKRISNCVADYSVLYNSASFSTFKCYGVSPTKLNDLCFTNVYADSFVIRGDEVRQIAPGQTGKIADYNYKLPDDFTGCVIAWNSNNLDSKVGGNYNYLYRLFRKSNLKPFERDISTEIYQAGSTPCNGAEGFNCYFPLQSYGFQPTNGVGYQPYRVVVLSFELLHAPATVCGPKKSTNLVKNKCVNFNFNGLTGTGVLTESNKKFLPFQQFGRDIADTTDAVRDPQTLEILDITPCSFGGVSVITPGTNTSNQVAVLYQDVNCTEVPVAIHADQLTPTWRVYSTGSNVFQTRAGCLIGAEHVNNSYECDIPIGAGICASYQTQTNSPRRARSVASQSIIAYTMSLGAENSVAYSNNSIACPTNFTISVTTEILPVSMTKTSVDCTMYICGDSTECSNLLLQYGSFCTQLNRALTGIAVEQDKNTQEVFAQVKQIYKTPPIKDFGGFNFSQILPDPSKPSKRSFIEDLLFNKVTLADAGFIKQYGDCLGDIAARDLICAQKFNGLTVLPPLLTDEMIAQYTSALLAGTITSGWTFGAGAALQIPFAMQMAYRFNGIGVTQNVLYENQKLIANQFNSAIGKIQDSLSSTASALGKLQDVVNQNAQALNTLVKQLSSNFGAISSVLNDILSRLDKVEAEVQIDRLITGRLQSLQTYVTQQLIRAAEIRASANLAATKMSECVLGQSKRVDFCGKGYHLMSFPQSAPHGVVFLHVTYVPAQEKNFTTAPAICHDGKAHFPREGVFVSNGTHWFVTQRNFCEPQIITTDNTFVSGNCDVVIGIVNNTVYDPLQPELDSGGGGSDIDPYKEFGSSYQLLNFLPLDFFPDLNALVDTATALYEEELTGREHCSPHHTAIRQALVCWDELTKLIAWMSSNITSEQVRTIIVNHVNDTWGLKVRQSLWFHLSCLTFGQHTVQEFLVSFGVWIRTPAPYRPPNAPILSTLPEHTVIC

SEQ ID NO: 11096 - protein, 1301 aa, Artificial Sequence
  SARS-CoV-2/South Korea/SNU01/2020__EPI_ISL_411929 spike protein (1-1147)(I714C_Y1110C) WhcAg construct
MFVFLVLLPLVSSQCVNLTTRTQLPPAYTNSFTRGVYYPDKVFRSSVLHSTQDLFLPFFSNVTWFHAIHVSGTNGTKRFDNPVLPFNDGVYFASTEKSNIIRGWIFGTTLDSKTQSLLIVNNATNVVIKVCEFQFCNDPFLGVYYHKNNKSWMESEFRVYSSANNCTFEYVSQPFLMDLEGKQGNFKNLREFVFKNIDGYFKIYSKHTPINLVRDLPQGFWALEPLVDLPIGINITRFQTLLALHRSYLTPGDSSSGWTAGAAAYYVGYLQPRTFLLKYNENGTITDAVDCALDPLSETKCTLKSFTVEKGIYQTSNFRVQPTESIVRFPNITNLCPFGEVFNATRFASVYAWNRKRISNCVADYSVLYNSASFSTFKCYGVSPTKLNDLCFTNVYADSFVIRGDEVRQIAPGQTGKIADYNYKLPDDFTGCVIAWNSNNLDSKVGGNYNYLYRLFRKSNLKPFERDISTEIYQAGSTPCNGVEGFNCYFPLQSYGFQPTNGVGYQPYRVVVLSFELLHAPATVCGPKKSTNLVKNKCVNFNFNGLTGTGVLTESNKKFLPFQQFGRDIADTTDAVRDPQTLEILDITPCSFGGVSVITPGTNTSNQVAVLYQDVNCTEVPVAIHADQLTPTWRVYSTGSNVFQTRAGCLIGAEHVNNSYECDIPIGAGICASYQTQTNSPRRARSVASQSIIAYTMSLGAENSVAYSNNSIACPTNFTISVTTEILPVSMTKTSVDCTMYICGDSTECSNLLLQYGSFCTQLNRALTGIAVEQDKNTQEVFAQVKQIYKTPPIKDFGGFNFSQILPDPSKPSKRSFIEDLLFNKVTLADAGFIKQYGDCLGDIAARDLICAQKFNGLTVLPPLLTDEMIAQYTSALLAGTITSGWTFGAGAALQIPFAMQMAYRFNGIGVTQNVLYENQKLIANQFNSAIGKIQDSLSSTASALGKLQDVVNQNAQALNTLVKQLSSNFGAISSVLNDILSRLDKVEAEVQIDRLITGRLQSLQTYVTQQLIRAAEIRASANLAATKMSECVLGQSKRVDFCGKGYHLMSFPQSAPHGVVFLHVTYVPAQEKNFTTAPAICHDGKAHFPREGVFVSNGTHWFVTQRNFCEPQIITTDNTFVSGNCDVVIGIVNNTVYDPLQPELDSGGGGSDIDPYKEFGSSYQLLNFLPLDFFPDLNALVDTATALYEEELTGREHCSPHHTAIRQALVCWDELTKLIAWMSSNITSEQVRTIIVNHVNDTWGLKVRQSLWFHLSCLTFGQHTVQEFLVSFGVWIRTPAPYRPPNAPILSTLPEHTVIC

SEQ ID NO: 11097 - protein, 1301 aa, Artificial Sequence
  SARS-CoV-2/China/WF0004/2020__EPI_ISL_413694 spike protein (1-1147)(I714C_Y1110C) WhcAg construct
MFVFLVLLPLVSSQCVNLTTRTQLPPAYTNSFTRGVYYPDKVFRSSVLHSTQDLFLPFFSNVTWFHAIHVSGTNGTKRFDNPVLPFNDGVYFASTEKSNIIRGWIFGTTLDSKTQSLLIVNNATNVVIKVCEFQFCNDPFLGVYYHKNNKSWTESEFRVYSSANNCTFEYVSQPFLMDLEGKQGNFKNLREFVFKNIDGYFKIYSKHTPINLVRDLPQGFSALEPLVDLPIGINITRFQTLLALHRSYLTPGDSSSGWTAGAAAYYVGYLQPRTFLLKYNENGTITDAVDCALDPLSETKCTLKSFTVEKGIYQTSNFRVQPTESIVRFPNITNLCPFGEVFNATRFASVYAWNRKRISNCVADYSVLYNSASFSTFKCYGVSPTKLNDLCFTNVYADSFVIRGDEVRQIAPGQTGKIADYNYKLPDDFTGCVIAWNSNNLDSKVGGNYNYLYRLFRKSNLKPFERDISTEIYQAGSTPCNGVEGFNCYFPLQSYGFQPTNGVGYQPYRVVVLSFELLHAPATVCGPKKSTNLVKNKCVNFNFNGLTGTGVLTESNKKFLPFQQFGRDIADTTDAVRDPQTLEILDITPCSFGGVSVITPGTNTSNQVAVLYQDVNCTEVPVAIHADQLTPTWRVYSTGSNVFQTRAGCLIGAEHVNNSYECDIPIGAGICASYQTQTNSPRRARSVASQSIIAYTMSLGAENSVAYSNNSIACPTNFTISVTTEILPVSMTKTSVDCTMYICGDSTECSNLLLQYGSFCTQLNRALTGIAVEQDKNTQEVFAQVKQIYKTPPIKDFGGFNFSQILPDPSKPSKRSFIEDLLFNKVTLADAGFIKQYGDCLGDIAARDLICAQKFNGLTVLPPLLTDEMIAQYTSALLAGTITSGWTFGAGAALQIPFAMQMAYRFNGIGVTQNVLYENQKLIANQFNSAIGKIQDSLSSTASALGKLQDVVNQNAQALNTLVKQLSSNFGAISSVLNDILSRLDKVEAEVQIDRLITGRLQSLQTYVTQQLIRAAEIRASANLAATKMSECVLGQSKRFDFCGKGYHLMSFPQSAPHGVVFLHVTYVPAQEKNFTTAPAICHDGKAHFPREGVFVSNGTHWFVTQRNFCEPQIITTDNTFVSGNCDVVIGIVNNTVYDPLQPELDSGGGGSDIDPYKEFGSSYQLLNFLPLDFFPDLNALVDTATALYEEELTGREHCSPHHTAIRQALVCWDELTKLIAWMSSNITSEQVRTIIVNHVNDTWGLKVRQSLWFHLSCLTFGQHTVQEFLVSFGVWIRTPAPYRPPNAPILSTLPEHTVIC

SEQ ID NO: 11098 - protein, 1301 aa, Artificial Sequence
  SARS-CoV-2/China/WF0028/2020__EPI_ISL_413791 spike protein (1-1147)(I714C_Y1110C) WhcAg construct
MFVFLVLLPLVSSQCVNLTTRTQLPPAYTNSFTRGVYYPDKVFRSSVLHSTQDLFLPFFSNVTWFHAIHVSGTNGTKRFDNPVLPFNDGVYFASTEKSNIIRGWIFGTTLDSKTQSLLIVNNATNVVIKVCEFQFCNDPFLGVYYHKNNKSWMESEFRVYSSANNCTFEYVSQPFLMDLEGKQGNFKNLREFVFKNIDGYFKIYSKHTPINLVRDLPQGFSALEPLVDLPIGINITRFQTLLALHRSYLTPGDSSSGWTAGAAAYYVGYLQPRTFLLKYNENGTITDAVDCALDPLSETKCTLKSFTVEKGIYQTSNFRVQPTESIVRFPNITNLCPFGEVFNATRFASVYAWNRKRISNCVADYSVLYNSASFSTFKCYGVSPTKLNDLCFTNVYADSFVIRGDEVRQIAPGQTGKIADYNYKLPDDFTGCVIAWNSNNLDSKVGGNYNYLYRLFRKSNLKPFERDISTEIYQAGSTPCNGVEGFNCYFPLQSYGFQPTNGVGYQPYRVVVLSFELLHAPATVCGPKKSTNLVKNKCVNFNFNGLTGTGVLTESNKKFLPFQQFGRDIADTTDAVRDPQTLEILDITPCSFGGVSVITPGTNTSNQVAVLYQDVNCTEVPVAIHADQLTPTWRVYSTGSNVFQTRAGCLIGAEHVNNSYECDIPIGAGICASYQTQTNSPRRARSVASQSIIAYTMSLGAENSVAYSNNSIACPTNFTISVTTEILPVSMTKTSVDCTMYICGDSTECSNLLLQYGSFCTQLNRALTGIAVEQDKNTQEVFAQVKQIYKTPPIKDFGGFNFSQILPDPSKPSKRSFIEDLLFNKVTLADAGFIKQYGDCLGDIAARDLICAQKFNGLTVLPPLLTDEMIAQYTSALLAGTITSGWTFGAGAALQIPFAMQMAYRFNGIGVTQNVLYENQKLIANQFNSAIGKIQDSLSSTASALGKLQDVVNQNAQALNTLVKQLSSNFGAISSVLNDILSRLDKVEAEVQIDRLITGRLQSLQTYVTQQLIRAAEIRASANLAATKMSECVLGQSKRVDFCGKGYHLMSFPQSAPHGVVFLHVTYVPAQEKNFTTAPAICHDGKAHFPREGVFVSNGTHWFVTQRNFCEPQIITTDNTFVSGNCDVVIGIVNNTVYDPLQPELESGGGGSDIDPYKEFGSSYQLLNFLPLDFFPDLNALVDTATALYEEELTGREHCSPHHTAIRQALVCWDELTKLIAWMSSNITSEQVRTIIVNHVNDTWGLKVRQSLWFHLSCLTFGQHTVQEFLVSFGVWIRTPAPYRPPNAPILSTLPEHTVIC

SEQ ID NO: 11099 - protein, 1301 aa, Artificial Sequence
  SARS-CoV-2/2019-nCoV/USA-CruiseA-18/2020__MT159716.1 spike protein (1-1147)(I714C_Y1110C) WhcAg construct
MFVFLVLLPLVSSQCVNLTTRTQLPPAYTNSFTRGVYYPDKVFRSSVLHSTQDLFLPFFSNVTWFHAIHVSGTNGTKRFDNPVLPFNDGVYFASTEKSNIIRGWIFGTTLDSKTQSLLIVNNATNVVIKVCEFQFCNDPFLGVYYHKNNKSWMESELRVYSSANNCTFEYVSQPFLMDLEGKQGNFKNLREFVFKNIDGYFKIYSKHTPINLVRDLPQGFSALEPLVDLPIGINITRFQTLLALHRSYLTPGDSSSGWTAGAAAYYVGYLQPRTFLLKYNENGTITDAVDCALDPLSETKCTLKSFTVEKGIYQTSNFRVQPTESIVRFPNITNLCPFGEVFNATRFASVYAWNRKRISNCVADYSVLYNSASFSTFKCYGVSPTKLNDLCFTNVYADSFVIRGDEVRQIAPGQTGKIADYNYKLPDDFTGCVIAWNSNNLDSKVGGNYNYLYRLFRKSNLKPFERDISTEIYQAGSTPCNGVEGFNCYFPLQSYGFQPTNGVGYQPYRVVVLSFELLHAPATVCGPKKSTNLVKNKCVNFNFNGLTGTGVLTESNKKFLPFQQFGRDIADTTDAVRDPQTLEILDITPCSFGGVSVITPGTNTSNQVAVLYQDVNCTEVPVAIHADQLTPTWRVYSTGSNVFQTRAGCLIGAEHVNNSYECDIPIGAGICASYQTQTNSPRRARSVASQSIIAYTMSLGAENSVAYSNNSIACPTNFTISVTTEILPVSMTKTSVDCTMYICGDSTECSNLLLQYGSFCTQLNRALTGIAVEQDKNTQEVFAQVKQIYKTPPIKDFGGFNFSQILPDPSKPSKRSFIEDLLFNKVTLADAGFIKQYGDCLGDIAARDLICAQKFNGLTVLPPLLTDEMIAQYTSALLAGTITSGWTFGAGAALQIPFAMQMAYRFNGIGVTQNVLYENQKLIANQFNSAIGKIQDSLSSTASALGKLQDVVNQNAQALNTLVKQLSSNFGAISSVLNDILSRLDKVEAEVQIDRLITGRLQSLQTYVTQQLIRAAEIRASANLAATKMSECVLGQSKRVDFCGKGYHLMSFPQSAPHGVVFLHVTYVPAQEKNFTTAPAICHDGKAHFPREGVFVSNGTHWFVTQRNFCEPQIITTDNTFVSGNCDVVIGIVNNTVYDPLQPELDSGGGGSDIDPYKEFGSSYQLLNFLPLDFFPDLNALVDTATALYEEELTGREHCSPHHTAIRQALVCWDELTKLIAWMSSNITSEQVRTIIVNHVNDTWGLKVRQSLWFHLSCLTFGQHTVQEFLVSFGVWIRTPAPYRPPNAPILSTLPEHTVIC

SEQ ID NO: 11100 - protein, 1301 aa, Artificial Sequence
  SARS-CoV-2/SARS-CoV-2/Yunnan-01/human/2020/CHN__MT049951.1 spike protein (1-1147)(I714C_Y1110C) WhcAg construct
MFVFLVLLPLVSSQCVNLTTRTQLPPANTNSFTRGVYYPDKVFRSSVLHSTQDLFLPFFSNVTWFHAIHVSGTNGTKRFDNPVLPFNDGVYFASTEKSNIIRGWIFGTTLDSKTQSLLIVNNATNVVIKVCEFQFCNDPFLGVYYHKNNKSWMESEFRVYSSANNCTFEYVSQPFLMDLEGKQGNFKNLREFVFKNIDGYFKIYSKHTPINLVRDLPQGFSALEPLVDLPIGINITRFQTLLALHRSYLTPGDSSSGWTAGAAAYYVGYLQPRTFLLKYNENGTITDAVDCALDPLSETKCTLKSFTVEKGIYQTSNFRVQPTESIVRFPNITNLCPFGEVFNATRFASVYAWNRKRISNCVADYSVLYNSASFSTFKCYGVSPTKLNDLCFTNVYADSFVIRGDEVRQIAPGQTGKIADYNYKLPDDFTGCVIAWNSNNLDSKVGGNYNYLYRLFRKSNLKPFERDISTEIYQAGSTPCNGVEGFNCYFPLQSYGFQPTNGVGYQPYRVVVLSFELLHAPATVCGPKKSTNLVKNKCVNFNFNGLTGTGVLTESNKKFLPFQQFGRDIADTTDAVRDPQTLEILDITPCSFGGVSVITPGTNTSNQVAVLYQDVNCTEVPVAIHADQLTPTWRVYSTGSNVFQTRAGCLIGAEHVNNSYECDIPIGAGICASYQTQTNSPRRARSVASQSIIAYTMSLGAENSVAYSNNSIACPTNFTISVTTEILPVSMTKTSVDCTMYICGDSTECSNLLLQYGSFCTQLNRALTGIAVEQDKNTQEVFAQVKQIYKTPPIKDFGGFNFSQILPDPSKPSKRSFIEDLLFNKVTLADAGFIKQYGDCLGDIAARDLICAQKFNGLTVLPPLLTDEMIAQYTSALLAGTITSGWTFGAGAALQIPFAMQMAYRFNGIGVTQNVLYENQKLIANQFNSAIGKIQDSLSSTASALGKLQDVVNQNAQALNTLVKQLSSNFGAISSVLNDILSRLDKVEAEVQIDRLITGRLQSLQTYVTQQLIRAAEIRASANLAATKMSECVLGQSKRVDFCGKGYHLMSFPQSAPHGVVFLHVTYVPAQEKNFTTAPAICHDGKAHFPREGVFVSNGTHWFVTQRNFCEPQIITTDNTFVSGNCDVVIGIVNNTVYDPLQPELDSGGGGSDIDPYKEFGSSYQLLNFLPLDFFPDLNALVDTATALYEEELTGREHCSPHHTAIRQALVCWDELTKLIAWMSSNITSEQVRTIIVNHVNDTWGLKVRQSLWFHLSCLTFGQHTVQEFLVSFGVWIRTPAPYRPPNAPILSTLPEHTVIC

SEQ ID NO: 11101 - protein, 1301 aa, Artificial Sequence
  SARS-CoV-2/USA/WA-UW292/2020__EPI_ISL_418077 spike protein (1-1147)(I714C_Y1110C) WhcAg construct
MFVFLVLLPLVSSQCVNLTTRTQLPPAYTNSFTRGVYYPDKVFRSSVLHSTQDLFLPFFSNVTWFHAIHVSGTNGTKRFDNPVLPFNDGVYFASTEKSNIIRGWIFGTTLDSKTQSLLIVNNATNVVIKVCEFQFCNDPFLGVYYHKNNKSWMESEFRVYSSANNCTFEYVSQPFLMDLEGKQGNFKNLREFVFKNIDGYFKIYSKHTPINLVRDLPQGFSALEPLVDLPIGINITRFQTLLALHRSYLTPGDSSSGWTAGAAAYYVGYLQPRTFLLKYNENGTITDAVDCALDPLSETKCTLKSFTVEKGIYQTSNFRVQPTESIVRFPNITNLCPFGEVFNATRFASVYAWNRKRISNCVADYSVLYNSASFSTFKCYGVSPTKLNDLCFTNVYADSFVIRGDEVRQIAPGQTGKIADYNYKLPDDFTGCVIAWNSNNLDSKVGGNYNYLYRLFRKSNLKPFERDISTEIYQASSTPCNGVEGFNCYFPLQSYGFQPTNGVGYQPYRVVVLSFELLHAPATVCGPKKSTNLVKNKCVNFNFNGLTGTGVLTESNKKFLPFQQFGRDIADTTDAVRDPQTLEILDITPCSFGGVSVITPGTNTSNQVAVLYQDVNCTEVPVAIHADQLTPTWRVYSTGSNVFQTRAGCLIGAEHVNNSYECDIPIGAGICASYQTQTNSPRRARSVASQSIIAYTMSLGAENSVAYSNNSIACPTNFTISVTTEILPVSMTKTSVDCTMYICGDSTECSNLLLQYGSFCTQLNRALTGIAVEQDKNTQEVFAQVKQIYKTPPIKDFGGFNFSQILPDPSKPSKRSFIEDLLFNKVTLADAGFIKQYGDCLGDIAARDLICAQKFNGLTVLPPLLTDEMIAQYTSALLAGTITSGWTFGAGAALQIPFAMQMAYRFNGIGVTQNVLYENQKLIANQFNSAIGKIQDSLSSTASALGKLQDVVNQNAQALNTLVKQLSSNFGAISSVLNDILSRLDKVEAEVQIDRLITGRLQSLQTYVTQQLIRAAEIRASANLAATKMSECVLGQSKRVDFCGKGYHLMSFPQSAPHGVVFLHVTYVPAQEKNFTTAPAICHDGKAHFPREGVFVSNGTHWFVTQRNFCEPQIITTDNTFVSGNCDVVIGIVNNTVYDPLQPELDSGGGGSDIDPYKEFGSSYQLLNFLPLDFFPDLNALVDTATALYEEELTGREHCSPHHTAIRQALVCWDELTKLIAWMSSNITSEQVRTIIVNHVNDTWGLKVRQSLWFHLSCLTFGQHTVQEFLVSFGVWIRTPAPYRPPNAPILSTLPEHTVIC

SEQ ID NO: 11102 - protein, 1301 aa, Artificial Sequence
  SARS-CoV-2/Iceland/192/2020__EPI_ISL_417819 spike protein (1-1147)(I714C_Y1110C) WhcAg construct
MFVFFVLLPLVSSQCVNLTTRTQLPPAYTNSFTRGVYYPDKVFRSSVLHSTQDLFLPFFSNVTWFHAIHVSGTNGTKRFDNPVLPFNDGVYFASTEKSNIIRGWIFGTTLDSKTQSLLIVNNATNVVIKVCEFQFCNDPFLGVYYHKNNKSWMESEFRVYSSANNCTFEYVSQPFLMDLEGKQGNFKNLREFVFKNIDGYFKIYSKHTPINLVRDLPQGFSALEPLVDLPIGINITRFQTLLALHRSYLTPGDSSSGWTAGAAAYYVGYLQPRTFLLKYNENGTITDAVDCALDPLSETKCTLKSFTVEKGIYQTSNFRVQPTESIVRFPNITNLCPFGEVFNATRFASVYAWNRKRISNCVADYSVLYNSASFSTFKCYGVSPTKLNDLCFTNVYADSFVIRGDEVRQIAPGQTGKIADYNYKLPDDFTGCVIAWNSNNLDSKVGGNYNYLYRLFRKSNLKPFERDISTEIYQAGSTPCNGVEGFNCYFPLQSYGFQPTNGVGYQPYRVVVLSFELLHAPATVCGPKKSTNLVKNKCVNFNFNGLTGTGVLTESNKKFLPFQQFGRDIADTTDAVRDPQTLEILDITPCSFGGVSVITPGTNTSNQVAVLYQGVNCTEVPVAIHADQLTPTWRVYSTGSNVFQTRAGCLIGAEHVNNSYECDIPIGAGICASYQTQTNSPRRARSVASQSIIAYTMSLGAENSVAYSNNSIACPTNFTISVTTEILPVSMTKTSVDCTMYICGDSTECSNLLLQYGSFCTQLNRALTGIAVEQDKNTQEVFAQVKQIYKTPPIKDFGGFNFSQILPDPSKPSKRSFIEDLLFNKVTLADAGFIKQYGDCLGDIAARDLICAQKFNGLTVLPPLLTDEMIAQYTSALLAGTITSGWTFGAGAALQIPFAMQMAYRFNGIGVTQNVLYENQKLIANQFNSAIGKIQDSLSSTASALGKLQDVVNQNAQALNTLVKQLSSNFGAISSVLNDILSRLDKVEAEVQIDRLITGRLQSLQTYVTQQLIRAAEIRASANLAATKMSECVLGQSKRVDFCGKGYHLMSFPQSAPHGVVFLHVTYVPAQEKNFTTAPAICHDGKAHFPREGVFVSNGTHWFVTQRNFCEPQIITTDNTFVSGNCDVVIGIVNNTVYDPLQPELDSGGGGSDIDPYKEFGSSYQLLNFLPLDFFPDLNALVDTATALYEEELTGREHCSPHHTAIRQALVCWDELTKLIAWMSSNITSEQVRTIIVNHVNDTWGLKVRQSLWFHLSCLTFGQHTVQEFLVSFGVWIRTPAPYRPPNAPILSTLPEHTVIC

SEQ ID NO: 11103 - protein, 1301 aa, Artificial Sequence
  SARS-CoV-2/Belgium/ULG-6939/2020__EPI_ISL_417020 spike protein (1-1147)(I714C_Y1110C) WhcAg construct
MFVFLVLLPLVSSQCVNLTTRTQLPPAYTNSFTRGVYYPDKVFRSSVLHSTQDLFLPFFSNVTWFHAIHVSGTNGTKRFDNPVLPFNDGVYFASTEKSNIIRGWIFGTTLDSKTQSLLIVNNATNVVIKVCEFQFCNDPFLGVYYHKNNKSWMESEFRVYSSANNCTFEYVSQPFLMDLEGKQGNFKNLREFVFKNIDGYFKIYSKHTPINLVRDLPQGFSALEPLVDLPIGINITRFQTLLALHRSYLTPGDSSSGWTAGAAAYYVGYLQPRTFLLKYNENGTITDAVDCALDPLSETKCTLKSFTVEKGIYQTSNFRVQPTESIVRFPNITNLCPFGEVFNATRFASVYAWNRKRISNCVADYSVLYNSASFSTFKCYGVSPTKLNDLCFTNVYADSFVIRGDEVRQIAPGQTGKIADYNYKLPDDFTGCVIAWNSNNLDSKVGGNYNYLYRLFRKSNLKPFERDISTEIYQAGSTPCNGVEGFNCYFPLQSYGFQPTNGVGYQPYRVVVLSFELLHAPATVCGPKKSTNLVKNKCVNFNFNGLTGTGVLTESNKKFLPFQQFGRDIADTTDAVRDPQTLEILDITPCSFGGVSVITPGTNTSNQVAVLYQGVNCTEVPVAIHADQLTPTWRVYSTGSNVFQTRAGCLIGAEHVNNSYECDIPIGAGICASYQTQTNSPRRARSVASQSIIAYTMSLGAENSVVYSNNSIACPTNFTISVTTEILPVSMTKTSVDCTMYICGDSTECSNLLLQYGSFCTQLNRALTGIAVEQDKNTQEVFAQVKQIYKTPPIKDFGGFNFSQILPDPSKPSKRSFIEDLLFNKVTLADAGFIKQYGDCLGDIAARDLICAQKFNGLTVLPPLLTDEMIAQYTSALLAGTITSGWTFGAGAALQIPFAMQMAYRFNGIGVTQNVLYENQKLIANQFNSAIGKIQDSLSSTASALGKLQDVVNQNAQALNTLVKQLSSNFGAISSVLNDILSRLDKVEAEVQIDRLITGRLQSLQTYVTQQLIRAAEIRASANLAATKMSECVLGQSKRVDFCGKGYHLMSFPQSAPHGVVFLHVTYVPAQEKNFTTAPAICHDGKAHFPREGVFVSNGTHWFVTQRNFCEPQIITTDNTFVSGNCDVVIGIVNNTVYDPLQPELDSGGGGSDIDPYKEFGSSYQLLNFLPLDFFPDLNALVDTATALYEEELTGREHCSPHHTAIRQALVCWDELTKLIAWMSSNITSEQVRTIIVNHVNDTWGLKVRQSLWFHLSCLTFGQHTVQEFLVSFGVWIRTPAPYRPPNAPILSTLPEHTVIC

SEQ ID NO: 11104 - protein, 1301 aa, Artificial Sequence
  SARS-CoV-2/France/HF2496/2020__EPI_ISL_418231 spike protein (1-1147)(I714C_Y1110C) WhcAg construct
MFVFLVLLPLVSSQCVNLTTRTQLPPAYTNSFTRGVYYPDKVFRSSVLHSTQDLFLPFFSNVTWFHAIHVSGTNGTKRFDNPVLPFNDGVYFASTEKSNIIRGWIFGTTLDSKTQSLLIVNNATNVVIKVCEFQFCNDPFLGVYYHKNNKSWMESEFRVYSSANNCTFEYVSQPFLMDLEGKQGNFKNLREFVFKNIDGYFKIYSKHTPINLVRDLPQGFSALEPLVDLPIGINITRFQTLLALHRSYLTPGDSSSGWTAGAAAYYVGYLQPRTFLLKYNENGTITDAVDCALDPLSETKCTLKSFTVEKGIYQTSNFRVQPTESIVRFPNITNLCPFGEVFNATRFASVYAWNRKRISNCVADYSVLYNSASFSTFKCYGVSPTKLNDLCFTNVYADSFVIRGDEVRQIAPGQTGKIADYNYKLPDDFTGCVIAWNSNNLDSKVGGNYNYLYRLFRKSNLKPFERDISTEIYQAGSTPCNGVEGFNCYFPLQSYGFQPTNGVGYQPYRVVVLSFELLHAPATVCGPKKSTNLVKNKCVNFNFNGLTGTGVLTESNKKFLPFQQFGRDIADTTDAVRDPQTLEILDITPCSFGGVSVITPGTNTSNQVAVLYQGVNCTEVPVAIHADQLTPTWRVYSTGSNVFQTRAGCLIGAEHVNNSYECDIPIGAGICASYQTQTNSPRRARSVASQSIIAYTMSLGAENSVAYSNNSIACPTNFTISVTTEILPVSMTKTSVDCTMYICGDSTECSNLLLQYGSFCTQLNRALTGIAVEQDKNTQEVFAQVKQIYKTPPIKDFGGFNFSQILPDPSKPSKRSFIEDLLFNKVTLADAGFIKQYGDCLGDIVARDLICAQKFNGLTVLPPLLTDEMIAQYTSALLAGTITSGWTFGAGAALQIPFAMQMAYRFNGIGVTQNVLYENQKLIANQFNSAIGKIQDSLSSTASALGKLQDVVNQNAQALNTLVKQLSSNFGAISSVLNDILSRLDKVEAEVQIDRLITGRLQSLQTYVTQQLIRAAEIRASANLAATKMSECVLGQSKRVDFCGKGYHLMSFPQSAPHGVVFLHVTYVPAQEKNFTTAPAICHDGKAHFPREGVFVSNGTHWFVTQRNFCEPQIITTDNTFVSGNCDVVIGIVNNTVYDPLQPELDSGGGGSDIDPYKEFGSSYQLLNFLPLDFFPDLNALVDTATALYEEELTGREHCSPHHTAIRQALVCWDELTKLIAWMSSNITSEQVRTIIVNHVNDTWGLKVRQSLWFHLSCLTFGQHTVQEFLVSFGVWIRTPAPYRPPNAPILSTLPEHTVIC

SEQ ID NO: 11105 - protein, 1301 aa, Artificial Sequence
  SARS-CoV-2/USA/WA-UW291/2020__EPI_ISL_418076 spike protein (1-1147)(I714C_Y1110C) WhcAg construct
MFVFLVLLPLVSSQCVNLTTRTQLPPAYTNSFTRGVYYPDKVFRSSVLHSTQDLFLPFFSNVTWFHAIHVSGTNGTKRFDNPVLPFNDGVYFASTEKSNIIRGWIFGTTLDSKTQSLLIVNNATNVVIKVCEFQFCNDPFLGVYYHKNNKSWMESEFRVYSSANNCTFEYVSQPFLMDLEGKQGNFKNLREFVFKNIDGYFKIYSKHTPINLVRDLPQGFSALEPLVDLPIGINITRFQTLLALHRSYLTPGDSSSGWTAGAAAYYVGYLQPRTFLLKYNENGTITDAVDCALDPLSETKCTLKSFTVEKGIYQTSNFRVQPTESIVRFPNITNLCPFGEVFNATRFASVYAWNRKRISNCVADYSVLYNSASFSTFKCYGVSPTKLNDLCFTNVYADSFVIRGDEVRQIAPGQTGKIADYNYKLPDDFTGCVIAWNSNNLDSKVGGNYNYLYRLFRKSNLKPFERDISTEIYQAGSTPCNGVEGFNCYFPLQSYGFQPTNGVGYQPYRVVVLSFELLHAPATVCGPKKSTNLVKNKCVNFNFNGLTGTGVLTESNKKFLPFQQFGRDIADTTDAVRDPQTLEILDITPCSFGGVSVITPGTNTSNQVAVLYQGVNCTEVPVAIHADQLTPTWRVYSTGSNVFQTRAGCLIGAEHVNNSYECDIPIGAGICASYQTQTNSPRRARSVASQSIIAYTMSLGAENSVAYSNNSIACPTNFTISVTTEILPVSMTKTSVDCTMYICGDSTECSNLLLQYGSFCTQLNRALTGIAVEQDKNTQEVFAQVKQIYKTPPIKDFGGFNFSQILPDPSKPSKRSFIEDLLFNKVTLADAGFIKQYGDCLGDIAARDLICAQKFNGLTVLPPLLTDEMIAQYTSALLAGTITSGWTFGAGAALQIPFAMQMAYRFNGIGVTQNVLYENQKLIANQFNSAIGKIQYSLSSTASALGKLQDVVNQNAQALNTLVKQLSSNFGAISSVLNDILSRLDKVEAEVQIDRLITGRLQSLQTYVTQQLIRAAEIRASANLAATKMSECVLGQSKRVDFCGKGYHLMSFPQSAPHGVVFLHVTYVPAQEKNFTTAPAICHDGKAHFPREGVFVSNGTHWFVTQRNFCEPQIITTDNTFVSGNCDVVIGIVNNTVYDPLQPELDSGGGGSDIDPYKEFGSSYQLLNFLPLDFFPDLNALVDTATALYEEELTGREHCSPHHTAIRQALVCWDELTKLIAWMSSNITSEQVRTIIVNHVNDTWGLKVRQSLWFHLSCLTFGQHTVQEFLVSFGVWIRTPAPYRPPNAPILSTLPEHTVIC

SEQ ID NO: 11106 - protein, 1301 aa, Artificial Sequence; identical to SEQ ID NO: 11069
  SARS-CoV-2/Portugal/PT0034/2020__EPI_ISL_418019 spike protein (1-1147)(I714C_Y1110C) WhcAg construct

SEQ ID NO: 11107 - protein, 1301 aa, Artificial Sequence; identical to SEQ ID NO: 11061
  SARS-CoV-2/Iceland/202/2020__EPI_ISL_417750 spike protein (1-1147)(I714C_Y1110C) WhcAg construct

SEQ ID NO: 11108 - protein, 1301 aa, Artificial Sequence
  SARS-CoV-2/USA/WA-UW261/2020__EPI_ISL_418046 spike protein (1-1147)(I714C_Y1110C) WhcAg construct
MFVFLVLLPLVSSQCVNLTTRTQLPPAYTNSFTRGVYYPDKVFRSSVLHSTQDLFLPFFSNVTWFHAIHVSGTNGTKRFDNPVLPFNDGVYFASTEKSNIIRGWIFGTTLDSKTQSLLIVNNATNVVIKVCEFQFCNDPFLGVYYHKNNKSWMESEFRVYSSANNCTFEYVSQPFLMDLEGKQGNFKNLREFVFKNIDGYFKIYSKHTPINLVRDLPQGFSALEPLVDLPIGINITRFQTLLALHRSYLTPGDSSSGWTAGAAAYYVGYLQPRTFLLKYNENGTITDAVDCALDPLSETKCTLKSFTVEKGIYQTSNFRVQPTESIVRFPNITNLCPFGEVFNATRFTSVYAWNRKRISNCVADYSVLYNSASFSTFKCYGVSPTKLNDLCFTNVYADSFVIRGDEVRQIAPGQTGKIADYNYKLPDDFTGCVIAWNSNNLDSKVGGNYNYLYRLFRKSNLKPFERDISTEIYQAGSTPCNGVEGFNCYFPLQSYGFQPTNGVGYQPYRVVVLSFELLHAPATVCGPKKSTNLVKNKCVNFNFNGLTGTGVLTESNKKFLPFQQFGRDIADTTDAVRDPQTLEILDITPCSFGGVSVITPGTNTSNQVAVLYQDVNCTEVPVAIHADQLTPTWRVYSTGSNVFQTRAGCLIGAEHVNNSYECDIPIGAGICASYQTQTNSPRRARSVASQSIIAYTMSLGAENSVAYSNNSIACPTNFTISVTTEILPVSMTKTSVDCTMYICGDSTECSNLLLQYGSFCTQLNRALTGIAVEQDKNTQEVFAQVKQIYKTPPIKDFGGFNFSQILPDPSKPSKRSFIEDLLFNKVTLADAGFIKQYGDCLGDIAARDLICAQKFNGLTVLPPLLTDEMIAQYTSALLAGTITSGWTFGAGAALQIPFAMQMAYRFNGIGVTQNVLYENQKLIANQFNSAIGKIQDSLSSTASALGKLQDVVNQNAQALNTLVKQLSSNFGAISSVLNDILSRLDKVEAEVQIDRLITGRLQSLQTYVTQQLIRAAEIRASANLAATKMSECVLGQSKRVDFCGKGYHLMSFPQSAPHGVVFLHVTYVPAQEKNFTTAPAICHDGKAHFPREGVFVSNGTHWFVTQRNFCEPQIITTDNTFVSGNCDVVIGIVNNTVYDPLQPELDSGGGGSDIDPYKEFGSSYQLLNFLPLDFFPDLNALVDTATALYEEELTGREHCSPHHTAIRQALVCWDELTKLIAWMSSNITSEQVRTIIVNHVNDTWGLKVRQSLWFHLSCLTFGQHTVQEFLVSFGVWIRTPAPYRPPNAPILSTLPEHTVIC

SEQ ID NO: 11109 - protein, 1301 aa, Artificial Sequence
  SARS-CoV-2/Portugal/PT0035/2020__EPI_ISL_418020 spike protein (1-1147)(I714C_Y1110C) WhcAg construct
MFVFLVLLPLVSSQCVNLTTRTQLPPAYTNSFTRGVYYPDKVFRSSVLHSTQDLFLPFFSNVTWFHAIHVSGTNGTKRFDNPVLPFNDGVYFASTEKSNIIRGWIFGTTLDSKTQSLLIVNNATNVVIKVCEFQFCNDPFLGVYYHKNNKSWMESEFRVYSSANNCTFEYVSQPFLMDLEGKQGNFKNLREFVFKNIDGYFKIYSKHTPINLVRDLPQGFSALEPLVDLPIGINITRFQTLLALHRSYLTPGDSSSGWTAGAAAYYVGYLQPRTFLLKYNENGTITDAVDCALDPLSETKCTLKSFTVEKGIYQTSNFRVQPTESIVRFPNITNLCPFGEVFNATRFASVYAWNRKRISNCVADYSVLYNSASFSTFKCYGVSPTKLNDLCFTNVYADSFVIRGDEVRQIAPGQTGKIADYNYKLPDDFTGCVIAWNSNNLDSKVGGNYNYLYRLFRKSNLKPFERDISTEIYQAGSTPCNGVEGFNCYFPLQSYGFQPTNGVGYQPYRVVVLSFELLHAPATVCGPKKSTNLVKNKCVNFNFNGLTGTGVLTESNKKFLPFQQFGRDIADTTDAVRDPQTLEILDITPCSFGGVSVITPGTNTSNQVAVLYQDVNCTEVPVAIHADQLTPTWRVYSTGSNVFQTRAGCLIGAEHVNNSYECDIPIGAGICASYQTQTNSPRRARSVASQSIIAYTMSLGAENSVAYSNNSIACPTNFTISVTTEILPVSMTKTSVDCTMYICGDSTECSNLLLQYGSFCTQLNRALTGIAVEQDKNTQEVFAQVKQIYKTPPIKDFGGFNFSQILPDPSKPSKRSFIEDLLFNKVTLADAGFIKQYGDCLGDISARDLICAQKFNGLTVLPPLLTDEMIAQYTSALLAGTITSGWTFGAGAALQIPFAMQMAYRFNGIGVTQNVLYENQKLIANQFNSAIGKIQDSLSSTASALGKLQDVVNQNAQALNTLVKQLSSNFGAISSVLNDILSRLDKVEAEVQIDRLITGRLQSLQTYVTQQLIRAAEIRASANLAATKMSECVLGQSKRVDFCGKGYHLMSFPQSAPHGVVFLHVTYVPAQEKNFTTAPAICHDGKAHFPREGVFVSNGTHWFVTQRNFCEPQIITTDNTFVSGNCDVVIGIVNNTVYDPLQPELDSGGGGSDIDPYKEFGSSYQLLNFLPLDFFPDLNALVDTATALYEEELTGREHCSPHHTAIRQALVCWDELTKLIAWMSSNITSEQVRTIIVNHVNDTWGLKVRQSLWFHLSCLTFGQHTVQEFLVSFGVWIRTPAPYRPPNAPILSTLPEHTVIC

SEQ ID NO: 11110 - protein, 1301 aa, Artificial Sequence
  SARS-CoV-2/USA/NY-NYUMC7/2020__EPI_ISL_418192 spike protein (1-1147)(I714C_Y1110C) WhcAg construct
MFVFLVLLPLVSSQCVNLTTRTQLPPAYTNSFTRGVYYPDKVFRSSVLHSTQDLFLPFFSNVTWFHAIHVSGTNGTKRFDNPVLPFNDGVYFASTEKSNIIRGWIFGTTLDSKTQSLLIVNNATNVVIKVCEFQFCNDPFLGVYHHKNNKSWMESEFRVYSSANNCTFEYVSQPFLMDLEGKQGNFKNLREFVFKNIDGYFKIYSKHTPINLVRDLPQGFSALEPLVDLPIGINITRFQTLLALHRSYLTPGDSSSGWTAGAAAYYVGYLQPRTFLLKYNENGTITDAVDCALDPLSETKCTLKSFTVEKGIYQTSNFRVQPTESIVRFPNITNLCPFGEVFNATRFASVYAWNRKRISNCVADYSVLYNSASFSTFKCYGVSPTKLNDLCFTNVYADSFVIRGDEVRQIAPGQTGKIADYNYKLPDDFTGCVIAWNSNNLDSKVGGNYNYLYRLFRKSNLKPFERDISTEIYQAGSTPCNGVEGFNCYFPLQSYGFQPTNGVGYQPYRVVVLSFELLHAPATVCGPKKSTNLVKNKCVNFNFNGLTGTGVLTESNKKFLPFQQFGRDIADTTDAVRDPQTLEILDITPCSFGGVSVITPGTNTSNQVAVLYQGVNCTEVPVAIHADQLTPTWRVYSTGSNVFQTRAGCLIGAEHVNNSYECDIPIGAGICASYQTQTNSPRRARSVASQSIIAYTMSLGAENSVAYSNNSIACPTNFTISVTTEILPVSMTKTSVDCTMYICGDSTECSNLLLQYGSFCTQLNRALTGIAVEQDKNTQEVFAQVKQIYKTPPIKDFGGFNFSQILPDPSKPSKRSFIEDLLFNKVTLADAGFIKQYGDCLGDIAARDLICAQKFNGLTVLPPLLTDEMIAQYTSALLAGTITSGWTFGAGAALQIPFAMQMAYRFNGIGVTQNVLYENQKLIANQFNSAIGKIQDSLSSTASALGKLQDVVNQNAQALNTLVKQLSSNFGAISSVLNDILSRLDKVEAEVQIDRLITGRLQSLQTYVTQQLIRAAEIRASANLAATKMSECVLGQSKRVDFCGKGYHLMSFPQSAPHGVVFLHVTYVPAQEKNFTTAPAICHDGKAHFPREGVFVSNGTHWFVTQRNFCEPQIITTDNTFVSGNCDVVIGIVNNTVYDPLQPELDSGGGGSDIDPYKEFGSSYQLLNFLPLDFFPDLNALVDTATALYEEELTGREHCSPHHTAIRQALVCWDELTKLIAWMSSNITSEQVRTIIVNHVNDTWGLKVRQSLWFHLSCLTFGQHTVQEFLVSFGVWIRTPAPYRPPNAPILSTLPEHTVIC

SEQ ID NO: 11111 - protein, 1301 aa, Artificial Sequence
  SARS-CoV-2/Iceland/189/2020__EPI_ISL_417709 spike protein (1-1147)(I714C_Y1110C) WhcAg construct
MFVFLVLLPLVSSQCVNLTTRTQLPPAYTNSFTRGVYYPDKVFRSSVLHSTQDLFLPFFSNVTWFHAIHVSGTNGTKRFDNPVLPFNDGVYFASTEKSNIIRGWIFGTTLDSKTQSLLIVNNATNVVIKVCEFQFCNDPFLGVYYHKNNKSWMESEFRVYSSANNCTFEYVSQPFLMDLEGKQGNFKNLREFVFKNIDGYFKIYSKHTPINLVRDLPQGFSALEPLVDLPIGINITRFQTLLALHRSYLTPGDSSSGWTAGAAAYYVGYLQPRTFLLKYNENGTITDAVDCALDPLSETKCTLKSFTVEKGIYQTSNFRVQPTESIVRFPNITNLCPFGEVFNATRFASVYAWNRKRISNCVADYSVLYNSASFSTFKCYGVSPTKLNDLCFTNVYADSFVIRGDEVRQIAPGQTGKIADYNYKLPDDFTGCVIAWNSNNLDSKVGGNYNYLYRLFRKSNLKPFERDISTEIYQAGSTPCNGVEGFNCYFPLQSYGFQPTNGVGYQPYRVVVLSFELLHAPATVCGPKKSTNLVKNKCVNFNFNGLTGTGVLTESNKKFLPFQQFGRDIADTTDAVRDPQTLEILDITPCSFGGVSVITPGTNTSNQVAVLYQGVNCTEVPVAIHADQLTPTWRVYSTGSNVFQTRAGCLIGAEHVNNSYECDIPIGAGICASYQTQTNSPRRARSVASQSIIAYTMSLGAENSVAYSNNSIACPTNFTISVTTEILPVSMTKTSVDCTMYICGDSTECSNLLLQYGSFCTQLNRALTGIAVEQDKNTQEVFAQVKQIYKTPPIKDFGGFNFSQILPDPSKPSKRSFIEDLLFNKVTLADAGFTKQYGDCLGDIAARDLICAQKFNGLTVLPPLLTDEMIAQYTSALLAGTITSGWTFGAGAALQIPFAMQMAYRFNGIGVTQNVLYENQKLIANQFNSAIGKIQDSLSSTASALGKLQDVVNQNAQALNTLVKQLSSNFGAISSVLNDILSRLDKVEAEVQIDRLITGRLQSLQTYVTQQLIRAAEIRASANLAATKMSECVLGQSKRVDFCGKGYHLMSFPQSAPHGVVFLHVTYVPAQEKNFTTAPAICHDGKAHFPREGVFVSNGTHWFVTQRNFCEPQIITTDNTFVSGNCDVVIGIVNNTVYDPLQPELDSGGGGSDIDPYKEFGSSYQLLNFLPLDFFPDLNALVDTATALYEEELTGREHCSPHHTAIRQALVCWDELTKLIAWMSSNITSEQVRTIIVNHVNDTWGLKVRQSLWFHLSCLTFGQHTVQEFLVSFGVWIRTPAPYRPPNAPILSTLPEHTVIC

SEQ ID NO: 11112 - protein, 1301 aa, Artificial Sequence
  SARS-CoV-2/Australia/NSW56/2020__EPI_ISL_417408 spike protein (1-1147)(I714C_Y1110C) WhcAg construct
MFVFLVLLPLVSSQCVNLTTRTQLPPAYTNSFTRGVYYPDKVFRSSVLHSTQDLFLPFFSNVTWFHAIHVSGTNGTKRFDNPVLPFNDGVYFASTEKSNIIRGWIFGTTLDSKTQSLLIVNNATNVVIKVCEFQFCNDPFLGVYYHKNNKSWMESEFRVYSSANNCTFEYVSQPFLMDLEGKQGNFKNLREFVFKNIDGYFKIYSKHTPINLVRDLPQGFSALEPLVDLPIGINITRFQTLLALHRSYLTPGDSSSGWTAGAAAYYVGYLQPRTFLLKYNENGTITDAVDCALDPLSETKCTLKSFTVEKGIYQTSNFRVQPTESIVRFPNITNLCPFGEVFNATRFASVYAWNRKRISNCVADYSVLYNSASFSTFKCYGVSPTKLNDLCFTNVYADSFVIRGDEVRQIAPGQTGKIADYNYKLPDDFTGCVIAWNSNNLDSKVGGNYNYLYRLFRKSNLKPFERDISTEIYQAGSTPCNGVEGFNCYFPLQSYGFQPTNGVGYQPYRVVVLSFELLHAPATVCGPKKSTNLVKNKCVNFNFNGLTGTGVLTESNKKFLPFQQFGRDIADTTDAVRDPQTLEILDITPCSFGGVSVITPGTNTSNQVAVLYQDVNCTEVPVAIHADQLTPTWRVYSTGSNVFQTRAGCLIGAEHVNNSYECDIPIGAGICASYQTQTNSPRRARSVASQSIIAYTMSLGAENSVAYSNNSIACPTNFTISVTTEILPVSMTKTSVDCTMYICGDSTECSNLLLQYGSFCTQLNRALTGIAVEQDKNTQEVFAQVKQIYKTPPIKDFGGFNFSQILPDSSKPSKRSFIEDLLFNKVTLADAGFIKQYGDCLGDIAARDLICAQKFNGLTVLPPLLTDEMIAQYTSALLAGTITSGWTFGAGAALQIPFAMQMAYRFNGIGVTQNVLYENQKLIANQFNSAIGKIQDSLSSTASALGKLQDVVNQNAQALNTLVKQLSSNFGAISSVLNDILSRLDKVEAEVQIDRLITGRLQSLQTYVTQQLIRAAEIRASANLAATKMSECVLGQSKRVDFCGKGYHLMSFPQSAPHGVVFLHVTYVPAQEKNFTTAPAICHDGKAHFPREGVFVSNGTHWFVTQRNFCEPQIITTDNTFVSGNCDVVIGIVNNTVYDPLQPELDSGGGGSDIDPYKEFGSSYQLLNFLPLDFFPDLNALVDTATALYEEELTGREHCSPHHTAIRQALVCWDELTKLIAWMSSNITSEQVRTIIVNHVNDTWGLKVRQSLWFHLSCLTFGQHTVQEFLVSFGVWIRTPAPYRPPNAPILSTLPEHTVIC

SEQ ID NO: 11113 - protein, 1301 aa, Artificial Sequence
  SARS-CoV-2/Iceland/280/2020__EPI_ISL_417608 spike protein (1-1147)(I714C_Y1110C) WhcAg construct
MFVFLVLLPLVSSQCVNLTTRTQLPPAYTNSFTRGVYYPDKVFRSSVLHSTQDLFLPFFSNVTWFHAIHVSGTNGTKRFDNPVLPFNDGVYFASTEKSNIIRGWIFGTTLDSKTQSLLIVNNATNVVIKVCEFQFCNDPFLGVYYHKNNKSWMESEFRVYSSANNCTFEYVSQPFLMDLEGKQGNFKNLREFVFKNIDGYFKIYSKHTPINLVRDLPQGFSALEPLVDLPIGINITRFQTLLALHRSYLTPGDSSSGWTAGAAAYYVGYLQPRTFLLKYNENGTITDAVDCALDPLSETKCTLKSFTVEKGIYQTSNFRVQPTESIVRFPNITNLCPFGEVFNATRFASVYAWNRKRISNCVADYSVLYNSASFSTFKCYGVSPTKLNDLCFTNVYADSFVIRGDEVRQIAPGQTGKIADYNYKLPDDFTGCVIAWNSNNLDSKVGGNYNYLYRLFRKSNLKPFERDISTEIYQAGSTPCNGVEGFNCYFPLQSYGFQPTNGVGYQPYRVVVLSFELLHAPATVCGPKKSTNLVKNKCVNFNFNGLTGTGVLTESNKKFLPFQQFGRDIADTTDAVRDPQTLEILDITPCSFGGVSVITPGTNTSNQVAVLYQGVNCTEVPVAIHADQLTPTWRVYSTGSNVFQTRAGCLIGAEHVNNSYECDIPIGAGICASYHTQTNSPRRARSVASQSIIAYTMSLGAENSVAYSNNSIACPTNFTISVTTEILPVSMTKTSVDCTMYICGDSTECSNLLLQYGSFCTQLNRALTGIAVEQDKNTQEVFAQVKQIYKTPPIKDFGGFNFSQILPDPSKPSKRSFIEDLLFNKVTLADAGFIKQYGDCLGDIAARDLICAQKFNGLTVLPPLLTDEMIAQYTSALLAGTITSGWTFGAGAALQIPFAMQMAYRFNGIGVTQNVLYENQKLIANQFNSAIGKIQDSLSSTASALGKLQDVVNQNAQALNTLVKQLSSNFGAISSVLNDILSRLDKVEAEVQIDRLITGRLQSLQTYVTQQLIRAAEIRASANLAATKMSECVLGQSKRVDFCGKGYHLMSFPQSAPHGVVFLHVTYVPAQEKNFTTAPAICHDGKAHFPREGVFVSNGTHWFVTQRNFCEPQIITTDNTFVSGNCDVVIGIVNNTVYDPLQPELDSGGGGSDIDPYKEFGSSYQLLNFLPLDFFPDLNALVDTATALYEEELTGREHCSPHHTAIRQALVCWDELTKLIAWMSSNITSEQVRTIIVNHVNDTWGLKVRQSLWFHLSCLTFGQHTVQEFLVSFGVWIRTPAPYRPPNAPILSTLPEHTVIC

SEQ ID NO: 11114 - protein, 1301 aa, Artificial Sequence; identical to SEQ ID NO: 11069
  SARS-CoV-2/Iceland/247/2020__EPI_ISL_417575 spike protein (1-1147)(I714C_Y1110C) WhcAg construct

SEQ ID NO: 11115 - protein, 1301 aa, Artificial Sequence
  SARS-CoV-2/Iceland/238/2020__EPI_ISL_417566 spike protein (1-1147)(I714C_Y1110C) WhcAg construct
MFVFLVLLPLVSSQCVNLTTRTQLPPAYTNSFTRGVYYPDKVFRSSVLHSTQDLFLPFFSNVTWFHAIHVSGTNGTKRFDNPVLPFNDGVYFASTEKSNIIRGWIFGTTLDSKTQSLLIVNNATNVVIKVCEFQFCNDPFLGVYYHKNNKSWMESEFRVYSSANNCTFEYVSQPFLMDLEGKQGNFKNLREFVFKNIDGYFKIYSKHTPINLVRDLPQGFSALEPLVDLPIGINITRFQTLLALHRSYLTPGDSSSGWTAGAAAYYVGYLQPRTFLLKYNENGTITDAVDCALDPLSETKCTLKSFTVEKGIYQTSNFRVQPTESIVRFPNITNLCPFGEVFNATRFASVYAWNRKRISNCVADYSVLYNSASFSTFKCYGVSPTKLNDLCFTNVYADSFVIRGDEVRQIAPGQTGKIADYNYKLPDDFTGCVIAWNSNNLDSKVGGNYNYLYRLFRKSNLKPFERDISTEIYQAGSTPCNGVEGFNCYFPLQSYGFQPTNGVGYQPYRVVVLSFELLHAPATVCGPKKSTNLVKNKCVNFNFNGLTGTGVLTESNKKFLPFQQFGRDIADTTDAVRDPQTLEILDITPCSFGGVSVITPGTNTSNQVAVLYQGVNCTEVPVAIHADQLTPTWRVYSTGSNVFQTRAGCLIGAEHVNNSYECDIPIGAGICASYQTQTNSPRRARSVASQSIIAYTMSLGAENSVAYSNNSIACPTNFTISVTTEILPVSMTKTSVDCTMYICGDSTECSNLLLQYGSFCTQLNRALTGIAVEQDKNTQEVFAQVKQIYKTPPIKDFGGFNFSQILPDPSKPSKRSFIEDLLFNKVTLADVGFIKQYGDCLGDIAARDLICAQKFNGLTVLPPLLTDEMIAQYTSALLAGTITSGWTFGAGAALQIPFAMQMAYRFNGIGVTQNVLYENQKLIANQFNSAIGKIQDSLSSTASALGKLQDVVNQNAQALNTLVKQLSSNFGAISSVLNDILSRLDKVEAEVQIDRLITGRLQSLQTYVTQQLIRAAEIRASANLAATKMSECVLGQSKRVDFCGKGYHLMSFPQSAPHGVVFLHVTYVPAQEKNFTTAPAICHDGKAHFPREGVFVSNGTHWFVTQRNFCEPQIITTDNTFVSGNCDVVIGIVNNTVYDPLQPELDSGGGGSDIDPYKEFGSSYQLLNFLPLDFFPDLNALVDTATALYEEELTGREHCSPHHTAIRQALVCWDELTKLIAWMSSNITSEQVRTIIVNHVNDTWGLKVRQSLWFHLSCLTFGQHTVQEFLVSFGVWIRTPAPYRPPNAPILSTLPEHTVIC

SEQ ID NO: 11116 - protein, 1301 aa, Artificial Sequence
  SARS-CoV-2/Greece/16/2020__EPI_ISL_418265 spike protein (1-1147)(I714C_Y1110C) WhcAg construct
MFVFLVLLPLVSSQCVNLTTRTQLPPAYTNSFTRGVYYPDKVFRSSVLHSTQDLFLPFFSNVTWFHAIHVSGTNGTKRFDNPVLPFNDGVYFASTEKSNIIRGWIFGTTLDSKTQSLLIVNNATNVVIKVCEFQFCNDPFLGVYYHKNNKSWMESEFRVYSSANNCTFEYVSQPFLMDLEGKQGNFKNLREFVFKNVDGYFKIYSKHTPINLVRDLPQGFSALEPLVDLPIGINITRFQTLLALHRSYLTPGDSSSGWTAGAAAYYVGYLQPRTFLLKYNENGTITDAVDCALDPLSETKCTLKSFTVEKGIYQTSNFRVQPTESIVRFPNITNLCPFGEVFNATRFASVYAWNRKRISNCVADYSVLYNSASFSTFKCYGVSPTKLNDLCFTNVYADSFVIRGDEVRQIAPGQTGKIADYNYKLPDDFTGCVIAWNSNNLDSKVGGNYNYLYRLFRKSNLKPFERDISTEIYQAGSTPCNGVEGFNCYFPLQSYGFQPTNGVGYQPYRVVVLSFELLHAPATVCGPKKSTNLVKNKCVNFNFNGLTGTGVLTESNKKFLPFQQFGRDIADTTDAVRDPQTLEILDITPCSFGGVSVITPGTNTSNQVAVLYQDVNCTEVPVAIHADQLTPTWRVYSTGSNVFQTRAGCLIGAEHVNNSYECDIPIGAGICASYQTQTNSPRRARSVASQSIIAYTMSLGAENSVAYSNNSIACPTNFTISVTTEILPVSMTKTSVDCTMYICGDSTECSNLLLQYGSFCTQLNRALTGIAVEQDKNTQEVFAQVKQIYKTPPIKDFGGFNFSQILPDPSKPSKRSFIEDLLFNKVTLADAGFIKQYGDCLGDIAARDLICAQKFNGLTVLPPLLTDEMIAQYTSALLAGTITSGWTFGAGAALQIPFAMQMAYRFNGIGVTQNVLYENQKLIANQFNSAIGKIQDSLSSTASALGKLQDVVNQNAQALNTLVKQLSSNFGAISSVLNDILSRLDKVEAEVQIDRLITGRLQSLQTYVTQQLIRAAEIRASANLAATKMSECVLGQSKRVDFCGKGYHLMSFPQSAPHGVVFLHVTYVPAQEKNFTTAPAICHDGKAHFPREGVFVSNGTHWFVTQRNFCEPQIITTDNTFVSGNCDVVIGIVNNTVYDPLQPELDSGGGGSDIDPYKEFGSSYQLLNFLPLDFFPDLNALVDTATALYEEELTGREHCSPHHTAIRQALVCWDELTKLIAWMSSNITSEQVRTIIVNHVNDTWGLKVRQSLWFHLSCLTFGQHTVQEFLVSFGVWIRTPAPYRPPNAPILSTLPEHTVIC

SEQ ID NO: 11117 - protein, 1301 aa, Artificial Sequence
  SARS-CoV-2/Iceland/319/2020__EPI_ISL_417648 spike protein (1-1147)(I714C_Y1110C) WhcAg construct
MFVFLVLLPLVSSQCVNLTTRTQLPPAYTNSFTRGVYYPDKVFRSSVLHSTQDLFLPFFSNVTWFHAIHVSGTNGTKRFDNPVLPFNDGVYFASTEKSNIIRGWIFGTTLDSKTQSLLIVNNATNVVIKVCEFQFCNDPFLGVYYHKNNKSWMESEFRVYSSANNCTFEYVSQPFLIDLEGKQGNFKNLREFVFKNIDGYFKIYSKHTPINLVRDLPQGFSALEPLVDLPIGINITRFQTLLALHRSYLTPGDSSSGWTAGAAAYYVGYLQPRTFLLKYNENGTITDAVDCALDPLSETKCTLKSFTVEKGIYQTSNFRVQPTESIVRFPNITNLCPFGEVFNATRFASVYAWNRKRISNCVADYSVLYNSASFSTFKCYGVSPTKLNDLCFTNVYADSFVIRGDEVRQIAPGQTGKIADYNYKLPDDFTGCVIAWNSNNLDSKVGGNYNYLYRLFRKSNLKPFERDISTEIYQAGSTPCNGVEGFNCYFPLQSYGFQPTNGVGYQPYRVVVLSFELLHAPATVCGPKKSTNLVKNKCVNFNFNGLTGTGVLTESNKKFLPFQQFGRDIADTTDAVRDPQTLEILDITPCSFGGVSVITPGTNTSNQVAVLYQGVNCTEVPVAIHADQLTPTWRVYSTGSNVFQTRAGCLIGAEHVNNSYECDIPIGAGICASYQTQTNSPRRARSVASQSIIAYTMSLGAENSVAYSNNSIACPTNFTISVTTEILPVSMTKTSVDCTMYICGDSTECSNLLLQYGSFCTQLNRALTGIAVEQDKNTQEVFAQVKQIYKTPPIKDFGGFNFSQILPDPSKPSKRSFIEDLLFNKVTLADAGFIKQYGDCLGDIAARDLICAQKFNGLTVLPPLLTDEMIAQYTSALLAGTITSGWTFGAGAALQIPFAMQMAYRFNGIGVTQNVLYENQKLIANQFNSAIGKIQDSLSSTASALGKLQDVVNQNAQALNTLVKQLSSNFGAISSVLNDILSRLDKVEAEVQIDRLITGRLQSLQTYVTQQLIRAAEIRASANLAATKMSECVLGQSKRVDFCGKGYHLMSFPQSAPHGVVFLHVTYVPAQEKNFTTAPAICHDGKAHFPREGVFVSNGTHWFVTQRNFCEPQIITTDNTFVSGNCDVVIGIVNNTVYDPLQPELDSGGGGSDIDPYKEFGSSYQLLNFLPLDFFPDLNALVDTATALYEEELTGREHCSPHHTAIRQALVCWDELTKLIAWMSSNITSEQVRTIIVNHVNDTWGLKVRQSLWFHLSCLTFGQHTVQEFLVSFGVWIRTPAPYRPPNAPILSTLPEHTVIC

SEQ ID NO: 11118 - protein, 1301 aa, Artificial Sequence
  SARS-CoV-2/Congo/94/2020__EPI_ISL_417947 spike protein (1-1147)(I714C_Y1110C) WhcAg construct
MFVFLVLLPLVSSQCVNLTTRTQLPPAYTNSFTRGVYYPDKVFRSSVLHSTQDLFLPFFSNVTWFHAIHVSGTNGTKRFDNPVLPFNDGVYFASTEKSNIIRGWIFGTTLDSKTQSLLIVNNATNVVIKVCEFQFCNDPFLGVYYHKNNKSWMESEFRVYSSANNCTFEYVSQPFLMDLEGKQGNFKNLREFVFKNIDGYFKIYSKHTPINLVRDLPQGFSALEPLVDLPIGINITRFQTLLALHRSYLTPGDSSSGWTAGAAAYYVGYLQPRTFLLKYNENGTITDAVDCALDPLSETKCTLKSFTVEKGIYQTSNFRVQPTESIVRFPNITNLCPFGEVFNATRFASVYAWNRKRISNCVADYSVLYNSASFSTFKCYGVSPTKLNDLCFTNVYADSFVIRGDEVRQIAPGQTGKIADYNYKLPDDFTGCVIAWNSNNLDSKVGGNYNYLYRLFRKSNLKPFERDISTEIYQAGSTPCNGVEGFNCYFPLQSYGFQPTNGVGYQPYRVVVLSFELLHAPATVCGPKKSTNLVKNKCVNFNFNGLTGTGVLTESNKKFLPFQQFGRDIADTTDAVRDPQTLEILDITPCSFGGVSVITPGTNTSNQVAVLYQGVNCTEVPVAIHADQLTPTWRVYSTGSNVFQTRAGCLIGAEHVNNSYECDIPIGAGICASYQTQTNSPRRARSVASQSIIAYTMSLGAENSVAYSNNSIACPTNFTISVTTEILPVSMTKTSVDCTMYICGDSTECSNLLLQYGSFCTQLNRALTGIAVEQDKNTQEVFAQVKQIYKTPPIKDFGGFNFSQILPDPSKPSKRSFIEDILFNKVTLADAGFIKQYGDCLGDIAARDLICAQKFNGLTVLPPLLTDEMIAQYTSALLAGTITSGWTFGAGAALQIPFAMQMAYRFNGIGVTQNVLYENQKLIANQFNSAIGKIQDSLSSTASALGKLQDVVNQNAQALNTLVKQLSSNFGAISSVLNDILSRLDKVEAEVQIDRLITGRLQSLQTYVTQQLIRAAEIRASANLAATKMSECVLGQSKRVDFCGKGYHLMSFPQSAPHGVVFLHVTYVPAQEKNFTTAPAICHDGKAHFPREGVFVSNGTHWFVTQRNFCEPQIITTDNTFVSGNCDVVIGIVNNTVYDPLQPELDSGGGGSDIDPYKEFGSSYQLLNFLPLDFFPDLNALVDTATALYEEELTGREHCSPHHTAIRQALVCWDELTKLIAWMSSNITSEQVRTIIVNHVNDTWGLKVRQSLWFHLSCLTFGQHTVQEFLVSFGVWIRTPAPYRPPNAPILSTLPEHTVIC

SEQ ID NO: 11119 - protein, 1301 aa, Artificial Sequence
  SARS-CoV-2/Congo/158/2020__EPI_ISL_417950 spike protein (1-1147)(I714C_Y1110C) WhcAg construct
MFVFLVLLPLVSSQCVNLTTRTQLPPAYTNSFTRGVYYPDKVFRSSVLHSTQDLFLPFFSNVTWFHAIHVSGTNGTKRFDNPVLPFNDGVYFASTEKSNIIRGWIFGTTLDSKTQSLLIVNNATNVVIKVCEFQFCNDPFLGVYYHKNNKSWMESEFRVYSSANNCTFEYVSQPFLMDLEGKQGNFKNLREFVFKNIDGYFKIYSKHTPINLVRDLPQGFSALEPLVDLPIGINITRFQTLLALHRSYLTPGDSSSGWTAGAAAYYVGYLQPRTFLLKYNENGTITDAVDCALDPLSETKCTLKSFTVEKGIYQTSNFRVQPTESIVRFPNITNLCPFGEVFNATRFASVYAWNRKRISNCVADYSVLYNSASFSTFKCYGVSPTKLNDLCFTNVYADSFVIRGDEVRQIAPGQTGKIADYNYKLPDDFTGCVIAWNSNNLDSKVGGNYNYLYRLFRKSNLKPFERDISTEIYQAGSTPCNGVEGFNCYFPLQSYGFQPTNGVGYQPYRVVVLSFELLHAPATVCGPKKSTNLVKNKCVNFNFNGLTGTGVLTESNKKFLPFQQFGRDIADTTDAVRDPQTLEILDITPCSFGGVSVITPGTNTSNQVAVLYQDVNCTEVPVAIHADQLTPTWRVYSTGSNVFQTRAGCLIGAEHVNNSYECDIPIGAGICASYQTQTNSPRRARSVASQSIIAYTMSLGAENSVAYSNNSIACPTNFTISVTTEILPVSMTKTSVDCTMYICGDSTECSNLLLQYGSFCTQLNRALTGIAVEQDKNTQEVFAQVKQIYKTPPIKDFGGFNFSQILPDPSKPSKRSFIEDLLFNKVTLADAGFIKQYGDCLGDIAARDLICAQKFNGLTVLPPLLTDEMIAQYTSALLAGTITSGWTFGAGAALQIPFAMQMAYRFNGIGVTQNVLYENQKLIANQFNSAIGKIQDSLSSTASALGKLQDVVNQNAQALNTLVKQLSSNFGAISSVLNDILSRLDKVEAEVQIDRLITGRLQSLQTYVTQQLIRAAEIRASANLAATKMSECVLGQSKRVDFCGKGYHLMSFPQSAPHGVVFLHVTYVPAQEKNFTTAPAICHDGKAHFPREGVFVSNGTHWFVTQRNFCEPQIITTDNTFLSGNCDVVIGIVNNTVYDPLQPELDSGGGGSDIDPYKEFGSSYQLLNFLPLDFFPDLNALVDTATALYEEELTGREHCSPHHTAIRQALVCWDELTKLIAWMSSNITSEQVRTIIVNHVNDTWGLKVRQSLWFHLSCLTFGQHTVQEFLVSFGVWIRTPAPYRPPNAPILSTLPEHTVIC

SEQ ID NO: 11120 - protein, 1301 aa, Artificial Sequence
  SARS-CoV-2/USA/UT-00034/2020__EPI_ISL_417977 spike protein (1-1147)(I714C_Y1110C) WhcAg construct
MFVFLVLLPLVSSQCVNLTTRTQLPPAYTNSFTRGVYYPDKVFRSSVLHSTQDLFLPFFSNVTWFHAIHVSGTNGTKRFDNPVLPFNDGVYFASTEKSNIIRGWIFGTTLDSKTQSLLIVNNATNVVIKVCEFQFCNDPFLGVYYYKNNKSWMESEFRVYSSANNCTFEYVSQPFLMDLEGKQGNFKNLREFVFKNIDGYFKIYSKHTPINLVRDLPQGFSALEPLVDLPIGINITRFQTLLALHRSYLTPGDSSSGWTAGAAAYYVGYLQPRTFLLKYNENGTITDAVDCALDPLSETKCTLKSFTVEKGIYQTSNFRVQPTESIVRFPNITNLCPFGEVFNATRFASVYAWNRKRISNCVADYSVLYNSASFSTFKCYGVSPTKLNDLCFTNVYADSFVIRGDEVRQIAPGQTGKIADYNYKLPDDFTGCVIAWNSNNLDSKVGGNYNYLYRLFRKSNLKPFERDISTEIYQAGSTPCNGVEGFNCYFPLQSYGFQPTNGVGYQPYRVVVLSFELLHAPATVCGPKKSTNLVKNKCVNFNFNGLTGTGVLTESNKKFLPFQQFGRDIADTTDAVRDPQTLEILDITPCSFGGVSVITPGTNTSNQVAVLYQGVNCTEVPVAIHADQLTPTWRVYSTGSNVFQTRAGCLIGAEHVNNSYECDIPIGAGICASYQTQTNSPRRARSVASQSIIAYTMSLGAENSVAYSNNSIACPTNFTISVTTEILPVSMTKTSVDCTMYICGDSTECSNLLLQYGSFCTQLNRALTGIAVEQDKNTQEVFAQVKQIYKTPPIKDFGGFNFSQILPDPSKPSKRSFIEDLLFNKVTLADAGFIKQYGDCLGDIAARDLICAQKFNGLTVLPPLLTDEMIAQYTSALLAGTITSGWTFGAGAALQIPFAMQMAYRFNGIGVTQNVLYENQKLIANQFNSAIGKIQDSLSSTASALGKLQDVVNQNAQALNTLVKQLSSNFGAISSVLNDILSRLDKVEAEVQIDRLITGRLQSLQTYVTQQLIRAAEIRASANLAATKMSECVLGQSKRVDFCGKGYHLMSFPQSAPHGVVFLHVTYVPAQEKNFTTAPAICHDGKAHFPREGVFVSNGTHWFVTQRNFCEPQIITTDNTFVSGNCDVVIGIVNNTVYDPLQPELDSGGGGSDIDPYKEFGSSYQLLNFLPLDFFPDLNALVDTATALYEEELTGREHCSPHHTAIRQALVCWDELTKLIAWMSSNITSEQVRTIIVNHVNDTWGLKVRQSLWFHLSCLTFGQHTVQEFLVSFGVWIRTPAPYRPPNAPILSTLPEHTVIC

SEQ ID NO: 11121 - protein, 1301 aa, Artificial Sequence
  SARS-CoV-2/USA/UT-00033/2020__EPI_ISL_417976 spike protein (1-1147)(I714C_Y1110C) WhcAg construct
MFVFLVLLPLVSSQCVNLTTRTQLPPAYTNSFTRGVYYPDKVFRSSVLHSTQDLFLPFFSNVTWFHAIHVSGTNGTKRFDNPVLPFNDGVYFASTEKSNIIRGWIFGTTLDSKTQSLLIVNNATNVVIKVCEFQFCNDPFLGVYYHKNNKSWMESEFRVYSSANNCTFEYVSQPFLMDLEGKQGNFKNLREFVFKNIDGYFKIYSKHTPINLVRDLPQGFSALEPLVDLPIGINITRFQTLLALHRSYLTPGDSSSGLTAGAAAYYVGYLQPRTFLLKYNENGTITDAVDCALDPLSETKCTLKSFTVEKGIYQTSNFRVQPTESIVRFPNITNLCPFGEVFNATRFASVYAWNRKRISNCVADYSVLYNSASFSTFKCYGVSPTKLNDLCFTNVYADSFVIRGDEVRQIAPGQTGKIADYNYKLPDDFTGCVIAWNSNNLDSKVGGNYNYLYRLFRKSNLKPFERDISTEIYQAGSTPCNGVEGFNCYFPLQSYGFQPTNGVGYQPYRVVVLSFELLHAPATVCGPKKSTNLVKNKCVNFNFNGLTGTGVLTESNKKFLPFQQFGRDIADTTDAVRDPQTLEILDITPCSFGGVSVITPGTNTSNQVAVLYQGVNCTEVPVAIHADQLTPTWRVYSTGSNVFQTRAGCLIGAEHVNNSYECDIPIGAGICASYQTQTNSPRRARSVASQSIIAYTMSLGAENSVAYSNNSIACPTNFTISVTTEILPVSMTKTSVDCTMYICGDSTECSNLLLQYGSFCTQLNRALTGIAVEQDKNTQEVFAQVKQIYKTPPIKDFGGFNFSQILPDPSKPSKRSFIEDLLFNKVTLADAGFIKQYGDCLGDIAARDLICAQKFNGLTVLPPLLTDEMIAQYTSALLAGTITSGWTFGAGAALQIPFAMQMAYRFNGIGVTQNVLYENQKLIANQFNSAIGKIQDSLSSTASALGKLQDVVNQNAQALNTLVKQLSSNFGAISSVLNDILSRLDKVEAEVQIDRLITGRLQSLQTYVTQQLIRAAEIRASANLAATKMSECVLGQSKRVDFCGKGYHLMSFPQSAPHGVVFLHVTYVPAQEKNFTTAPAICHDGKAHFPREGVFVSNGTHWFVTQRNFCEPQIITTDNTFVSGNCDVVIGIVNNTVYDPLQPELDSGGGGSDIDPYKEFGSSYQLLNFLPLDFFPDLNALVDTATALYEEELTGREHCSPHHTAIRQALVCWDELTKLIAWMSSNITSEQVRTIIVNHVNDTWGLKVRQSLWFHLSCLTFGQHTVQEFLVSFGVWIRTPAPYRPPNAPILSTLPEHTVIC

SEQ ID NO: 11122 - protein, 1301 aa, Artificial Sequence
  SARS-CoV-2/USA/WI-13/2020__EPI_ISL_417516 spike protein (1-1147)(I714C_Y1110C) WhcAg construct
MFVFLVLLPLVSSQCVNLTTRTQLPPAYTNSFTRGVYYPDKVFRSSVLHSTQDLFLPFFSNVTWFHAIHVSGTNGTKRFDNPVLPFNDGVYFASTEKSNIIRGWIFGTTLDSKTQSLLIVNNATNVVIKVCEFQFCNDPFLGVYYHKNNKSWMESEFRVYSSANNCTFEYVSQPFLMDLEGKQGNFKNLREFVFKNIDGYFKIYSKHTPINLVRDLPQGFSALEPLVDLPIGINITRFQTLLALHRSYLTPGDSSSGWTAGAAAYYVGYLQPRTFLLKYNENGTITDAVDCALDPLSETKCTLKSFTVEKGIYQTSNFRVLPTESIVRFPNITNLCPFGEVFNATRFASVYAWNRKRISNCVADYSVLYNSASFSTFKCYGVSPTKLNDLCFTNVYADSFVIRGDEVRQIAPGQTGKIADYNYKLPDDFTGCVIAWNSNNLDSKVGGNYNYLYRLFRKSNLKPFERDISTEIYQAGSTPCNGVEGFNCYFPLQSYGFQPTNGVGYQPYRVVVLSFELLHAPATVCGPKKSTNLVKNKCVNFNFNGLTGTGVLTESNKKFLPFQQFGRDIADTTDAVRDPQTLEILDITPCSFGGVSVITPGTNTSNQVAVLYQGVNCTEVPVAIHADQLTPTWRVYSTGSNVFQTRAGCLIGAEHVNNSYECDIPIGAGICASYQTQTNSPRRARSVASQSIIAYTMSLGAENSVAYSNNSIACPTNFTISVTTEILPVSMTKTSVDCTMYICGDSTECSNLLLQYGSFCTQLNRALTGIAVEQDKNTQEVFAQVKQIYKTPPIKDFGGFNFSQILPDPSKPSKRSFIEDLLFNKVTLADAGFIKQYGDCLGDIAARDLICAQKFNGLTVLPPLLTDEMIAQYTSALLAGTITSGWTFGAGAALQIPFAMQMAYRFNGIGVTQNVLYENQKLIANQFNSAIGKIQDSLSSTASALGKLQDVVNQNAQALNTLVKQLSSNFGAISSVLNDILSRLDKVEAEVQIDRLITGRLQSLQTYVTQQLIRAAEIRASANLAATKMSECVLGQSKRVDFCGKGYHLMSFPQSAPHGVVFLHVTYVPAQEKNFTTAPAICHDGKAHFPREGVFVSNGTHWFVTQRNFCEPQIITTDNTFVSGNCDVVIGIVNNTVYDPLQPELDSGGGGSDIDPYKEFGSSYQLLNFLPLDFFPDLNALVDTATALYEEELTGREHCSPHHTAIRQALVCWDELTKLIAWMSSNITSEQVRTIIVNHVNDTWGLKVRQSLWFHLSCLTFGQHTVQEFLVSFGVWIRTPAPYRPPNAPILSTLPEHTVIC

SEQ ID NO: 11123 - protein, 1300 aa, Artificial Sequence
  SARS-CoV-2/India/1-27/2020__EPI_ISL_413522 spike protein (1-1146)(I713C_Y1109C) WhcAg construct
MFVFLVLLPLVSSQCVNLTTRTQLPPAYTNSFTRGVYYPDKVFRSSVLHSTQDLFLPFFSNVTWFHAIHVSGTNGTKRFDNPVLPFNDGVYFASTEKSNIIRGWIFGTTLDSKTQSLLIVNNATNVVIKVCEFQFCNDPFLGVYHKNNKSWMESEFRVYSSANNCTFEYVSQPFLMDLEGKQGNFKNLREFVFKNIDGYFKIYSKHTPINLVRDLPQGFSALEPLVDLPIGINITRFQTLLALHRSYLTPGDSSSGWTAGAAAYYVGYLQPRTFLLKYNENGTITDAVDCALDPLSETKCTLKSFTVEKGIYQTSNFRVQPTESIVRFPNITNLCPFGEVFNATRFASVYAWNRKRISNCVADYSVLYNSASFSTFKCYGVSPTKLNDLCFTNVYADSFVIRGDEVIQIAPGQTGKIADYNYKLPDDFTGCVIAWNSNNLDSKVGGNYNYLYRLFRKSNLKPFERDISTEIYQAGSTPCNGVEGFNCYFPLQSYGFQPTNGVGYQPYRVVVLSFELLHAPATVCGPKKSTNLVKNKCVNFNFNGLTGTGVLTESNKKFLPFQQFGRDIADTTDAVRDPQTLEILDITPCSFGGVSVITPGTNTSNQVAVLYQDVNCTEVPVAIHADQLTPTWRVYSTGSNVFQTRAGCLIGAEHVNNSYECDIPIGAGICASYQTQTNSPRRARSVASQSIIAYTMSLGAENSVAYSNNSIACPTNFTISVTTEILPVSMTKTSVDCTMYICGDSTECSNLLLQYGSFCTQLNRALTGIAVEQDKNTQEVFAQVKQIYKTPPIKDFGGFNFSQILPDPSKPSKRSFIEDLLFNKVTLADAGFIKQYGDCLGDIAARDLICAQKFNGLTVLPPLLTDEMIAQYTSALLAGTITSGWTFGAGAALQIPFAMQMAYRFNGIGVTQNVLYENQKLIANQFNSAIGKIQDSLSSTASALGKLQDVVNQNAQALNTLVKQLSSNFGAISSVLNDILSRLDKVEAEVQIDRLITGRLQSLQTYVTQQLIRAAEIRASANLAATKMSECVLGQSKRVDFCGKGYHLMSFPQSAPHGVVFLHVTYVPAQEKNFTTAPAICHDGKAHFPREGVFVSNGTHWFVTQRNFCEPQIITTDNTFVSGNCDVVIGIVNNTVYDPLQPELDSGGGGSDIDPYKEFGSSYQLLNFLPLDFFPDLNALVDTATALYEEELTGREHCSPHHTAIRQALVCWDELTKLIAWMSSNITSEQVRTIIVNHVNDTWGLKVRQSLWFHLSCLTFGQHTVQEFLVSFGVWIRTPAPYRPPNAPILSTLPEHTVIC

SEQ ID NO: 11124 - protein, 1295 aa, Artificial Sequence
  SARS-CoV-2/pangolin/Guangxi/P4L/2017__EPI_ISL_410538 spike protein (1-1141)(I708C_Y1104C) WhcAg construct
MFVFLFVLPLVSSQCVNLTTRTGIPPGYTNSSTRGVYYPDKVFRSSILHLTQDLFLPFFSNVTWFNTINYQGGFKKFDNPVLPFNDGVYFASTEKSNIIRGWIFGTTLDARTQSLLIVNNATNVVIKVCEFQFCTDPFLGVYYHNNNKTWVENEFRVYSSANNCTFEYISQPFLMDLEGKQGNFKNLREFVFKNVDGYFKIYSKHTPIDLVRDLPRGFAALEPLVDLPIGINITRFQTLLALHRSYLTPGNLESGWTTGAAAYYVGYLQQRTFLLSYNQNGTITDAVDCSLDPLSETKCTLKSLTVEKGIYQTSNFRVQPTISIVRFPNITNLCPFGEVFNASKFASVYAWNRKRISNCVADYSVLYNSTSFSTFKCYGVSPTKLNDLCFTNVYADSFVVKGDEVRQIAPGQTGVIADYNYKLPDDFTGCVIAWNSVKQDALTGGNYGYLYRLFRKSKLKPFERDISTEIYQAGSTPCNGQVGLNCYYPLERYGFHPTTGVNYQPFRVVVLSFELLNGPATVCGPKLSTTLVKDKCVNFNFNGLTGTGVLTTSKKQFLPFQQFGRDISDTTDAVRDPQTLEILDITPCSFGGVSVITPGTNTSNQVAVLYQDVNCTEVPMAIHAEQLTPAWRVYSAGANVFQTRAGCLVGAEHVNNSYECDIPVGAGICASYHSMSSLRSVNQRSIIAYTMSLGAENSVAYSNNSIACPTNFTISVTTEILPVSMTKTSVDCTMYICGDSIECSNLLLQYGSFCTQLNRALTGIAVEQDKNTQEVFAQVKQIYKTPPIKDFGGFNFSQILPDPSKPSKRSFIEDLLFNKVTLADAGFIKQYGDCLGDIAARDLICAQKFNGLTVLPPLLTDEMIAQYTSALLAGTITSGWTFGAGAALQIPFAMQMAYRFNGIGVTQNVLYENQKLIANQFNSAIGKIQDSLSSTASALGKLQDVVNQNAQALNTLVKQLSSNFGAISSVLNDILSRLDKVEAEVQIDRLITGRLQSLQTYVTQQLIRAAEIRASANLAATKMSECVLGQSKRVDFCGKGYHLMSFPQSAPHGVVFLHVTYVPAQEKNFTTAPAICHEGKAHFPREGVFVSNGTHWFITQRNFCEPQIITTDNTFVSGSCDVVIGIVNNTVYDPLQPELDSGGGGSDIDPYKEFGSSYQLLNFLPLDFFPDLNALVDTATALYEEELTGREHCSPHHTAIRQALVCWDELTKLIAWMSSNITSEQVRTIIVNHVNDTWGLKVRQSLWFHLSCLTFGQHTVQEFLVSFGVWIRTPAPYRPPNAPILSTLPEHTVIC

SEQ ID NO: 11125 - protein, 1295 aa, Artificial Sequence
  SARS-CoV-2/pangolin/Guangxi/P5L/2017__EPI_ISL_410540 spike protein (1-1141)(I708C_Y1104C) WhcAg construct
MFVFLFVLPLVSSQCVNLTTRTGIPPGYTNSSTRGVYYPDKVFRSSILHLTQDLFLPFFSNVTWFNTINYQGGFKKFDNPVLPFNDGVYFASTEKSNIIRGWIFGTTLDARTQSLLIVNNATNVVIKVCEFQFCTDPFLGVYYHNNNKTWVENEFRVYSSANNCTFEYISQPFLMDLEGKQGNFKNLREFVFKNVDGYFKIYSKHTPIDLVRDLPRGFAALEPLVDLPIGINITRFQTLLALHRSYLTPGKLESGWTTGAAAYYVGYLQQRTFLLSYNQNGTITDAVDCSLDPLSETKCTLKSLTVEKGIYQTSNFRVQPTISIVRFPNITNLCPFGEVFNASKFASVYAWNRKRISNCVADYSVLYNSTSFSTFKCYGVSPTKLNDLCFTNVYADSFVVKGDEVRQIAPGQTGVIADYNYKLPDDFTGCVIAWNSVKQDALTGGNYGYLYRLFRKSKLKPFERDISTEIYQAGSTPCNGQVGLNCYYPLERYGFHPTTGVNYQPFRVVVLSFELLNGPATVCGPKLSTTLVKDKCVNFNFNGLTGTGVLTTSKKQFLPFQQFGRDISDTTDAVRDPQTLEILDITPCSFGGVSVITPGTNTSNQVAVLYQDVNCTEVPMAIHAEQLTPAWRVYSAGANVFQTRAGCLVGAEHVNNSYECDIPVGAGICASYHSMSSFRSVNQRSIIAYTMSLGAENSVAYSNNSIACPTNFTISVTTEILPVSMTKTSVDCTMYICGDSIECSNLLLQYGSFCTQLNRALTGIAVEQDKNTQEVFAQVKQIYKTPPIKDFGGFNFSQILPDPSKPSKRSFIEDLLFNKVTLADAGFIKQYGDCLGDIAARDLICAQKFNGLTVLPPLLTDEMIAQYTSALLAGTITSGWTFGAGAALQIPFAMQMAYRFNGIGVTQNVLYENQKLIANQFNSAIGKIQDSLSSTASALGKLQDVVNQNAQALNTLVKQLSSNFGAISSVLNDILSRLDKVEAEVQIDRLITGRLQSLQTYVTQQLIRAAEIRASANLAATKMSECVLGQSKRVDFCGKGYHLMSFPQSAPHGVVFLHVTYVPAQEKNFTTAPAICHEGKAHFPREGVFVSNGTHWFITQRNFCEPQIITTDNTFVSGSCDVVIGIVNNTVYDPLQPELDSGGGGSDIDPYKEFGSSYQLLNFLPLDFFPDLNALVDTATALYEEELTGREHCSPHHTAIRQALVCWDELTKLIAWMSSNITSEQVRTIIVNHVNDTWGLKVRQSLWFHLSCLTFGQHTVQEFLVSFGVWIRTPAPYRPPNAPILSTLPEHTVIC

SEQ ID NO: 11126 - protein, 1295 aa, Artificial Sequence
  SARS-CoV-2/pangolin/Guangxi/P5E/2017__EPI_ISL_410541 spike protein (1-1141)(I708C_Y1104C) WhcAg construct
MFVFLFVLPLVSSQCVNLTTRTGIPPGYTNSSTRGVYYPDKVFRSSILHLTQDLFLPFFSNVTWFNTITYQGGSKKFDNPVLPFNDGVYFASTEKSNIIRGWIFGTTLDARTQSLLIVNNATNVVIKVCEFQFCTDPFLGVYYHNNNKTWVENEFRVYSSANNCTFEYISQPFLMDLEGKQGNFKNLREFVFKNVDGYFKIYSKHTPIDLVRDLPRGFAALEPLVDLPIGINITRFQTLLALHRSYLTPGKLESGWTTGAAAYYVGYLQQRTFLLSYNQNGTITDAVDCSLDPLSETKCTLKSLTVEKGIYQTSNFRVQPTISIVRFPNITNLCPFGEVFNASKFASVYAWNRKRISNCVADYSVLYNSTSFSTFKCYGVSPTKLNDLCFTNVYADSFVVKGDEVRQIAPGQTGVIADYNYKLPDDFTGCVIAWNSVKQDALTGDNYGYLYRLFRKSKLKPFERDISTEIYQAGSTPCNGQVGLNCYYPLERYGFHPTTGVNYQPFRVVVLSFELLNGPATVCGPKLSTTLVKDKCVNFNFNGLTGTGVLTTSKKQFLPFQQFGRDISDTTDAVRDPQTLEILDITPCSFGGVSVITPGTNTSNQVAVLYQDVNCTEVPMAIHAEQLTPAWRVYSAGANVFQTRAGCLVGAEHVNNSYECDIPVGAGICASYHSMSSFRSVNQRSIIAYTMSLGAENSVAYSNNSIACPTNFTISVTTEILPVSMTKTSVDCTMYICGDSIECSNLLLQYGSFCTQLNRALTGIAVEQDKNTQEVFAQVKQIYKTPPIKDFGGFNFSQILPDPSKPSKRSFIEDLLFNKVTLADAGFIKQYGDCLGDIAARDLICAQKFNGLTVLPPLLTDEMIAQYTSALLAGTITSGWTFGAGAALQIPFAMQMAYRFNGIGVTQNVLYENQKLIANQFNSAIGKIQDSLSSTASALGKLQDVVNQNAQALNTLVKQLSSNFGAISSVLNDILSRLDKVEAEVQIDRLITGRLQSLQTYVTQQLIRAAEIRASANLAATKMSECVLGQSKRVDFCGKGYHLMSFPQSAPHGVVFLHVTYVPAQEKNFTTAPAICHEGKAHFPREGVFVSNGTHWFITQRNFCEPQIITTDNTFVSGSCDVVIGIVNNTVYDPLQPELDSGGGGSDIDPYKEFGSSYQLLNFLPLDFFPDLNALVDTATALYEEELTGREHCSPHHTAIRQALVCWDELTKLIAWMSSNITSEQVRTIIVNHVNDTWGLKVRQSLWFHLSCLTFGQHTVQEFLVSFGVWIRTPAPYRPPNAPILSTLPEHTVIC

SEQ ID NO: 11127 - protein, 1293 aa, Artificial Sequence
  SARS-CoV-2/pangolin/Guangxi/P1E/2017__EPI_ISL_410539 spike protein (1-1139)(I706C_Y1102C) WhcAg construct
MFVFLFVLPLVSSQCVNLTTRTGIQPGYTNSSTRGVYYPDKVFRSSILHLTQDLFLPFFSNVTWFNTINYQGGFKKFDNPVLPFNDGVYFASTEKSNIIRGWIFGTTLDARTQSLLIVNNATNVVIKVCEFQFCTDPFLGVYYHNNNKTWVENEFRVYSSANNCTFEYISQPFLMDLEGKQGNFKNLREFVFKNVDGYFKIYSKHTPIDLVRDLPRGFAALEPLVDLPIGINITRFQTLLALHRSYLTPGKLESGWTTGAAAYYVGYLQQRTFLLSYNQNGTITDAVDCSLDPLSETKCTLKSLTVEKGIYQTSNFRVQPTISIVRFPNITNLCPFGEVFNASKFASVYAWNRKRISNCVADYSVLYNSTSFSTFKCYGVSPTKLNDLCFTNVYADSFVVKGDEVRQIAPGQTGVIADYNYKLPDDFTGCVIAWNSVKQDALTGGNYLYRLFRKSKLKPFERDISTEIYQAGSTPCNGQVGLNCYYPLERYGFHPTTGVNYQPFRVVVLSFELLNGPATVCGPKLSTTLVKDKCVNFNFNGLTGTGVLTTSKKQFLPFQQFGRDISDTTDAVRDPQTLEILDITPCSFGGVSVITPGTNTSNQVAVLYQDVNCTEVPMAIHAEQLTPAWRVYSAGANVFQTRAGCLVGAEHVNNSYECDIPVGAGICASYHSMSSLRSVNQRSIIAYTMSLGAENSVAYSNNSIACPTNFTISVTTEILPVSMTKTSVDCTMYICGDSIECSNLLLQYGSFCTQLNRALTGIAVEQDKNTQEVFAQVKQIYKTPPIKDFGGFNFSQILPDPSKPSKRSFIEDLLFNKVTLADAGFIKQYGDCLGDIAARDLICAQKFNGLTVLPPLLTDEMIAQYTSALLAGTITSGWTFGAGAALQIPFAMQMAYRFNGIGVTQNVLYENQKLIANQFNSAIGKIQDSLSSTASALGKLQDVVNQNAQALNTLVKQLSSNFGAISSVLNDILSRLDKVEAEVQIDRLITGRLQSLQTYVTQQLIRAAEIRASANLAATKMSECVLGQSKRVDFCGKGYHLMSFPQSAPHGVVFLHVTYVPAQEKNFTTAPAICHEGKAHFPREGVFVSNGTHWFITQRNFCEPQIITTDNTFVSGSCDVVIGIVNNTVYDPLQPELDSGGGGSDIDPYKEFGSSYQLLNFLPLDFFPDLNALVDTATALYEEELTGREHCSPHHTAIRQALVCWDELTKLIAWMSSNITSEQVRTIIVNHVNDTWGLKVRQSLWFHLSCLTFGQHTVQEFLVSFGVWIRTPAPYRPPNAPILSTLPEHTVIC

SEQ ID NO: 11128 - protein, 1301 aa, Artificial Sequence
  SARS-CoV-2/Wuhan/WIV05/2019__EPI_ISL_402128 spike protein (1-1147)(P715C_P1069C) WhcAg construct
MFVFLVLLPLVSSQCVNLTTRTQLPPAYTNSFTRGVYYPDKVFRSSVLHSTQDLFLPFFSNVTWFHAIHVSGTNGTKRFDNPVLPFNDGVYFASTEKSNIIRGWIFGTTLDSKTQSLLIVNNATNVVIKVCEFQFCNDPFLGVYYHKNNKSWMESEFRVYSSANNCTFEYVSQPFLMDLEGKQGNFKNLREFVFKNIDGYFKIYSKHTPINLVRDLPQGFSALEPLVDLPIGINITRFQTLLALHRSYLTPGDSSSGWTAGAAAYYVGYLQPRTFLLKYNENGTITDAVDCALDPLSETKCTLKSFTVEKGIYQTSNFRVQPTESIVRFPNITNLCPFGEVFNATRFASVYAWNRKRISNCVADYSVLYNSASFSTFKCYGVSPTKLNDLCFTNVYADSFVIRGDEVRQIAPGQTGKIADYNYKLPDDFTGCVIAWNSNNLDSKVGGNYNYLYRLFRKSNLKPFERDISTEIYQAGSTPCNGVEGFNCYFPLQSYGFQPTNGVGYQPYRVVVLSFELLHAPATVCGPKKSTNLVKNKCVNFNFNGLTGTGVLTESNKKFLPFQQFGRDIADTTDAVRDPQTLEILDITPCSFGGVSVITPGTNTSNQVAVLYQDVNCTEVPVAIHADQLTPTWRVYSTGSNVFQTRAGCLIGAEHVNNSYECDIPIGAGICASYQTQTNSPRRARSVASQSIIAYTMSLGAENSVAYSNNSIAICTNFTISVTTEILPVSMTKTSVDCTMYICGDSTECSNLLLQYGSFCTQLNRALTGIAVEQDKNTQEVFAQVKQIYKTPPIKDFGGFNFSQILPDPSKPSKRSFIEDLLFNKVTLADAGFIKQYGDCLGDIAARDLICAQKFNGLTVLPPLLTDEMIAQYTSALLAGTITSGWTFGAGAALQIPFAMQMAYRFNGIGVTQNVLYENQKLIANQFNSAIGKIQDSLSSTASALGKLQDVVNQNAQALNTLVKQLSSNFGAISSVLNDILSRLDKVEAEVQIDRLITGRLQSLQTYVTQQLIRAAEIRASANLAATKMSECVLGQSKRVDFCGKGYHLMSFPQSAPHGVVFLHVTYVCAQEKNFTTAPAICHDGKAHFPREGVFVSNGTHWFVTQRNFYEPQIITTDNTFVSGNCDVVIGIVNNTVYDPLQPELDSGGGGSDIDPYKEFGSSYQLLNFLPLDFFPDLNALVDTATALYEEELTGREHCSPHHTAIRQALVCWDELTKLIAWMSSNITSEQVRTIIVNHVNDTWGLKVRQSLWFHLSCLTFGQHTVQEFLVSFGVWIRTPAPYRPPNAPILSTLPEHTVIC

SEQ ID NO: 11129 - protein, 1297 aa, Artificial Sequence
  SARS-CoV-2/bat/Yunnan/RaTG13/2013__EPI_ISL_402131 spike protein (1-1143)(P711C_P1065C) WhcAg construct
MFVFLVLLPLVSSQCVNLTTRTQLPPAYTNSSTRGVYYPDKVFRSSVLHLTQDLFLPFFSNVTWFHAIHVSGTNGIKRFDNPVLPFNDGVYFASTEKSNIIRGWIFGTTLDSKTQSLLIVNNATNVVIKVCEFQFCNDPFLGVYYHKNNKSWMESEFRVYSSANNCTFEYVSQPFLMDLEGKQGNFKNLREFVFKNIDGYFKIYSKHTPINLVRDLPPGFSALEPLVDLPIGINITRFQTLLALHRSYLTPGDSSSGWTAGAAAYYVGYLQPRTFLLKYNENGTITDAVDCALDPLSETKCTLKSFTVEKGIYQTSNFRVQPTDSIVRFPNITNLCPFGEVFNATTFASVYAWNRKRISNCVADYSVLYNSTSFSTFKCYGVSPTKLNDLCFTNVYADSFVITGDEVRQIAPGQTGKIADYNYKLPDDFTGCVIAWNSKHIDAKEGGNFNYLYRLFRKANLKPFERDISTEIYQAGSKPCNGQTGLNCYYPLYRYGFYPTDGVGHQPYRVVVLSFELLNAPATVCGPKKSTNLVKNKCVNFNFNGLTGTGVLTESNKKFLPFQQFGRDIADTTDAVRDPQTLEILDITPCSFGGVSVITPGTNASNQVAVLYQDVNCTEVPVAIHADQLTPTWRVYSTGSNVFQTRAGCLIGAEHVNNSYECDIPIGAGICASYQTQTNSRSVASQSIIAYTMSLGAENSVAYSNNSIAICTNFTISVTTEILPVSMTKTSVDCTMYICGDSTECSNLLLQYGSFCTQLNRALTGIAVEQDKNTQEVFAQVKQIYKTPPIKDFGGFNFSQILPDPSKPSKRSFIEDLLFNKVTLADAGFIKQYGDCLGDIAARDLICAQKFNGLTVLPPLLTDEMIAQYTSALLAGTITSGWTFGAGAALQIPFAMQMAYRFNGIGVTQNVLYENQKLIANQFNSAIGKIQDSLSSTASALGKLQDVVNQNAQALNTLVKQLSSNFGAISSVLNDILSRLDKVEAEVQIDRLITGRLQSLQTYVTQQLIRAAEIRASANLAATKMSECVLGQSKRVDFCGKGYHLMSFPQSAPHGVVFLHVTYVCAQEKNFTTAPAICHDGKAHFPREGVFVSNGTHWFVTQRNFYEPQIITTDNTFVSGSCDVVIGIVNNTVYDPLQPELDSGGGGSDIDPYKEFGSSYQLLNFLPLDFFPDLNALVDTATALYEEELTGREHCSPHHTAIRQALVCWDELTKLIAWMSSNITSEQVRTIIVNHVNDTWGLKVRQSLWFHLSCLTFGQHTVQEFLVSFGVWIRTPAPYRPPNAPILSTLPEHTVIC

SEQ ID NO: 11130 - protein, 1301 aa, Artificial Sequence
  SARS-CoV-2/Wuhan/HBCDC-HB-01/2019__EPI_ISL_402132 spike protein (1-1147)(P715C_P1069C) WhcAg construct
MFVFLVLLPLVSSQCVNLTTRTQLPPAYTNSITRGVYYPDKVFRSSVLHSTQDLFLPFFSNVTWFHAIHVSGTNGTKRFDNPVLPFNDGVYFASTEKSNIIRGWIFGTTLDSKTQSLLIVNNATNVVIKVCEFQFCNDPFLGVYYHKNNKSWMESEFRVYSSANNCTFEYVSQPFLMDLEGKQGNFKNLREFVFKNIDGYFKIYSKHTPINLVRDLPQGFSALEPLVDLPIGINITRFQTLLALHRSYLTPGDSSSGWTAGAAAYYVGYLQPRTFLLKYNENGTITDAVDCALDPLSETKCTLKSFTVEKGIYQTSNFRVQPTESIVRFPNITNLCPFGEVFNATRFASVYAWNRKRISNCVADYSVLYNSASFSTFKCYGVSPTKLNDLCFTNVYADSFVIRGDEVRQIAPGQTGKIADYNYKLPDDFTGCVIAWNSNNLDSKVGGNYNYLYRLFRKSNLKPFERDISTEIYQAGSTPCNGVEGFNCYFPLQSYGFQPTNGVGYQPYRVVVLSFELLHAPATVCGPKKSTNLVKNKCVNFNFNGLTGTGVLTESNKKFLPFQQFGRDIADTTDAVRDPQTLEILDITPCSFGGVSVITPGTNTSNQVAVLYQDVNCTEVPVAIHADQLTPTWRVYSTGSNVFQTRAGCLIGAEHVNNSYECDIPIGAGICASYQTQTNSPRRARSVASQSIIAYTMSLGAENSVAYSNNSIAICTNFTISVTTEILPVSMTKTSVDCTMYICGDSTECSNLLLQYGSFCTQLNRALTGIAVEQDKNTQEVFAQVKQIYKTPPIKDFGGFNFSQILPDPSKPSKRSFIEDLLFNKVTLADAGFIKQYGDCLGDIAARDLICAQKFNGLTVLPPLLTDEMIAQYTSALLAGTITSGWTFGAGAALQIPFAMQMAYRFNGIGVTQNVLYENQKLIANQFNSAIGKIQDSLSSTASALGKLQDVVNQNAQALNTLVKQLSSNFGAISSVLNDILSRLDKVEAEVQIDRLITGRLQSLQTYVTQQLIRAAEIRASANLAATKMSECVLGQSKRVDFCGKGYHLMSFPQSAPHGVVFLHVTYVCAQEKNFTTAPAICHDGKAHFPREGVFVSNGTHWFVTQRNFYEPQIITTDNTFVSGNCDVVIGIVNNTVYDPLQPELDSGGGGSDIDPYKEFGSSYQLLNFLPLDFFPDLNALVDTATALYEEELTGREHCSPHHTAIRQALVCWDELTKLIAWMSSNITSEQVRTIIVNHVNDTWGLKVRQSLWFHLSCLTFGQHTVQEFLVSFGVWIRTPAPYRPPNAPILSTLPEHTVIC

SEQ ID NO: 11131 - protein, 1301 aa, Artificial Sequence
  SARS-CoV-2/Guangdong/20SF028/2020__EPI_ISL_403936 spike protein (1-1147)(P715C_P1069C) WhcAg construct
MFVFLVLLPLVSSQCVNLTTRTQLPPAYTNSFTRGVYYPDKVFRSSVLYSTQDLFLPFFSNVTWFHAIHVSGTNGTKRFDNPVLPFNDGVYFASTEKSNIIRGWIFGTTLDSKTQSLLIVNNATNVVIKVCEFQFCNDPFLGVYYHKNNKSWMESEFRVYSSANNCTFEYVSQPFLMDLEGKQGNFKNLREFVFKNIDGYFKIYSKHTPINLVRDLPQGFSALEPLVDLPIGINITRFQTLLALHRSYLTPGDSSSGWTAGAAAYYVGYLQPRTFLLKYNENGTITDAVDCALDPLSETKCTLKSFTVEKGIYQTSNFRVQPTESIVRFPNITNLCPFGEVFNATRFASVYAWNRKRISNCVADYSVLYNSASFSTFKCYGVSPTKLNDLCFTNVYADSFVIRGDEVRQIAPGQTGKIADYNYKLPDDFTGCVIAWNSNNLDSKVGGNYNYLYRLFRKSNLKPFERDISTEIYQAGSTPCNGVEGFNCYFPLQSYGFQPTNGVGYQPYRVVVLSFELLHAPATVCGPKKSTNLVKNKCVNFNFNGLTGTGVLTESNKKFLPFQQFGRDIADTTDAVRDPQTLEILDITPCSFGGVSVITPGTNTSNQVAVLYQDVNCTEVPVAIHADQLTPTWRVYSTGSNVFQTRAGCLIGAEHVNNSYECDIPIGAGICASYQTQTNSPRRARSVASQSIIAYTMSLGAENSVAYSNNSIAICTNFTISVTTEILPVSMTKTSVDCTMYICGDSTECSNLLLQYGSFCTQLNRALTGIAVEQDKNTQEVFAQVKQIYKTPPIKDFGGFNFSQILPDPSKPSKRSFIEDLLFNKVTLADAGFIKQYGDCLGDIAARDLICAQKFNGLTVLPPLLTDEMIAQYTSALLAGTITSGWTFGAGAALQIPFAMQMAYRFNGIGVTQNVLYENQKLIANQFNSAIGKIQDSLSSTASALGKLQDVVNQNAQALNTLVKQLSSNFGAISSVLNDILSRLDKVEAEVQIDRLITGRLQSLQTYVTQQLIRAAEIRASANLAATKMSECVLGQSKRVDFCGKGYHLMSFPQSAPHGVVFLHVTYVCAQEKNFTTAPAICHDGKAHFPREGVFVSNGTHWFVTQRNFYEPQIITTDNTFVSGNCDVVIGIVNNTVYDPLQPELDSGGGGSDIDPYKEFGSSYQLLNFLPLDFFPDLNALVDTATALYEEELTGREHCSPHHTAIRQALVCWDELTKLIAWMSSNITSEQVRTIIVNHVNDTWGLKVRQSLWFHLSCLTFGQHTVQEFLVSFGVWIRTPAPYRPPNAPILSTLPEHTVIC

SEQ ID NO: 11132 - protein, 1301 aa, Artificial Sequence
  SARS-CoV-2/Shenzhen/SZTH-001/2020__EPI_ISL_406592 spike protein (1-1147)(P715C_P1069C) WhcAg construct
MFVFLVLLPLVSSQCVNLTTRTQLPPAYTNSFTRGVYYPDKVFRSSVLHSTQDLFLPFFSNVTWFHAIHVSGTNGTKRFDNPVLPFNDGVYFASTEKSNIIRGWIFGTTLDSKTQSLLIVNNATNVVIKVCEFQFCNDPFLGVYYHKNNKSWMESEFRVYSSANNCTFEYVSQPFLMDLEGKQGNFKNLREFVFKNIDGYFKIYSKHTPINLVRDLPQGFSALEPLVDLPIGINITRFQTLLALHRSYLTPGDSSSGWTAGAAAYYVGYLQPRTFLLKYNENGTITDAVDCALDPLSETKCTLKSFTVEKGIYQTSNFRVQPTESIVRFPNITNLCPFGEVFNATRFASVYAWNRKRISNCVADYSVLYNSASFSTFKCYGVSPTKLNDLCFTNVYADSFVIRGDEVRQIAPGQTGKIADYNYKLPDDFTGCVIAWNSNNLDSKVGGNYNYLYRLFRKSNLKPFERDISTEIYQAGSTPCNGVEGFNCYFPLQSYGFQPTNGVGYQPYRVVVLSFELLHAPATVCGPKKSTNLVKNKCVNFNFNGLTGTGVLTESNKKFLPFQQFGRDIADTTDAVRDPQTLEILDITPCSFGGVSVITPGTNTSNQVAVLYQDVNCTEVPVAIHADQLTPTWRVYSTGSNVFQTRAGCLIGAEHVNNSYECDIPIGAGICASYQTQTNSPRRARSVASQSIIAYTMSLGAENSVAYSNNSIAICTNFTISVTTEILPVSMTKTSVDCTMYICGDSTECSNLLLQYGSFCTQLNRALTGIAVEQDKNTQEVFAQVKQIYKTPPIKDFGGFNFSQILPDPSKPSKRSFIEDLLFNKVTLADAGFIKQYGDCLGDIAARDLICAQKFNGLTVLPPLLTDEMIAQYTSALLAGTITSGWTFGAGAALQIPFAMQMAYRFNGIGVTQNVLYENQKLIANQFNSAIGKIQDSLSSTASALGKLQDVVNQNAQALNTLVKQLSSNFGAISSVLNDILSRLDKVEAEVQIDRLITGRLQSLQTYVTQQLIRAAEIRASANLAATKMSECVLGQSKRVDFCGKGYHLMSFPQSAPHGVVFLHVTYVCAQEKNFTTAPAICHDGKAHFPREGVFVSNGTHWFVTQRNFYEPQIITTDNTFVSGNCDVLIGIVNNTVYDPLQPELDSGGGGSDIDPYKEFGSSYQLLNFLPLDFFPDLNALVDTATALYEEELTGREHCSPHHTAIRQALVCWDELTKLIAWMSSNITSEQVRTIIVNHVNDTWGLKVRQSLWFHLSCLTFGQHTVQEFLVSFGVWIRTPAPYRPPNAPILSTLPEHTVIC

SEQ ID NO: 11133 - protein, 1301 aa, Artificial Sequence
  SARS-CoV-2/Shenzhen/SZTH-004/2020__EPI_ISL_406595 spike protein (1-1147)(P715C_P1069C) WhcAg construct
MFVFLVLLPLVSSQCVNLTTRTQLPPAYTNSFTRGVYYPDKVFRSSVLHSTQDLFLPFFSNVTWFHAIHVSGTNGTKRFDNPVLPFNDGVYFASTEKSNIIRGWIFGTTLDSKTQSLLIVNNATNVVIKVCEFQFCNDPFLGVYYHKNNKSWMESEFRVYSSANNCTFEYVSQPFLMDLEGKQGNFKNLREFVFKNIDGYFKIYSKHTPINLVRDLPQGFSALEPLVDLPIGINITRFQTLLALHRSYLTPGDSSSGWTAGAAAYYVGYLQPRTFLLKYNENGTITDAVDCALDPLSETKCTLKSFTVEKGIYQTSNFRVQPTESIVRFPNITNLCPFGEVFNATRFASVYAWDRKRISNCVAYYSVLYNSASFSTFKCYGVSPTKLNDLCFTNVYADSFVIRGDEVRQIAPGQTGKIADYNYKLPDDFTGCVIAWNSNNLDSKVGGNYNYLYRLFRKSNLKPFERDISTEIYQAGSTPCNGVEGFNCYFPLQSYGFQPTNGVGYQPYRVVVLSFELLHAPATVCGPKKSTNLVKNKCVNFNFNGLTGTGVLTESNKKFLPFQQFGRDIADTTDAVRDPQTLEILDITPCSFGGVSVITPGTNTSNQVAVLYQDVNCTEVPVAIHADQLTPTWRVYSTGSNVFQTRAGCLIGAEHVNNSYECDIPIGAGICASYQTQTNSPRRARSVASQSIIAYTMSLGAENSVAYSNNSIAICTNFTISVTTEILPVSMTKTSVDCTMYICGDSTECSNLLLQYGSFCTQLNRALTGIAVEQDKNTQEVFAQVKQIYKTPPIKDFGGFNFSQILPDPSKPSKRSFIEDLLFNKVTLADAGFIKQYGDCLGDIAARDLICAQKFNGLTVLPPLLTDEMIAQYTSALLAGTITSGWTFGAGAALQIPFAMQMAYRFNGIGVTQNVLYENQKLIANQFNSAIGKIQDSLSSTASALGKLQDVVNQNAQALNTLVKQLSSNFGAISSVLNDILSRLDKVEAEVQIDRLITGRLQSLQTYVTQQLIRAAEIRASANLAATKMSECVLGQSKRVDFCGKGYHLMSFPQSAPHGVVFLHVTYVCAQEKNFTTAPAICHDGKAHFPREGVFVSNGTHWFVTQRNFYEPQIITTDNTFVSGNCDVVIGIVNNTVYDPLQPELDSGGGGSDIDPYKEFGSSYQLLNFLPLDFFPDLNALVDTATALYEEELTGREHCSPHHTAIRQALVCWDELTKLIAWMSSNITSEQVRTIIVNHVNDTWGLKVRQSLWFHLSCLTFGQHTVQEFLVSFGVWIRTPAPYRPPNAPILSTLPEHTVIC

SEQ ID NO: 11134 - protein, 1301 aa, Artificial Sequence
  SARS-CoV-2/France/IDF0372/2020__EPI_ISL_406596 spike protein (1-1147)(P715C_P1069C) WhcAg construct
MFVFLVLLPLVSSQCVNLTTRTQLPPAYTNSFTRGVYYPDKVFRSSVLHSTQDLFLPFFSNVTWFHAIHVSGTNGTKRFDNPVLPFNDGVYFASTEKSNIIRGWIFGTTLDSKTQSLLIVNNATNVVIKVCEFQFCNDPFLGVYYHKNNKSWMESEFRVYSSANNCTFEYVSQPFLMDLEGKQGNFKNLREFVFKNIDGYFKIYSKHTPINLVRDLPQGFSALEPLVDLPIGINITRFQTLLALHRSYLTPGDSSSGWTAGAAAYYVGYLQPRTFLLKYNENGTITDAVDCALDPLSETKCTLKSFTVEKGIYQTSNFRVQPTESIVRFPNITNLCPFGEVFNATRFASVYAWNRKRISNCVADYSFLYNSASFSTFKCYGVSPTKLNDLCFTNVYADSFVIRGDEVRQIAPGQTGKIADYNYKLPDDFTGCVIAWNSNNLDSKVGGNYNYLYRLFRKSNLKPFERDISTEIYQAGSTPCNGVEGFNCYFPLQSYGFQPTNGVGYQPYRVVVLSFELLHAPATVCGPKKSTNLVKNKCVNFNFNGLTGTGVLTESNKKFLPFQQFGRDIADTTDAVRDPQTLEILDITPCSFGGVSVITPGTNTSNQVAVLYQDVNCTEVPVAIHADQLTPTWRVYSTGSNVFQTRAGCLIGAEHVNNSYECDIPIGAGICASYQTQTNSPRRARSVASQSIIAYTMSLGAENSVAYSNNSIAICTNFTISVTTEILPVSMTKTSVDCTMYICGDSTECSNLLLQYGSFCTQLNRALTGIAVEQDKNTQEVFAQVKQIYKTPPIKDFGGFNFSQILPDPSKPSKRSFIEDLLFNKVTLADAGFIKQYGDCLGDIAARDLICAQKFNGLTVLPPLLTDEMIAQYTSALLAGTITSGWTFGAGAALQIPFAMQMAYRFNGIGVTQNVLYENQKLIANQFNSAIGKIQDSLSSTASALGKLQDVVNQNAQALNTLVKQLSSNFGAISSVLNDILSRLDKVEAEVQIDRLITGRLQSLQTYVTQQLIRAAEIRASANLAATKMSECVLGQSKRVDFCGKGYHLMSFPQSAPHGVVFLHVTYVCAQEKNFTTAPAICHDGKAHFPREGVFVSNGTHWFVTQRNFYEPQIITTDNTFVSGNCDVVIGIVNNTVYDPLQPELDSGGGGSDIDPYKEFGSSYQLLNFLPLDFFPDLNALVDTATALYEEELTGREHCSPHHTAIRQALVCWDELTKLIAWMSSNITSEQVRTIIVNHVNDTWGLKVRQSLWFHLSCLTFGQHTVQEFLVSFGVWIRTPAPYRPPNAPILSTLPEHTVIC

SEQ ID NO: 11135 - protein, 1301 aa, Artificial Sequence
  SARS-CoV-2/Australia/VIC01/2020__EPI_ISL_406844 spike protein (1-1147)(P715C_P1069C) WhcAg construct
MFVFLVLLPLVSSQCVNLTTRTQLPPAYTNSFTRGVYYPDKVFRSSVLHSTQDLFLPFFSNVTWFHAIHVSGTNGTKRFDNPVLPFNDGVYFASTEKSNIIRGWIFGTTLDSKTQSLLIVNNATNVVIKVCEFQFCNDPFLGVYYHKNNKSWMESEFRVYSSANNCTFEYVSQPFLMDLEGKQGNFKNLREFVFKNIDGYFKIYSKHTPINLVRDLPQGFSALEPLVDLPIGINITRFQTLLALHRRYLTPGDSSSGWTAGAAAYYVGYLQPRTFLLKYNENGTITDAVDCALDPLSETKCTLKSFTVEKGIYQTSNFRVQPTESIVRFPNITNLCPFGEVFNATRFASVYAWNRKRISNCVADYSVLYNSASFSTFKCYGVSPTKLNDLCFTNVYADSFVIRGDEVRQIAPGQTGKIADYNYKLPDDFTGCVIAWNSNNLDSKVGGNYNYLYRLFRKSNLKPFERDISTEIYQAGSTPCNGVEGFNCYFPLQSYGFQPTNGVGYQPYRVVVLSFELLHAPATVCGPKKSTNLVKNKCVNFNFNGLTGTGVLTESNKKFLPFQQFGRDIADTTDAVRDPQTLEILDITPCSFGGVSVITPGTNTSNQVAVLYQDVNCTEVPVAIHADQLTPTWRVYSTGSNVFQTRAGCLIGAEHVNNSYECDIPIGAGICASYQTQTNSPRRARSVASQSIIAYTMSLGAENSVAYSNNSIAICTNFTISVTTEILPVSMTKTSVDCTMYICGDSTECSNLLLQYGSFCTQLNRALTGIAVEQDKNTQEVFAQVKQIYKTPPIKDFGGFNFSQILPDPSKPSKRSFIEDLLFNKVTLADAGFIKQYGDCLGDIAARDLICAQKFNGLTVLPPLLTDEMIAQYTSALLAGTITSGWTFGAGAALQIPFAMQMAYRFNGIGVTQNVLYENQKLIANQFNSAIGKIQDSLSSTASALGKLQDVVNQNAQALNTLVKQLSSNFGAISSVLNDILSRLDKVEAEVQIDRLITGRLQSLQTYVTQQLIRAAEIRASANLAATKMSECVLGQSKRVDFCGKGYHLMSFPQSAPHGVVFLHVTYVCAQEKNFTTAPAICHDGKAHFPREGVFVSNGTHWFVTQRNFYEPQIITTDNTFVSGNCDVVIGIVNNTVYDPLQPELDSGGGGSDIDPYKEFGSSYQLLNFLPLDFFPDLNALVDTATALYEEELTGREHCSPHHTAIRQALVCWDELTKLIAWMSSNITSEQVRTIIVNHVNDTWGLKVRQSLWFHLSCLTFGQHTVQEFLVSFGVWIRTPAPYRPPNAPILSTLPEHTVIC

SEQ ID NO: 11136 - protein, 1301 aa, Artificial Sequence
  SARS-CoV-2/Germany/BavPat1/2020__EPI_ISL_406862 spike protein (1-1147)(P715C_P1069C) WhcAg construct
MFVFLVLLPLVSSQCVNLTTRTQLPPAYTNSFTRGVYYPDKVFRSSVLHSTQDLFLPFFSNVTWFHAIHVSGTNGTKRFDNPVLPFNDGVYFASTEKSNIIRGWIFGTTLDSKTQSLLIVNNATNVVIKVCEFQFCNDPFLGVYYHKNNKSWMESEFRVYSSANNCTFEYVSQPFLMDLEGKQGNFKNLREFVFKNIDGYFKIYSKHTPINLVRDLPQGFSALEPLVDLPIGINITRFQTLLALHRSYLTPGDSSSGWTAGAAAYYVGYLQPRTFLLKYNENGTITDAVDCALDPLSETKCTLKSFTVEKGIYQTSNFRVQPTESIVRFPNITNLCPFGEVFNATRFASVYAWNRKRISNCVADYSVLYNSASFSTFKCYGVSPTKLNDLCFTNVYADSFVIRGDEVRQIAPGQTGKIADYNYKLPDDFTGCVIAWNSNNLDSKVGGNYNYLYRLFRKSNLKPFERDISTEIYQAGSTPCNGVEGFNCYFPLQSYGFQPTNGVGYQPYRVVVLSFELLHAPATVCGPKKSTNLVKNKCVNFNFNGLTGTGVLTESNKKFLPFQQFGRDIADTTDAVRDPQTLEILDITPCSFGGVSVITPGTNTSNQVAVLYQGVNCTEVPVAIHADQLTPTWRVYSTGSNVFQTRAGCLIGAEHVNNSYECDIPIGAGICASYQTQTNSPRRARSVASQSIIAYTMSLGAENSVAYSNNSIAICTNFTISVTTEILPVSMTKTSVDCTMYICGDSTECSNLLLQYGSFCTQLNRALTGIAVEQDKNTQEVFAQVKQIYKTPPIKDFGGFNFSQILPDPSKPSKRSFIEDLLFNKVTLADAGFIKQYGDCLGDIAARDLICAQKFNGLTVLPPLLTDEMIAQYTSALLAGTITSGWTFGAGAALQIPFAMQMAYRFNGIGVTQNVLYENQKLIANQFNSAIGKIQDSLSSTASALGKLQDVVNQNAQALNTLVKQLSSNFGAISSVLNDILSRLDKVEAEVQIDRLITGRLQSLQTYVTQQLIRAAEIRASANLAATKMSECVLGQSKRVDFCGKGYHLMSFPQSAPHGVVFLHVTYVCAQEKNFTTAPAICHDGKAHFPREGVFVSNGTHWFVTQRNFYEPQIITTDNTFVSGNCDVVIGIVNNTVYDPLQPELDSGGGGSDIDPYKEFGSSYQLLNFLPLDFFPDLNALVDTATALYEEELTGREHCSPHHTAIRQALVCWDELTKLIAWMSSNITSEQVRTIIVNHVNDTWGLKVRQSLWFHLSCLTFGQHTVQEFLVSFGVWIRTPAPYRPPNAPILSTLPEHTVIC

SEQ ID NO: 11137 - protein, 1301 aa, Artificial Sequence
  SARS-CoV-2/Wuhan/HBCDC-HB-02/2020__EPI_ISL_412978 spike protein (1-1147)(P715C_P1069C) WhcAg construct
MFVFLVLLPLVSSQCVNLTTRTQLPPAYTNSFTRGVYYPDKVFRSSVLHSTQDLFLPFFSNVTWFHAIHVSGTNGTKRFDNPVLPFNDGVYFASTEKSNIIRGWIFGTTLDSKTQSLLIVNNATNVVIKVCEFQFCNDPFLGVYYHKNNKSWMESEFRVYSSANNCTFEYVSQPFLMDLEGKQGNFKNLREFVFKNIDGYFKIYSKHTPINLVRDLPQGFSALEPLVDLPIGINITRFQTLLALHRSYLTPGDSSSGWTAGAAAYYVGYLQPRTFLLKYNENGTITDAVDCALDPLSETKCTLKSFTVEKGIYQTSNFRVQPTESIVRFPNITNLCPFGEVFNATRFASVYAWNRKRISNCVADYSVLYNSASFSTFKCYGVSPTKLNDLCFTNVYADSFVIRGDEVRQIAPGQTGKIADYNYKLPDDFTGCVIAWNSNNLDSKVGGNYNYLYRLFRKSNLKPFERDISTEIYQAGSTPCNGVEGFNCYFPLQSYGFQPTNGVGYQPYRVVVLSFELLHAPATVCGPKKSTNLVKNKCVNFNFNGLTGTGVLTESNKKFLPFQQFGRDIADTTDAVRDPQTLEILDITPCSFGGVSVITPGTNTSNQVAVLYQDVNCTEVPVAIHADQLTPTWRVYSTGSNVFQTRAGCLIGAEHVNNSYECDIPIGAGICASYQTQTNSPRRARSVASQSIIAYTMSLGAENSVAYSNNSIAICTNFTISVTTEILPVSMTKTSVDCTMYICGDSTECSNFLLQYGSFCTQLNRALTGIAVEQDKNTQEVFAQVKQIYKTPPIKDFGGFNFSQILPDPSKPSKRSFIEDLLFNKVTLADAGFIKQYGDCLGDIAARDLICAQKFNGLTVLPPLLTDEMIAQYTSALLAGTITSGWTFGAGAALQIPFAMQMAYRFNGIGVTQNVLYENQKLIANQFNSAIGKIQDSLSSTASALGKLQDVVNQNAQALNTLVKQLSSNFGAISSVLNDILSRLDKVEAEVQIDRLITGRLQSLQTYVTQQLIRAAEIRASANLAATKMSECVLGQSKRVDFCGKGYHLMSFPQSAPHGVVFLHVTYVCAQEKNFTTAPAICHDGKAHFPREGVFVSNGTHWFVTQRNFYEPQIITTDNTFVSGNCDVVIGIVNNTVYDPLQPELDSGGGGSDIDPYKEFGSSYQLLNFLPLDFFPDLNALVDTATALYEEELTGREHCSPHHTAIRQALVCWDELTKLIAWMSSNITSEQVRTIIVNHVNDTWGLKVRQSLWFHLSCLTFGQHTVQEFLVSFGVWIRTPAPYRPPNAPILSTLPEHTVIC

SEQ ID NO: 11138 - protein, 1301 aa, Artificial Sequence
  SARS-CoV-2/Australia/QLD02/2020__EPI_ISL_407896 spike protein (1-1147)(P715C_P1069C) WhcAg construct
MFVFLVLLPLVSSQCVNLTTRTQLPPAYTNSFTRGVYYPDKVFRSSVLHSTQDLFLPFFSNVTWFHAIHVSGTNGTKRFDNPVLPFNDGVYFASTEKSNIIRGWIFGTTLDSKTQSLLIVNNATNVVIKVCEFQFCNDPFLGVYYHKNNKSWMESEFRVYSSANNCTFEYVSQPFLMDLEGKQGNFKNLREFVFKNIDGYFKIYSKHTPINLVRDLPQGFSALEPLVDLPIGINITRFQTLLALHRSYLTPGDSSSGWTAGAAAYYVGYLQPRTFLLKYNENGTITDAVDCALDPLSETKCTLKSFTVEKGIYQTSNFRVQPTESIVRFPNITNLCPFGEVFNATRFASVYAWNRKRISNCVADYSVLYNSASFSTFKCYGVSPTKLNDLCFTNVYADSFVIRGDEVRQIAPGQTGKIADYNYKLPDDFTGCVIAWNSNNLDSKVGGNYNYLYRLFRKSNLKPFERDISTEIYQAGSTPCNGVEGFNCYFPLQSYGFQPTNGVGYQPYRVVVLSFELLHAPATVCGPKKSTNLVKNKCVNFNFNGLTGTGVLTESNKKFLPFQQFGRDIADTTDAVRDPQTLEILDITPCSFGGVSVITPGTNTSNQVAVLYQDVNCTEVPVAIHADQLTPTWRVYSTGSNVFQTRAGCLIGAEHVNNSYECDIPIGAGICASYQTQTNSPRRARSVASQSIIAYTMSLGAENSVAYSNNSIAICTNFTISVTTEILPVSMTKTSVDCTMYICGDSTECSNLLLQYGSFCTQLNRALTGIAVEQDKNTQEVFAQVKQIYKTPPIKDFGGFNFSQILPDPSKPSKRSFIEDLLFNKVTLADAGFIKQYGDCLGDIAARDLICAQKFNGLTVLPPLLTDEMIAQYTSALLAGTITSGWTFGAGAALQIPFAMQMAYRFNGIGVTQNVLYENQKLIANQFNSAIGKIQDSLSSTASALGKLQDVVNQNAQALNTLVKQLSSNFGAISSVLNDILSRLDKVEAEVQIDRLITGRLQSLQTYVTQQLIRAAEIRASANLAATKMSECVLGQSKRVDFCGKGYHLMSFPQSAPHGVVFLHVTYVCAQEKNFTTAPAICHDGKAHFPREGVFVSNGTHWFVTQRNFYEPQIITTDNTFVSGNCDVVIGIVNNTVYDPLQLELDSGGGGSDIDPYKEFGSSYQLLNFLPLDFFPDLNALVDTATALYEEELTGREHCSPHHTAIRQALVCWDELTKLIAWMSSNITSEQVRTIIVNHVNDTWGLKVRQSLWFHLSCLTFGQHTVQEFLVSFGVWIRTPAPYRPPNAPILSTLPEHTVIC

SEQ ID NO: 11139 - protein, 1301 aa, Artificial Sequence
  SARS-CoV-2/India/1-31/2020__EPI_ISL_413523 spike protein (1-1147)(P715C_P1069C) WhcAg construct
MFVFLVLLPLVSSQCVNLTTRTQLPPAYTNSFTRGVYYPDKVFRSSVLHSTQDLFLPFFSNVTWFHAIHVSGTNGTKRFDNPVLPFNDGVYFASTEKSNIIRGWIFGTTLDSKTQSLLIVNNATNVVIKVCEFQFCNDPFLGVYYHKNNKSWMESEFRVYSSANNCTFEYVSQPFLMDLEGKQGNFKNLREFVFKNIDGYFKIYSKHTPINLVRDLPQGFSALEPLVDLPIGINITRFQTLLALHRSYLTPGDSSSGWTAGAAAYYVGYLQPRTFLLKYNENGTITDAVDCALDPLSETKCTLKSFTVEKGIYQTSNFRVQPTESIVRFPNITNLCPFGEVFNATRFASVYAWNRKRISNCVADYSVLYNSASFSTFKCYGVSPTKLNDLCFTNVYADSFVIRGDEVRQIAPGQTGKIADYNYKLPDDFTGCVIAWNSNNLDSKVGGNYNYLYRLFRKSNLKPFERDISTEIYQAGSTPCNGVEGFNCYFPLQSYGFQPTNGVGYQPYRVVVLSFELLHAPATVCGPKKSTNLVKNKCVNFNFNGLTGTGVLTESNKKFLPFQQFGRDIADTTDAVRDPQTLEILDITPCSFGGVSVITPGTNTSNQVAVLYQDVNCTEVPVAIHADQLTPTWRVYSTGSNVFQTRAGCLIGAEHVNNSYECDIPIGAGICASYQTQTNSPRRARSVASQSIIAYTMSLGAENSVAYSNNSIAICTNFTISVTTEILPVSMTKTSVDCTMYICGDSTECSNLLLQYGSFCTQLNRALTGIAVEQDKNTQEVFAQVKQIYKTPPIKDFGGFNFSQILPDPSKPSKRSFIEDLLFNKVTLADAGFIKQYGDCLGDIAARDLICAQKFNGLTVLPPLLTDEMIAQYTSALLAGTITSGWTFGAGAALQIPFAMQMAYRFNGIGVTQNVLYENQKLIANQFNSVIGKIQDSLSSTASALGKLQDVVNQNAQALNTLVKQLSSNFGAISSVLNDILSRLDKVEAEVQIDRLITGRLQSLQTYVTQQLIRAAEIRASANLAATKMSECVLGQSKRVDFCGKGYHLMSFPQSAPHGVVFLHVTYVCAQEKNFTTAPAICHDGKAHFPREGVFVSNGTHWFVTQRNFYEPQIITTDNTFVSGNCDVVIGIVNNTVYDPLQPELDSGGGGSDIDPYKEFGSSYQLLNFLPLDFFPDLNALVDTATALYEEELTGREHCSPHHTAIRQALVCWDELTKLIAWMSSNITSEQVRTIIVNHVNDTWGLKVRQSLWFHLSCLTFGQHTVQEFLVSFGVWIRTPAPYRPPNAPILSTLPEHTVIC

SEQ ID NO: 11140 - protein, 1301 aa, Artificial Sequence
  SARS-CoV-2/Guangdong/GD2020087-P0008/2020__EPI_ISL_413863 spike protein (1-1147)(P715C_P1069C) WhcAg construct
MFVFLVLLPLVSSQCVNLTTRTQLPPAYTNSFTRGVYYPDKVFRSSVLHSTQDLFLPFFSNVTWFHAIHVSGTNGTKRFDNPVLPFNDGVYFASTEKSNIIRGWIFGTTLDSKTQSLLIVNNATNVVIKVCEFQFCNDPFLGVYYHKNNKSWMESEFRVYSSANNCTFEYVSQPFLMDLEGKQGNFKNLREFVFKNIDGYFKIYSKHTPINLVRDLPQGFSALEPLVDLPIGINITRFQTLLALHRSYLTPGDSSSGWTAGAAAYYVGYLQPRTFLLKYNENGTITDAVDCALDPLSETKCTLKSFTVEKGIYQTSNFRVQPTESIVRFPNITNLCPFGEVFNATRFASVYAWNRKRISNCVADYSVLYNSASFSTFKCYGVSPTKLNDLCFTNVYADSFVIRGDEVREIAPGQTGKIADYNYKLPDDFTGCVIAWNSNNLDSKVGGNYNYLYRLFRKSNLKPFERDISTEIYQAGSTPCNGVEGFNCYFPLQSYGFQPTNGVGYQPYRVVVLSFELLHAPATVCGPKKSTNLVKNKCVNFNFNGLTGTGVLTESNKKFLPFQQFGRDIADTTDAVRDPQTLEILDITPCSFGGVSVITPGTNTSNQVAVLYQDVNCTEVPVAIHADQLTPTWRVYSTGSNVFQTRAGCLIGAEHVNNSYECDIPIGAGICASYQTQTNSPRRARSVASQSIIAYTMSLGAENSVAYSNNSIAICTNFTISVTTEILPVSMTKTSVDCTMYICGDSTECSNLLLQYGSFCTQLNRALTGIAVEQDKNTQEVFAQVKQIYKTPPIKDFGGFNFSQILPDPSKPSKRSFIEDLLFNKVTLADAGFIKQYGDCLGDIAARDLICAQKFNGLTVLPPLLTDEMIAQYTSALLAGTITSGWTFGAGAALQIPFAMQMAYRFNGIGVTQNVLYENQKLIANQFNSAIGKIQDSLSSTASALGKLQDVVNQNAQALNTLVKQLSSNFGAISSVLNDILSRLDKVEAEVQIDRLITGRLQSLQTYVTQQLIRAAEIRASANLAATKMSECVLGQSKRVDFCGKGYHLMSFPQSAPHGVVFLHVTYVCAQEKNFTTAPAICHDGKAHFPREGVFVSNGTHWFVTQRNFYEPQIITTDNTFVSGNCDVVIGIVNNTVYDPLQPELDSGGGGSDIDPYKEFGSSYQLLNFLPLDFFPDLNALVDTATALYEEELTGREHCSPHHTAIRQALVCWDELTKLIAWMSSNITSEQVRTIIVNHVNDTWGLKVRQSLWFHLSCLTFGQHTVQEFLVSFGVWIRTPAPYRPPNAPILSTLPEHTVIC

SEQ ID NO: 11141 - protein, 1301 aa, Artificial Sequence
  SARS-CoV-2/Sweden/01/2020__EPI_ISL_411951 spike protein (1-1147)(P715C_P1069C) WhcAg construct
MFVFLVLLPLVSSQCVNLTTRTQLPPAYTNSFTRGVYYPDKVFRSSVLHSTQDLFLPFFSNVTWFHAIHVSGTNGTKRFDNPVLPFNDGVYFASTEKSNIIRGWIFGTTLDSKTQSLLIVNNATNVVIKVCEFQFCNDPFLGVYYHKNNKSWMESEFRVYSSANNCTFEYVSQPFLMDLEGKQGNFKNLREFVFKNIDGYFKIYSKHTPINLVRDLPQGFSALEPLVDLPIGINITRFQTLLALHRSYLTPGDSSSGWTAGAAAYYVGYLQPRTFLLKYNENGTITDAVDCALDPLSETKCTLKSFTVEKGIYQTSNFRVQPTESIVRFPNITNLCPFGEVFNATRFASVYAWNRKRISNCVADYSVLYNSASFSTFKCYGVSPTKLNDLCFTNVYADSFVIRGDEVRQIAPGQTGKIADYNYKLPDDFTGCVIAWNSNNLDSKVGGNYNYLYRLFRKSNLKPFERDISTEIYQAGSTPCNGVEGFNCYFPLQSYGFQPTNGVGYQPYRVVVLSFELLHAPATVCGPKKSTNLVKNKCVNFNFNGLTGTGVLTESNKKFLPFQQFGRDIADTTDAVRDPQTLEILDITPCSFGGVSVITPGTNTSNQVAVLYQDVNCTEVPVAIHADQLTPTWRVYSTGSNVFQTRAGCLIGAEHVNNSYECDIPIGAGICASYQTQTNSPRRARSVASQSIIAYTMSLGAENSVAYSNNSIAICTNFTISVTTEILPVSMTKTSVDCTMYICGDSTECSNLLLQYGSFCTQLNRALTGIAVEQDKNTQEVFAQVKQIYKTPPIKDCGGFNFSQILPDPSKPSKRSFIEDLLFNKVTLADAGFIKQYGDCLGDIAARDLICAQKFNGLTVLPPLLTDEMIAQYTSALLAGTITSGWTFGAGAALQIPFAMQMAYRFNGIGVTQNVLYENQKLIANQFNSAIGKIQDSLSSTASALGKLQDVVNQNAQALNTLVKQLSSNFGAISSVLNDILSRLDKVEAEVQIDRLITGRLQSLQTYVTQQLIRAAEIRASANLAATKMSECVLGQSKRVDFCGKGYHLMSFPQSAPHGVVFLHVTYVCAQEKNFTTAPAICHDGKAHFPREGVFVSNGTHWFVTQRNFYEPQIITTDNTFVSGNCDVVIGIVNNTVYDPLQPELDSGGGGSDIDPYKEFGSSYQLLNFLPLDFFPDLNALVDTATALYEEELTGREHCSPHHTAIRQALVCWDELTKLIAWMSSNITSEQVRTIIVNHVNDTWGLKVRQSLWFHLSCLTFGQHTVQEFLVSFGVWIRTPAPYRPPNAPILSTLPEHTVIC

SEQ ID NO: 11142 - protein, 1301 aa, Artificial Sequence
  SARS-CoV-2/Tianmen/HBCDC-HB-07/2020__EPI_ISL_412983 spike protein (1-1147)(P715C_P1069C) WhcAg construct
MFVFLVLLPLVSSQCVNLTTRTQLPPAYTNSFTRGVYYPDKVFRSSVLHSTQDLFLPFFSNVTWFHAIHVSGTNGTKRFDNPVLPFNDGVYFASTEKSNIIRGWIFGTTLDSKTQSLLIVNNATNVVIKVCEFQFCNDPFLGVYYHKNNKSWMESEFRVYSSANNCTFEYVSQPFLMDLEGKQGNFKNLREFVFKNIDGYFKIYSKHTPINLVRDLPQGFSALEPLVDLPIGINITRFQTLLALHRSYLTPGDSSSGWTAGAAAYYVGYLQPRTFLLKYNENGTITDAVDCALDPLSETKCTLKSFTVEKGIYQTSNFRVQPTESIVRFPNITNLCPFGEVFNATRFASVYAWNRKRISNCVADYSVLYNSASFSTFKCYGVSPTKLNDLCFTNVYADSFVIRGDEVRQIAPGQTGKIADYNYKLPDDFTGCVIAWNSNNLDSKVGGNYNYLYRLFRKSNLKPFERDISTEIYQAGSTPCNGVEGFNCYFPLQSYGFQPTNGVGYQPYRVVVLSFELLHAPATVCGPKKSTNLVKNKCVNFNFNGLTGTGVLTESNKKFLPFQQFGRDIADTTDAVRDPQTLEILDITPCSFGGVSVITPGTNTSNQVAVLYQDLNCTEVPVAIHADQLTPTWRVYSTGSNVFQTRAGCLIGAEHVNNSYECDIPIGAGICASYQTQTNSPRRARSVASQSIIAYTMSLGAENSVAYSNNSIAICTNFTISVTTEILPVSMTKTSVDCTMYICGDSTECSNLLLQYGSFCTQLNRALTGIAVEQDKNTQEVFAQVKQIYKTPPIKDFGGFNFSQILPDPSKPSKRSFIEDLLFNKVTLADAGFIKQYGDCLGDIAARDLICAQKFNGLTVLPPLLTDEMIAQYTSALLAGTITSGWTFGAGAALQIPFAMQMAYRFNGIGVTQNVLYENQKLIANQFNSAIGKIQDSLSSTASALGKLQDVVNQNAQALNTLVKQLSSNFGAISSVLNDILSRLDKVEAEVQIDRLITGRLQSLQTYVTQQLIRAAEIRASANLAATKMSECVLGQSKRVDFCGKGYHLMSFPQSAPHGVVFLHVTYVCAQEKNFTTAPAICHDGKAHFPREGVFVSNGTHWFVTQRNFYEPQIITTDNTFVSGNCDVVIGIVNNTVYDPLQPELDSGGGGSDIDPYKEFGSSYQLLNFLPLDFFPDLNALVDTATALYEEELTGREHCSPHHTAIRQALVCWDELTKLIAWMSSNITSEQVRTIIVNHVNDTWGLKVRQSLWFHLSCLTFGQHTVQEFLVSFGVWIRTPAPYRPPNAPILSTLPEHTVIC

SEQ ID NO: 11143 - protein, 1301 aa, Artificial Sequence
  SARS-CoV-2/Hong Kong/case42_VM20002493/2020__EPI_ISL_414527 spike protein (1-1147)(P715C_P1069C) WhcAg construct
MFVFLVLLPLVSSQCVNLTTRTQLPPAYTNSFTRGVYYPDKVFRSSVLHSTQDLFLPFFSNVTWFHAIHVSGTNGTKRFDNPVLPFNDGVYFASTEKSNIIRGWIFGTTLDSKTQSLLIVNNATNVVIKVCEFQFCNDPFLGVYYHKNNKSWMESEFRVYSSANNCTFEYVSQPFLMDLEGKQGNFKNLREFVFKNIDGYFKIYSKHTPINLVRDLPQGFSALEPLVDLPIGINITRFQTLLALHRSYLTPGDSSSGWTAGAAAYYVGYLQPRTFLLKYNENGTITDAVDCALDPLSETKCTLKSFTVEKGIYQTSNFRVQPTESIVRFPNITNLCPFGEVFNATRFASVYAWNRKRISNCVADYSVLYNSASFSTFKCYGVSPTKLNDLCFTNVYADSFVIRGDEVRQIAPGQTGKIADYNYKLPDDFTGCVIAWNSNNLDSKVGGNYNYLYRLFRKSNLKPFERDISTEIYQAGSTPCNGVEGFNCYFPLQSYGFQPTNGVGYQPYRVVVLSFELLHAPATVCGPKKSTNLVKNKCVNFNFNGLTGTGVLTESNKKFLPFQQFGRDIADTTDAVRDPQTLEILDITPCSFGGVSVITPGTNTSNQVAVLYQDVNCTEVPVAIHADQLTPTWRVYSTGSNVFQTRAGCLIGAEHVNNSYECDIPIGAGICASYQTQTNSPRRARSVASQSIIAYTMSLGAENSVAYSNNSIAICTNFAISVTTEILPVSMTKTSVDCTMYICGDSTECSNLLLQYGSFCTQLNRALTGIAVEQDKNTQEVFAQVKQIYKTPPIKDFGGFNFSQILPDPSKPSKRSFIEDLLFNKVTLADAGFIKQYGDCLGDIAARDLICAQKFNGLTVLPPLLTDEMIAQYTSALLAGTITSGWTFGAGAALQIPFAMQMAYRFNGIGVTQNVLYENQKLIANQFNSAIGKIQDSLSSTASALGKLQDVVNQNAQALNTLVKQLSSNFGAISSVLNDILSRLDKVEAEVQIDRLITGRLQSLQTYVTQQLIRAAEIRASANLAATKMSECVLGQSKRVDFCGKGYHLMSFPQSAPHGVVFLHVTYVCAQEKNFTTAPAICHDGKAHFPREGVFVSNGTHWFVTQRNFYEPQIITTDNTFVSGNCDVVIGIVNNTVYDPLQPELDSGGGGSDIDPYKEFGSSYQLLNFLPLDFFPDLNALVDTATALYEEELTGREHCSPHHTAIRQALVCWDELTKLIAWMSSNITSEQVRTIIVNHVNDTWGLKVRQSLWFHLSCLTFGQHTVQEFLVSFGVWIRTPAPYRPPNAPILSTLPEHTVIC

SEQ ID NO: 11144 - protein, 1301 aa, Artificial Sequence
  SARS-CoV-2/USA/CruiseA-23/2020__EPI_ISL_414482 spike protein (1-1147)(P715C_P1069C) WhcAg construct
MFVFLVLLPLVSSQCVNLTTRTQLPPAYTNSFTRGVYYPDKVFRSSVLHSTQDLFLPFFSNVTWFHAIHVSGTNGTKRFDNPVLPFNDGVYFASTEKSNIIRGWIFGTTLDSKTQSLLIVNNATNVVIKVCEFQFCNDPFLGVYYHKNNKSWMESEFRVYSSANNCTFEYVSQPFLMDLEVKQGNFKNLREFVFKNIDGYFKIYSKHTPINLVRDLPQGFSALEPLVDLPIGINITRFQTLLALHRSYLTPGDSSSGWTAGAAAYYVGYLQPRTFLLKYNENGTITDAVDCALDPLSETKCTLKSFTVEKGIYQTSNFRVQPTESIVRFPNITNLCPFGEVFNATRFASVYAWNRKRISNCVADYSVLYNSASFSTFKCYGVSPTKLNDLCFTNVYADSFVIRGDEVRQIAPGQTGKIADYNYKLPDDFTGCVIAWNSNNLDSKVGGNYNYLYRLFRKSNLKPFERDISTEIYQAGSTPCNGVEGFNCYFPLQSYGFQPTNGVGYQPYRVVVLSFELLHAPATVCGPKKSTNLVKNKCVNFNFNGLTGTGVLTESNKKFLPFQQFGRDIADTTDAVRDPQTLEILDITPCSFGGVSVITPGTNTSNQVAVLYQDVNCTEVPVAIHADQLTPTWRVYSTGSNVFQTRAGCLIGAEHVNNSYECDIPIGAGICASYQTQTNSPRRARSVASQSIIAYTMSLGAENSVAYSNNSIAICTNFTISVTTEILPVSMTKTSVDCTMYICGDSTECSNLLLQYGSFCTQLNRALTGIAVEQDKNTQEVFAQVKQIYKTPPIKDFGGFNFSQILPDPSKPSKRSFIEDLLFNKVTLADAGFIKQYGDCLGDIAARDLICAQKFNGLTVLPPLLTDEMIAQYTSALLAGTITSGWTFGAGAALQIPFAMQMAYRFNGIGVTQNVLYENQKLIANQFNSAIGKIQDSLSSTASALGKLQDVVNQNAQALNTLVKQLSSNFGAISSVLNDILSRLDKVEAEVQIDRLITGRLQSLQTYVTQQLIRAAEIRASANLAATKMSECVLGQSKRVDFCGKGYHLMSFPQSAPHGVVFLHVTYVCAQEKNFTTAPAICHDGKAHFPREGVFVSNGTHWFVTQRNFYEPQIITTDNTFVSGNCDVVIGIVNNTVYDPLQPELDSGGGGSDIDPYKEFGSSYQLLNFLPLDFFPDLNALVDTATALYEEELTGREHCSPHHTAIRQALVCWDELTKLIAWMSSNITSEQVRTIIVNHVNDTWGLKVRQSLWFHLSCLTFGQHTVQEFLVSFGVWIRTPAPYRPPNAPILSTLPEHTVIC

SEQ ID NO: 11145 - protein, 1301 aa, Artificial Sequence
  SARS-CoV-2/Hong Kong/case85_VM20002868/2020__EPI_ISL_414519 spike protein (1-1147)(P715C_P1069C) WhcAg construct
MFVFLVLVPLVSSQCVNLTTRTQLPPAYTNSFTRGVYYPDKVFRSSVLHSTQDLFLPFFSNVTWFHAIHVSGTNGTKRFDNPVLPFNDGVYFASTEKSNIIRGWIFGTTLDSKTQSLLIVNNATNVVIKVCEFQFCNDPFLGVYYHKNNKSWMESEFRVYSSANNCTFEYVSQPFLMDLEGKQGNFKNLREFVFKNIDGYFKIYSKHTPINLVRDLPQGFSALEPLVDLPIGINITRFQTLLALHRSYLTPGDSSSGWTAGAAAYYVGYLQPRTFLLKYNENGTITDAVDCALDPLSETKCTLKSFTVEKGIYQTSNFRVQPTESIVRFPNITNLCPFGEVFNATRFASVYAWNRKRISNCVADYSVLYNSASFSTFKCYGVSPTKLNDLCFTNVYADSFVIRGDEVRQIAPGQTGKIADYNYKLPDDFTGCVIAWNSNNLDSKVGGNYNYLYRLFRKSNLKPFERDISTEIYQAGSTPCNGVEGFNCYFPLQSYGFQPTNGVGYQPYRVVVLSFELLHAPATVCGPKKSTNLVKNKCVNFNFNGLTGTGVLTESNKKFLPFQQFGRDIADTTDAVRDPQTLEILDITPCSFGGVSVITPGTNTSNQVAVLYQDVNCTEVPVAIHADQLTPTWRVYSTGSNVFQTRAGCLIGAEHVNNSYECDIPIGAGICASYQTQTNSPRRARSVASQSIIAYTMSLGAENSVAYSNNSIAICTNFTISVTTEILPVSMTKTSVDCTMYICGDSTECSNLLLQYGSFCTQLNRALTGIAVEQDKNTQEVFAQVKQIYKTPPIKDFGGFNFSQILPDPSKPSKRSFIEDLLFNKVTLADAGFIKQYGDCLGDIAARDLICAQKFNGLTVLPPLLTDEMIAQYTSALLAGTITSGWTFGAGAALQIPFAMQMAYRFNGIGVTQNVLYENQKLIANQFNSAIGKIQDSLSSTASALGKLQDVVNQNAQALNTLVKQLSSNFGAISSVLNDILSRLDKVEAEVQIDRLITGRLQSLQTYVTQQLIRAAEIRASANLAATKMSECVLGQSKRVDFCGKGYHLMSFPQSAPHGVVFLHVTYVCAQEKNFTTAPAICHDGKAHFPREGVFVSNGTHWFVTQRNFYEPQIITTDNTFVSGNCDVVIGIVNNTVYDPLQPELDSGGGGSDIDPYKEFGSSYQLLNFLPLDFFPDLNALVDTATALYEEELTGREHCSPHHTAIRQALVCWDELTKLIAWMSSNITSEQVRTIIVNHVNDTWGLKVRQSLWFHLSCLTFGQHTVQEFLVSFGVWIRTPAPYRPPNAPILSTLPEHTVIC

SEQ ID NO: 11146 - protein, 1301 aa, Artificial Sequence; identical to SEQ ID NO: 11136
  SARS-CoV-2/England/200990660/2020__EPI_ISL_414523 spike protein (1-1147)(P715C_P1069C) WhcAg construct

SEQ ID NO: 11147 - protein, 1301 aa, Artificial Sequence
  SARS-CoV-2/Australia/NSW09/2020__EPI_ISL_413595 spike protein (1-1147)(P715C_P1069C) WhcAg construct
MFVFLVLLPLVSSQCVNLTTRTQLPPAYTNSFTRGVYYPDKVFRSSVLHSTQDLFLPFFSNVTWFHAIHVSGTNGTKRFDNPVLPFNDGVYFASTEKSNIIRGWIFGTTLDSKTQSLLIVNNATNVVIKVCEFQFCNDPFLGVYYHKNNKSWMESEFRVYSSANNCTFEYVSQPFLMDLEGKQGNFKNLREFVFKNIDGYFKIYSKHTPINLVRDLPQGFSALEPLVDLPIGINITRFQTLLALHRSYLTPGDSSSGWTAGAAAYYVGYLQPRTFLLKYNENGTITDAVDCALDPLSETKCTLKSFTVEKGIYQTSNFRVQPTESIVRFPNITNLCPFGEVFNATRFASVYAWNRKRISNCVADYSVLYNSASFSTFKCYGVSPTKLNDLCFTNVYADSFVIRGDEVRQIAPGQTGKIADYNYKLPDDFTGCVIAWNSNNLDSKVGGNYNYLYRLFRKSNLKPFERDISTEIYQAGSTPCNGVEGFNCYFPLQSYGFQPTNGVGYQPYRVVVLSFELLHAPATVCGPKKSTNLVKNKCVNFNFNGLTGTGVLTESNKKFLPFQQFGRDIADTTDAVRDPQTLEILDITPCSFGGVSVITPGTNTSNQVAVLYQDVNCTEVPVAIHADQLTPTWRVYSTGSNVFQTRAGCLIGAEHVNNSYECDIPIGAGICASYQTQTNSPRRARSVASQSIIAYTMSLGAENSVAYSNNSIAICTNFTISVTTEILPVSMTKTSVDCTMYICGDSTECSNLLLQYGSFCTQLNRALTGIAVEQDKNTQEVFAQVKQIYKTPPIKDFGGFNFSQILPDPSKPSKRSFIEDLLFNKVTLADAGFIKQYGDCLGDIAARDLICAQKFNGLTVLPPLLTDEMIAQYTSALLAGTITSGWTFGAGAALQIPFAMQMAYRFNGIGVTQNVLYENQKLIANQFNSAIGKIQDSLSFTASALGKLQDVVNQNAQALNTLVKQLSSNFGAISSVLNDILSRLDKVEAEVQIDRLITGRLQSLQTYVTQQLIRAAEIRASANLAATKMSECVLGQSKRVDFCGKGYHLMSFPQSAPHGVVFLHVTYVCAQEKNFTTAPAICHDGKAHFPREGVFVSNGTHWFVTQRNFYEPQIITTDNTFVSGNCDVVIGIVNNTVYDPLQPELDSGGGGSDIDPYKEFGSSYQLLNFLPLDFFPDLNALVDTATALYEEELTGREHCSPHHTAIRQALVCWDELTKLIAWMSSNITSEQVRTIIVNHVNDTWGLKVRQSLWFHLSCLTFGQHTVQEFLVSFGVWIRTPAPYRPPNAPILSTLPEHTVIC

SEQ ID NO: 11148 - protein, 1301 aa, Artificial Sequence; identical to SEQ ID NO: 11128
  SARS-CoV-2/Australia/NSW10/2020__EPI_ISL_413596 spike protein (1-1147)(P715C_P1069C) WhcAg construct

SEQ ID NO: 11149 - protein, 1301 aa, Artificial Sequence
  SARS-CoV-2/Switzerland/1000477797/2020__EPI_ISL_413023 spike protein (1-1147)(P715C_P1069C) WhcAg construct
MFVFLVLLPLVSSQCVNLTTRTQLPPAYTNSFTRGVYYPDKVFRSSVLHSTQDLFLPFFSNVTWFHAIHVSGTNGTKRFDNPVLPFNDGVYFASTEKSNIIRGWIFGTTLDSKTQSLLIVNNATNVVIKVCEFQFCNDPFLGVYYHKNNKSWMESEFRVYSSANNCTFEYVSQPFLMDLEGKQGNFKNLREFVFKNIDGYFNIYSKHTPINLVRDLPQGFSALEPLVDLPIGINITRFQTLLALHRSYLTPGDSSSGWTAGAAAYYVGYLQPRTFLLKYNENGTITDAVDCALDPLSETKCTLKSFTVEKGIYQTSNFRVQPTESIVRFPNITNLCPFGEVFNATRFASVYAWNRKRISNCVADYSVLYNSASFSTFKCYGVSPTKLNDLCFTNVYADSFVIRGDEVRQIAPGQTGKIADYNYKLPDDFTGCVIAWNSNNLDSKVGGNYNYLYRLFRKSNLKPFERDISTEIYQAGSTPCNGVEGFNCYFPLQSYGFQPTNGVGYQPYRVVVLSFELLHAPATVCGPKKSTNLVKNKCVNFNFNGLTGTGVLTESNKKFLPFQQFGRDIADTTDAVRDPQTLEILDITPCSFGGVSVITPGTNTSNQVAVLYQGVNCTEVPVAIHADQLTPTWRVYSTGSNVFQTRAGCLIGAEHVNNSYECDIPIGAGICASYQTQTNSPRRARSVASQSIIAYTMSLGAENSVAYSNNSIAICTNFTISVTTEILPVSMTKTSVDCTMYICGDSTECSNLLLQYGSFCTQLNRALTGIAVEQDKNTQEVFAQVKQIYKTPPIKDFGGFNFSQILPDPSKPSKRSFIEDLLFNKVTLADAGFIKQYGDCLGDIAARDLICAQKFNGLTVLPPLLTDEMIAQYTSALLAGTITSGWTFGAGAALQIPFAMQMAYRFNGIGVTQNVLYENQKLIANQFNSAIGKIQDSLSSTASALGKLQDVVNQNAQALNTLVKQLSSNFGAISSVLNDILSRLDKVEAEVQIDRLITGRLQSLQTYVTQQLIRAAEIRASANLAATKMSECVLGQSKRVDFCGKGYHLMSFPQSAPHGVVFLHVTYVCAQEKNFTTAPAICHDGKAHFPREGVFVSNGTHWFVTQRNFYEPQIITTDNTFVSGNCDVVIGIVNNTVYDPLQPELDSGGGGSDIDPYKEFGSSYQLLNFLPLDFFPDLNALVDTATALYEEELTGREHCSPHHTAIRQALVCWDELTKLIAWMSSNITSEQVRTIIVNHVNDTWGLKVRQSLWFHLSCLTFGQHTVQEFLVSFGVWIRTPAPYRPPNAPILSTLPEHTVIC

SEQ ID NO: 11150 - protein, 1301 aa, Artificial Sequence
  SARS-CoV-2/Belgium/BA-02291/2020__EPI_ISL_415159 spike protein (1-1147)(P715C_P1069C) WhcAg construct
MFVFLVLLPLVSSQCVNLTTRTQLPPAYTNSFTRGVYYPDKVFRSSVLHSTQDLFLPFFSNVTWFHAIHVSGTNGTKRFDNPVLPFNDGVYFASTEKSNIIRGWIFGTTLDSKTQSLLIVNNATNVVIKVCEFQFCNDPFLGVYYHKNNKSWMESEFRVYSSANNCTFEYVSQPFLMDLEGKQGNFKNLREFVFKNIDGYFKIYSKHTPINLVRDLPQGFSALEPLVDLPIGINITRFQTLLALHRSYLTPGDSSSGWTAGAAAYYVGYLQPRTFLLKYNENGTITDAVDCALDPLSETKCTLKSFTVEKGIYQTSNFRVQPTESIVRFPNITNLCPFGEVFNATRFASVYAWNRKRISNCVADYSVLYNSASFSTFKCYGVSPTKLNDLCFTNVYADSFVIRGDEVRQIAPGQTGKIADYNYKLPDDFTGCVIAWNSNNLDSKVGGNYNYLYRLFRRSNLKPFERDISTEIYQAGSTPCNGVEGFNCYFPLQSYGFQPTNGVGYQPYRVVVLSFELLPAPATVCGPKKSTNLVKNKCVNFNFNGLTGTGVLTESNKKFLPFQQFGRDIADTTDAVRDPQTLEILDITPCSFGGVSVITPGTNTSNQVAVLYQGVNCTEVPVAIHADQLTPTWRVYSTGSNVFQTRAGCLIGAEHVNNSYECDIPIGAGICASYQTQTNSPRRARSVASQSIIAYTMSLGAENSVAYSNNSIAICTNFTISVTTEILPVSMTKTSVDCTMYICGDSTECSNLLLQYGSFCTQLNRALTGIAVEQDKNTQEVFAQVKQIYKTPPIKDFGGFNFSQILPDPSKPSKRSFIEDLLFNKVTLADAGFIKQYGDCLGDIAARDLICAQKFNGLTVLPPLLTDEMIAQYTSALLAGTITSGWTFGAGAALQIPFAMQMAYRFNGIGVTQNVLYENQKLIANQFNSAIGKIQDSLSSAAPALGKLQDVVNQNAQALNTLVKQLSSNFGAISSVLNDILSRLDKVEAEVQIDRLITGRLQSLQTYVTQQLIRAAEIRASANLAATKMSECVLGQSKRVDFCGKGYHLMSFPQSAPHGVVFLHVTYVCAQEKNFTTAPAICHDGKAHFPREGVFVSNGTHWFVTQRNFYEPQIITTDNTFVSGNCDVVIGIVNNTVYDPLQPELDSGGGGSDIDPYKEFGSSYQLLNFLPLDFFPDLNALVDTATALYEEELTGREHCSPHHTAIRQALVCWDELTKLIAWMSSNITSEQVRTIIVNHVNDTWGLKVRQSLWFHLSCLTFGQHTVQEFLVSFGVWIRTPAPYRPPNAPILSTLPEHTVIC

SEQ ID NO: 11151 - protein, 1301 aa, Artificial Sequence
  SARS-CoV-2/USA/WA8-UW5/2020__EPI_ISL_413486 spike protein (1-1147)(P715C_P1069C) WhcAg construct
MFVFLVLLPLVSSQCVNLTTRTQLPPAYTNSFTRGVYYPDKVFRSSVLHSTQDLFLPFFSNVTWFHAIHVSGTNGTKRFDNPVLPFNDGVYFASTEKSNIIRGWIFGTTLDSKTQSLLIVNNATNVVIKVCEFQFCNDPFLGVYYHKNNKSWMESEFRVYSSANNCTFEYVSQPFLMDLEGKQGNFKNLREFVFKNIDGYFKIYSKHTPINLVRDLPQGFSALEPLVDLPIGINITRFQTLLALHRSYLTPGDSSSGWTAGAAAYYVGYLQPRTFLLKYNENGTITDAVDCALDPLSETKCTLKSFTVEKGIYQTSNFRVQPTESIVRFPNITNLCPFGEVFNATRFASVYAWNRKRISNCVADYSVLYNSASFSTFKCYGVSPTKLNDLCFTNVYADSFVIRGDEVRQIAPGQTGKIADYNYKLPDDFTGCVIAWNSNNLDSKVGGNYNYLYRLFRKSNLKPFERDISTEIYQAGSTPCNGVEGFNCYFPLQSYGFQPTNGVGYQPYRVVVLSFELLHAPATVCGPKKSTNLVKNKCVNFNFNGLTGTGVLTESNKKFLPFQQFGRDIADTTDAVRDPQTLEILDITPCSFGGVSVITPGTNTSNQVAVLYQDVNCTEVPVAIHADQLTPTWRVYSTGSNVFQTRAGCLIGAEYVNNSYECDIPIGAGICASYQTQTNSPRRARSVASQSIIAYTMSLGAENSVAYSNNSIAICTNFTISVTTEILPVSMTKTSVDCTMYICGDSTECSNLLLQYGSFCTQLNRALTGIAVEQDKNTQEVFAQVKQIYKTPPIKDFGGFNFSQILPDPSKPSKRSFIEDLLFNKVTLADAGFIKQYGDCLGDIAARDLICAQKFNGLTVLPPLLTDEMIAQYTSALLAGTITSGWTFGAGAALQIPFAMQMAYRFNGIGVTQNVLYENQKLIANQFNSAIGKIQDSLSSTASALGKLQDVVNQNAQALNTLVKQLSSNFGAISSVLNDILSRLDKVEAEVQIDRLITGRLQSLQTYVTQQLIRAAEIRASANLAATKMSECVLGQSKRVDFCGKGYHLMSFPQSAPHGVVFLHVTYVCAQEKNFTTAPAICHDGKAHFPREGVFVSNGTHWFVTQRNFYEPQIITTDNTFVSGNCDVVIGIVNNTVYDPLQPELDSGGGGSDIDPYKEFGSSYQLLNFLPLDFFPDLNALVDTATALYEEELTGREHCSPHHTAIRQALVCWDELTKLIAWMSSNITSEQVRTIIVNHVNDTWGLKVRQSLWFHLSCLTFGQHTVQEFLVSFGVWIRTPAPYRPPNAPILSTLPEHTVIC

SEQ ID NO: 11152 - protein, 1301 aa, Artificial Sequence
  SARS-CoV-2/England/20102000506/2020__EPI_ISL_415147 spike protein (1-1147)(P715C_P1069C) WhcAg construct
MFVFLVLLPLVSSQCVNLTTRTQLPPAYTNSFTRGVYYPDKVFRSSVLHSTQDLFLPFFSNVTWFHAIHVSGTNGTKRFDNPVLPFNDGVYFASTEKSNIIRGWIFGTTLDSKTQSLLIVNNATNVVIKVCEFQFCNDPFLGVYYHKNNKSWMESEFRVYSSANNCTFEYVSQPFLMDLEGKQGNFKNLREFVFKNIDGYFKIYSKHTPINLVRDLPQGFSALEPLVDLPIGINITRFQTLLALHRSYLTPGDSSSGWTAGAAAYYVGYLQPRTFLLKYNENGTITDAVDCALDPLSETKCTLKSFTVEKGIYQTSNFRVQPTESIVRFPNITNLCPFGEVFNATRFASVYAWNRKRISNCVADYSVLYNSASFSTFKCYGVSPTKLNDLCFTNVYADSFVIRGDEVRQIAPGQTGKIADYNYKLPDDFTGCVIAWNSNNLDSKVGGNYNYLYRLFRKSNLKPFERDISTEIYQAGSTPCNGVEGFNCYFPLQSYGFQPTNGVGYQPYRVVVLSFELLHAPATVCGPKKSTNLVKNKCVNFNFNGLTGTGVLTESNKKFLPFQQFGRDIADTTDAVRDPQTLEILDITPCSFGGVSVITPGTNTSNQVAVLYQGVNCTEVPVAIHADQLTPTWRVYSTGSNVFQTRAGCLIGAEHVNNSYECDIPIGAGICASYQTQTNSPRRARSVASQSIIAYTMSLGAENSVAYSNNSIAICTNFTISVTTEILPVSMTKTSVDCTMYICGDSTECSNLLLQYGSFCTQLNRALTGIAVEQDKNTQEVFAQVKQIYKTPPIKDFGGFNFSQILPDPSKPSKRSFIEDLLFNKVTLADAGFIKQYGYCLGDIAARDLICAQKFNGLTVLPPLLTDEMIAQYTSALLAGTITSGWTFGAGAALQIPFAMQMAYRFNGIGVTQNVLYENQKLIANQFNSAIGKIQDSLSSTASALGKLQDVVNQNAQALNTLVKQLSSNFGAISSVLNDILSRLDKVEAEVQIDRLITGRLQSLQTYVTQQLIRAAEIRASANLAATKMSECVLGQSKRVDFCGKGYHLMSFPQSAPHGVVFLHVTYVCAQEKNFTTAPAICHDGKAHFPREGVFVSNGTHWFVTQRNFYEPQIITTDNTFVSGNCDVVIGIVNNTVYDPLQPELDSGGGGSDIDPYKEFGSSYQLLNFLPLDFFPDLNALVDTATALYEEELTGREHCSPHHTAIRQALVCWDELTKLIAWMSSNITSEQVRTIIVNHVNDTWGLKVRQSLWFHLSCLTFGQHTVQEFLVSFGVWIRTPAPYRPPNAPILSTLPEHTVIC

SEQ ID NO: 11153 - protein, 1301 aa, Artificial Sequence
  SARS-CoV-2/Belgium/VAG-03013/2020__EPI_ISL_415155 spike protein (1-1147)(P715C_P1069C) WhcAg construct
MFVFLVLLPLVSSQCVNLTTRTQLPPAYTNSFTRGVYYPDKVFRSSVLHSTQDLFLPFFSNVTWFHAIHVSGTNGTKRFDNPVLPFNDGVYFASTEKSNIIRGWIFGTTLDSKTQSLLIVNNATNVVIKVCEFQFCNDPFLGVYYHKNNKSWMESEFRVYSSANNCTFEYVSQPFLMDLEGKQGNFKNLREFVFKNIDGYFKIYSKHTPINLVRDLPQGFSALEPLVDLPIGINITRFQTLLALHRSYLTPGDSSSGWTAGAAAYYVGYLQPRTFLLKYNENGTITDAVDCALDPLSETKCTLKSFTVEKGIYQTSNFRVQPTESIVRFPNITNLCPFGEVFNATRFASVYAWNRKRISNCVADYSVLYNSASFSTFKCYGVSPTKLNDLCFTNVYADSFVIRGDEVRQIAPGQTGKIADYNYKLPDDFTGCVIAWNSNNLDSKVGGNYNYLYRLFRKSNLKPFERDISTEIYQAGSTPCNGVEGFNCYFPLQSYGFQPTNGVGYQPYRVVVLSFELLHAPATVCGPKKSTNLVKNKCVNFNFNGLTGTGVLTESNKKFLPFQQFGRDIADTTDAVRDPQTLEILDITPCSFGGVSVITPGTNTSNQVAVLYQGVNCTEVPVAIHADQLTPTWRVYSTGSNVFQTRAGCLIGAEHVNNSYECDIPIGAGICASYQTQTNSPRRARSVASQSIIAYTMSLGAENSVAYSNNSIAICTNFTISVTTEILPVSMTKTSVDCTMYICGDSTECSNLLLQYGSFCTQLNRALTGIAVEQDKNTQEVFAQVKQIYKTPPIKDFGGFNFSQILPDPSKPSKRSFIEDLLFNKVTLADAGFIKQYGDCLGDIAARDLICAQKFNGLTVLPPLLTDEMIAQYTSALLAGTITSGWTFGAGAALQIPFAMQMAYRFNGIGVTQNVLYENQKLIANQFNSAIGKIQDSLSSTATALGKLQDVVNQNAQALNTLVKQLSSNFGAISSVLNDILSRLDKVEAEVQIDRLITGRLQSLQTYVTQQLIRAAEIRASANLAATKMSECVLGQSKRVDFCGKGYHLMSFPQSAPHGVVFLHVTYVCAQEKNFTTAPAICHDGKAHFPREGVFVSNGTHWFVTQRNFYEPQIITTDNTFVSGNCDVVIGIVNNTVYDPLQPELDSGGGGSDIDPYKEFGSSYQLLNFLPLDFFPDLNALVDTATALYEEELTGREHCSPHHTAIRQALVCWDELTKLIAWMSSNITSEQVRTIIVNHVNDTWGLKVRQSLWFHLSCLTFGQHTVQEFLVSFGVWIRTPAPYRPPNAPILSTLPEHTVIC

SEQ ID NO: 11154 - protein, 1301 aa, Artificial Sequence
  SARS-CoV-2/Belgium/BC-03016/2020__EPI_ISL_415157 spike protein (1-1147)(P715C_P1069C) WhcAg construct
MFVFLVLLPLVSSQCVNLTTRTQLPPAYTNSFTRGVYYPDKVFRSSVLHSTQDLFLPFFSNVTWFHAIHVSGTNGTKRFDNPVLPFNDGVYFASTEKSNIIRGWIFGTTLDSKTQSLLIVNNATNVVIKVCEFQFCNDPFLGVYYHKNNKSWMESEFRVYSSANNCTFEYVSQPFLMDLEGKQGNFKNLREFVFKNIDGYFKIYSKHTPINLVRDLPQGFSALEPLVDLPIGINITRFQTLLALHRSYLTPGDSSSGWTAGAAAYYVGYLQPRTFLLKYNENGTITDAVDCALDPLSETKCTLKSFTVEKGIYQTSNFRVQPTESIVRFPNITNLCPFGEVFNATRFASVYAWNRKRISNCVADYSVLYNSASFSTFKCYGVSPTKLNDLCFTNVYADSFVIRGDEVRQIAPGQTGKIADYNYKLPDDFTGCVIAWNSNNLDSKVGGNYNYLYRLFRKSNLKPFERDISTEIYQAGSTPCNGVEGFNCYFPLQSYGFQPTNGVGYQPYRVVVLSFELLHAPATVCGPKKSTNLVKNKCVNFNFNGLTGTGVLTESNKKFLPFQQFGRDIADTTDAVRDPQTLEILDITPCSFGGVSVITPGTNTSNQVAVLYQGVNCTEVPVAIHADQLTPTWRVYSTGSNVFQTRAGCLIGAEHVNNSYECDIPIGAGICASYQTQTNSPRRARSVASQSIIAYTMSLGAENSVAYSNNSIAICTNFTISVTTEILPVSMTKTSVDCTMYICGDSTECSNLLLQYGSFCTQLNRALTGIAVEQDKNTQEVFAQVKQIYKTPPIKDFGGFNFSQILPDPSKPSKRSFIEDLLFNKVTLADAGFIKQYGDCLGDIAARDLICAQKFNGLTVLPPLLTDEMIAQYTSALLAGTITSGWTFGAGAALQIPFAMQMAYRFNGIGVTQNVLYENQKLIANQFNSAIGKIQDSLSSTAPALGKLQDVVNQNAQALNTLVKQLSSNFGAISSVLNDILSRLDKVEAEVQIDRLITGRLQSLQTYVTQQLIRAAEIRASANLAATKMSECVLGQSKRVDFCGKGYHLMSFPQSAPHGVVFLHVTYVCAQEKNFTTAPAICHDGKAHFPREGVFVSNGTHWFVTQRNFYEPQIITTDNTFVSGNCDVVIGIVNNTVYDPLQPELDSGGGGSDIDPYKEFGSSYQLLNFLPLDFFPDLNALVDTATALYEEELTGREHCSPHHTAIRQALVCWDELTKLIAWMSSNITSEQVRTIIVNHVNDTWGLKVRQSLWFHLSCLTFGQHTVQEFLVSFGVWIRTPAPYRPPNAPILSTLPEHTVIC

SEQ ID NO: 11155 - protein, 1301 aa, Artificial Sequence
  SARS-CoV-2/Germany/BavPat3/2020__EPI_ISL_414521 spike protein (1-1147)(P715C_P1069C) WhcAg construct
MFVFLVLLPLVSSQCVNLTTRTQLPPAYTNSFTRGVYYPDKVFRSSVLHSTQDLFLPFFSNVTWFHAIHVSGTNGTKRFDNPVLPFNDGVYFASTEKSNIIRGWIFGTTLDSKTQSLLIVNNATNVVIKVCEFQFCNDPFLGVYYHKNNKSWMESEFRVYSSANNCTFEYVSQPFLMDLEGKQGNFKNLREFVFKNIDGYFKIYSKHTPINLVRDLPQGFSALEPLVDLPIGINITRFQTLLALHRSYLTPGDSSSGWTAGAAAYYVGYLQPRTFLLKYNENGTITDAVDCALDPLSETKCTLKSFTVEKGIYQTSNFRVQPTESIVRFPNITNLCPFGEVFNATRFASVYAWNRKRISNCVADYSVLYNSASFSTFKCYGVSPTKLNDLCFTNVYADSFVIRGDEVRQIAPGQTGKIADYNYKLPDDFTGCVIAWNSNNLDSKVGGNYNYLYRLFRKSNLKPFERDISTEIYQAGSTPCNGVEGFNCYFPLQSYGFQPTNGVGYQPYRVVVLSFELLHAPATVCGPKKSTNLVKNKCVNFNFNGLTGTGVLTESNKKFLPFQQFGRDIADTTDAVRDPQTLEILDITPCSFGGVSVITPGTNTSNQVAVLYQDVNCTEVPVAIHADQLTPTWRVYSTGSNVFQTRAGCLIGAEHVNNSYECDIPIGAGICASYQTQTNSPRRARSVASQSIIAYTMSLGAENSVAYSNNSIAICTNFTISVTTEILPVSMTKTSVDCTMYICGDSTECSNLLLQYGSFCTQLNRALTGIAVEQDKNTQQVFAQVKQIYKTPPIKDFGGFNFSQILPDPSKPSKRSFIEDLLFNKVTLADAGFIKQYGDCLGDIAARDLICAQKFNGLTVLPPLLTDEMIAQYTSALLAGTITSGWTFGAGAALQIPFAMQMAYRFNGIGVTQNVLYENQKLIANQFNSAIGKIQDSLSSTASALGKLQDVVNQNAQALNTLVKQLSSNFGAISSVLNDILSRLDKVEAEVQIDRLITGRLQSLQTYVTQQLIRAAEIRASANLAATKMSECVLGQSKRVDFCGKGYHLMSFPQSAPHGVVFLHVTYVCAQEKNFTTAPAICHDGKAHFPREGVFVSNGTHWFVTQRNFYEPQIITTDNTFVSGNCDVVIGIVNNTVYDPLQPELDSGGGGSDIDPYKEFGSSYQLLNFLPLDFFPDLNALVDTATALYEEELTGREHCSPHHTAIRQALVCWDELTKLIAWMSSNITSEQVRTIIVNHVNDTWGLKVRQSLWFHLSCLTFGQHTVQEFLVSFGVWIRTPAPYRPPNAPILSTLPEHTVIC

SEQ ID NO: 11156 - protein, 1301 aa, Artificial Sequence
  SARS-CoV-2/France/HF1805/2020__EPI_ISL_414628 spike protein (1-1147)(P715C_P1069C) WhcAg construct
MFVFLVLLPLVSSQCVNLTTRTQLPPAYTNSFTRGVYYPDKVFRSSVLHSTQDLFLPFFSNVTWFHAIHVSGTNGTKRFDNPVLPFNDGVYFASTEKSNIIRGWIFGTTLDSKTQSLLIVNNATNVVIKVCEFQFCNDPFLGVYYHKNNKSWMESEFRVYSSANNCTFEYVSQPFLMDLEGKQGNFKNLREFVFKNIDGYFKIYSKHTPINLVRDLPQGFSALEPLVDLPIGINITRFQTLLALHRSYLTPGDSSSGWTAGAAAYYVGYLQPRTFLLKYNENGTITDAVDCALDPLSETKCTLKSFTVEKGIYQTSNFRVQPTESIVRFPNITNLCPFGEVFNATRFASVYAWNRKRISNCVADYSVLYNSASFSTFKCYGVSPTKLNDLCFTNVYADSFVIRGDEVRQIAPGQTGKIADYNYKLPDDFTGCVIAWNSNNLDSKVGGNYNYLYRLFRKSNLKPFERDISTEIYQAGSTPCNGVEGFNCYFPLQSYGFQPTNGVGYQPYRVVVLSFELLHAPATVCGPKKSTNLVKNKCVNFNFNGLTGTGVLTESNKKFLPFQQFGRDIADTTDAVRDPQTLEILDITPCSFGGVSVITPGTNTSNQVAVLYQGVNCTEVPVAIHADQLTPTWRVYSTGSNVFQTRAGCLIGAEHVNNSYECDIPIGAGICASYQTQTNSPRRARSVASQSIIAYTMSLGAENSVAYSNNSIAICTNFTISVTTEILPVSMTKTSVDCTMYICGDSTECSNLLLQYGSFCTQLNRALTGIAVEQDKNTQEVFAQVKQIYKTPPIKDFGGFNFSQILPDPSKPSKRSFIEDLLFNKVTLADAGFIKQYGDCLGDIAARDLICAQKFNGLTVLPPLLTDEMIAQYTSALLAGTITSGWTFGAGAALQIPFAMQMAYRFNGIGVTQNVLYENQKLIANQFNSAIGKIQDSLSSTASALGKLQDVVNQNAQALNTLVKQLSSNFGAISSVLNDILSRLDKVEAEVQIDRLITGRLQSLQTYVTQQLIRAAEIRASANLAATKMSECVLGQSKRVDFCGKGYHLMSFPQSAPHGVVFLHVTYVCAQEKNFTTAPAICHDGKAHFPREGVFVSNGTHWFVTQRNFYEPQIITTDNTFVSGNCDVVIGVVNNTVYDPLQPELDSGGGGSDIDPYKEFGSSYQLLNFLPLDFFPDLNALVDTATALYEEELTGREHCSPHHTAIRQALVCWDELTKLIAWMSSNITSEQVRTIIVNHVNDTWGLKVRQSLWFHLSCLTFGQHTVQEFLVSFGVWIRTPAPYRPPNAPILSTLPEHTVIC

SEQ ID NO: 11157 - protein, 1301 aa, Artificial Sequence
  SARS-CoV-2/Netherlands/ZuidHolland_9/2020__EPI_ISL_414445 spike protein (1-1147)(P715C_P1069C) WhcAg construct
MFVFLVLLPLVSSQCVNLTTRTQLPPAYTNSFTRGVYYPDKVFRSSVLHSTQDLFLPFFSNVTWFHAIHVSGTNGTKRFDNPVLPFNDGVYFASTEKSNIIRGWIFGTTLDSKTQSLLIVNNATNVVIKVCEFQFCNDPFLGVYYHKNNKSWMESEFRVYSSANNCTFEYVSQPFLMDLEGKQGNFKNLREFVFKNIDGYFKIYSKHTPINLVRDLPQGFSALEPLVDLPIGINITRFQTLLALHRSYLTPGDSSSGWTAGAAAYYVGYLQPRTFLLKYNENGTITDAVDCALDPLSETKCTLKSFTVEKGIYQTSNFRVQPTESIVRFPNITNLCPFGEVFNATRFASVYAWNRKRISNCVADYSVLYNSASFSTFKCYGVSPTKLNDLCFTNVYADSFVIRGDEVRQIAPGQTGKIADYNYKLPDDFTGCVIAWNSNNLDSKVGGNYNYLYRLFRKSNLKPFERDISTEIYQAGSTPCNGVEGFNCYFPLQSYGFQPTNGVGYQPYRVVVLSFELLHAPATVCGPKKSTNLVKNKCVNFNFNGLTGTGVLTESNKKFLPFQQFGRDIADTTDAVRDPQTLEILDITPCSFGGVSVITPGTNTSNQVAVLYQGVNCTEVPVAIHADQLTPTWRVYSTGSNVFQTRAGCLIGAEHVNNSYECDIPIGAGICASYQTQTNSPRRARSVASQSIIAYTMSLGAENSVAYSNNSIAICTNFTISVTTEILPVSMTKTSVDCTMYICGDSTECSNLLLQYGSFCTQLNRALTGIAVEQDKNTQEVFAQVKQIYKTPPIKDFGGFNFSQILPDPSKPSKRSFIEDLLFNKVTLADAGFIKQYGDCLGDIAARDLICVQKFNGLTVLPPLLTDEMIAQYTSALLAGTITSGWTFGAGAALQIPFAMQMAYRFNGIGVTQNVLYENQKLIANQFNSAIGKIQDSLSSTASALGKLQDVVNQNAQALNTLVKQLSSNFGAISSVLNDILSRLDKVEAEVQIDRLITGRLQSLQTYVTQQLIRAAEIRASANLAATKMSECVLGQSKRVDFCGKGYHLMSFPQSAPHGVVFLHVTYVCAQEKNFTTAPAICHDGKAHFPREGVFVSNGTHWFVTQRNFYEPQIITTDNTFVSGNCDVVIGIVNNTVYDPLQPELDSGGGGSDIDPYKEFGSSYQLLNFLPLDFFPDLNALVDTATALYEEELTGREHCSPHHTAIRQALVCWDELTKLIAWMSSNITSEQVRTIIVNHVNDTWGLKVRQSLWFHLSCLTFGQHTVQEFLVSFGVWIRTPAPYRPPNAPILSTLPEHTVIC

SEQ ID NO: 11158 - protein, 1301 aa, Artificial Sequence
  SARS-CoV-2/Finland/FIN03032020A/2020__EPI_ISL_413602 spike protein (1-1147)(P715C_P1069C) WhcAg construct
MFVFLVLLPLVSSQCVNLTTRTQLPPAYTNSFTRGVYYPDKVFRSSVLHSTQDLFLPFFSNVTWFHAIHVSGTNGTKRFDNPVLPFNDGVYFASTEKSNIIRGWIFGTTLDSKTQSLLIVNNATNVVIKVCEFQFCNDPFLGVYYHKNNKSWMESEFRVYSSANNCTFEYVSQPFLMDLEGKQGNFKNLREFVFKNIDGYFKIYSKHTPINLVRDLPQGFSALEPLVDLPIGINITRFQTLLALHRSYLTPGDSSSGWTAGAAAYYVGYLQPRTFLLKYNENGTITDAVDCALDPLSETKCTLKSFTVEKGIYQTSNFRVQPTESIVRFPNITNLCPFGEVFNATRFASVYAWNRKRISNCVADYSVLYNSASFSTFKCYGVSPTKLNDLCFTNVYADSFVIRGDEVRQIAPGQTGKIADYNYKLPDDFTGCVISWNSNNLDSKVGGNYNYLYRLFRKSNLKPFERDISTEIYQAGSTPCNGVEGFNCYFPLQSYGFQPTNGVGYQPYRVVVLSFELLHAPATVCGPKKSTNLVKNKCVNFNFNGLTGTGVLTESNKKFLPFQQFGRDIADTTDAVRDPQTLEILDITPCSFGGVSVITPGTNTSNQVAVLYQGVNCTEVPVAIHADQLTPTWRVYSTGSNVFQTRAGCLIGAEHVNNSYECDIPIGAGICASYQTQTNSPRRARSVASQSIIAYTMSLGAENSVAYSNNSIAICTNFTISVTTEILPVSMTKTSVDCTMYICGDSTECSNLLLQYGSFCTQLNRALTGIAVEQDKNTQEVFAQVKQIYKTPPIKDFGGFNFSQILPDPSKPSKRSFIEDLLFNKVTLADAGFIKQYGDCLGDIAARDLICAQKFNGLTVLPPLLTDEMIAQYTSALLAGTITSGWTFGAGAALQIPFAMQMAYRFNGIGVTQNVLYENQKLIANQFNSAIGKIQDSLSSTASALGKLQDVVNQNAQALNTLVKQLSSNFGAISSVLNDILSRLDKVEAEVQIDRLITGRLQSLQTYVTQQLIRAAEIRASANLAATKMSECVLGQSKRVDFCGKGYHLMSFPQSAPHGVVFLHVTYVCAQEKNFTTAPAICHDGKAHFPREGVFVSNGTHWFVTQRNFYEPQIITTDNTFVSGNCDVVIGIVNNTVYDPLQPELDSGGGGSDIDPYKEFGSSYQLLNFLPLDFFPDLNALVDTATALYEEELTGREHCSPHHTAIRQALVCWDELTKLIAWMSSNITSEQVRTIIVNHVNDTWGLKVRQSLWFHLSCLTFGQHTVQEFLVSFGVWIRTPAPYRPPNAPILSTLPEHTVIC

SEQ ID NO: 11159 - protein, 1301 aa, Artificial Sequence
  SARS-CoV-2/France/GE1977/2020__EPI_ISL_414632 spike protein (1-1147)(P715C_P1069C) WhcAg construct
MFVFLVLLPLVSSQCVNLTTRTQLPPAYTNSFTRGVYYPDKVFRSSVLHSTQDLFLPFFSNVTWFHAIHVSGTNGTKRFDNPVLPFNDGVYFASTEKSNIIRGWIFGTTLDSKTQSLLIVNNATNVVIKVCEFQFCNDPFLGVYYHKNNKSWMESEFRVYSSANNCTFEYVSQPFLMDLEGKQGNFKNLREFVFKNIDGYFKIYSKHTPINLVRDLPQGFSALEPLVDLPIGINITRFQTLLALHRSYLTPGDSSSGWTAGAAAYYVGYLQPRTFLLKYNENGTITDAVDCALDPLSETKCTLKSFTVEKGIYQTSNFRVQPTESIVRFPNITNLCPFGEVFNATRFASVYAWNRKRISNCVADYSVLYNSASFSTFKCYGVSPTKLNDLCFTNVYADSFVIRGDEVRQIAPGQTGKIADYNYKLPDDFTGCVIAWNSNNLDSKVGGNYNYLYRLFRKSNLKPFERDISTEIYQAGSTPCNGVEGFNCYFPLQSYGFQPTNGVGYQPYRVVVLSFELLHAPATVCGPKKSTNLVKNKCVNFNFNGLTGTGVLTESNKKFLPFQQFGRDIADTTDAVRDPQTLEILDITPCSFGGVSVITPGTNTSNQVAVLYQGVNCTEVPVAIHADQLTPTWRVYSTGSNVFQTRAGCLIGAEHVNNSYECDIPIGAGICASYQTQTNSPRRARSVASQSIIAYTMSLGAENSVAYSNNSIAICTNFTISVTTEILPVSMTKTSVDCTMYICGDSTECSNLLLQYGSFCTQLNRALTGIAVEQDKNTQEVFAQVKQIYKTPPIKDFGGFNFSQILPDPSKPSKRSFIEDLLFNKVTLADAGFIKQYGDCLGDIAARDLICAQKFNGLTVLPPLLTDEMIAQYTSALLAGTITSGWTFGAGAALQIPFAMQMAYRFNGIGVTQNVLYENQKLIANQFNSAIGKIQDSLFSTASALGKLQDVVNQNAQALNTLVKQLSSNFGAISSVLNDILSRLDKVEAEVQIDRLITGRLQSLQTYVTQQLIRAAEIRASANLAATKMSECVLGQSKRVDFCGKGYHLMSFPQSAPHGVVFLHVTYVCAQEKNFTTAPAICHDGKAHFPREGVFVSNGTHWFVTQRNFYEPQIITTDNTFVSGNCDVVIGIVNNTVYDPLQPELDSGGGGSDIDPYKEFGSSYQLLNFLPLDFFPDLNALVDTATALYEEELTGREHCSPHHTAIRQALVCWDELTKLIAWMSSNITSEQVRTIIVNHVNDTWGLKVRQSLWFHLSCLTFGQHTVQEFLVSFGVWIRTPAPYRPPNAPILSTLPEHTVIC

SEQ ID NO: 11160 - protein, 1301 aa, Artificial Sequence
  SARS-CoV-2/Finland/FIN-313/2020__EPI_ISL_414641 spike protein (1-1147)(P715C_P1069C) WhcAg construct
MFVFLVLLPLVSSQCVNLTTRTQLPPAYTNSFTRGVYYPDKVFRSSVLHSTQDLFLPFFSNVTWFHAIHVSGTNGTKRFDNPVLPFNDGVYFASTEKSNIIRGWIFGTTLDSKTQSLLIVNNATNVVIKVCEFQFCNDPFLGVYYHKNNKSWMESEFRVYSSANNCTFEYVSQPFLMDLEGKQGNFKNLREFVFKNIDGYFKIYSKHTPINLVRDLPQGFSALEPLVDLPIGINITRFKTLLALHRSYLTPGDSSSGWTAGAAAYYVGYLQPRTFLLKYNENGTITDAVDCALDPLSETKCTLKSFTVEKGIYQTSNFRVQPTESIVRFPNITNLCPFGEVFNATRFASVYAWNRKRISNCVADYSVLYNSASFSTFKCYGVSPTKLNDLCFTNVYADSFVIRGDEVRQIAPGQTGKIADYNYKLPDDFTGCVIAWNSNNLDSKVGGNYNYLYRLFRKSNLKPFERDISTEIYQAGSTPCNGVEGFNCYFPLQSYGFQPTNGVGYQPYRVVVLSFELLHAPATVCGPKKSTNLVKNKCVNFNFNGLTGTGVLTESNKKFLPFQQFGRDIADTTDAVRDPQTLEILDITPCSFGGVSVITPGTNTSNQVAVLYQGVNCTEVPVAIHADQLTPTWRVYSTGSNVFQTRAGCLIGAEHVNNSYECDIPIGAGICASYQTQTNSPRRARSVASQSIIAYTMSLGAENSVAYSNNSIAICTNFTISVTTEILPVSMTKTSVDCTMYICGDSTECSNLLLQYGSFCTQLNRALTGIAVEQDKNTQEVFAQVKQIYKTPPIKDFGGFNFSQILPDPSKPSKRSFIEDLLFNKVTLADAGFIKQYGDCLGDIAARDLICAQKFNGLTVLPPLLTDEMIAQYTSALLAGTITSGWTFGAGAALQIPFAMQMAYRFNGIGVTQNVLYENQKLIANQFNSAIGKIQDSLSSTASALGKLQDVVNQNAQALNTLVKQLSSNFGAISSVLNDILSRLDKVEAEVQIDRLITGRLQSLQTYVTQQLIRAAEIRASANLAATKMSECVLGQSKRVDFCGKGYHLMSFPQSAPHGVVFLHVTYVCAQEKNFTTAPAICHDGKAHFPREGVFVSNGTHWFVTQRNFYEPQIITTDNTFVSGNCDVVIGIVNNTVYDPLQPELDSGGGGSDIDPYKEFGSSYQLLNFLPLDFFPDLNALVDTATALYEEELTGREHCSPHHTAIRQALVCWDELTKLIAWMSSNITSEQVRTIIVNHVNDTWGLKVRQSLWFHLSCLTFGQHTVQEFLVSFGVWIRTPAPYRPPNAPILSTLPEHTVIC

SEQ ID NO: 11161 - protein, 1301 aa, Artificial Sequence
  SARS-CoV-2/Netherlands/ZuidHolland_2/2020__EPI_ISL_414556 spike protein (1-1147)(P715C_P1069C) WhcAg construct
MFVFLVLLPLVSSQCVNLTTRTQLPPAYTNSFTRGVYYPDKVFRSSVLHSTQDLFLPFFSNVTWFHAIHVSGTNGTKRFDNPVLPFNDGVYFASTEKSNIIRGWIFGTTLDSKTQSLLIVNNATNVVIKVCEFQFCNDPFLGVYYHKNNKSWMESEFRVYSSANNCTFEYVSQPFLMDLEGKQGNFKNLREFVFKNIDGYFKIYSKHTPINLVRDLPQGFSALEPLVDLPIGINITRFQTLLALHRSYLTPGDSSSGWTAGAAAYYVGYLQPRTFLLKYNENGTITDAVDCALDPLSETKCTLKSFTVEKGIYQTSNFRVQPTESIVRFPNITNLCPFGEVFNATRFASVYAWNRKRISNCVADYSVLYNSASFSTFKCYGVSPTKLNDLCFTNVYADSFVIRGDEVRQIAPGQTGKIADYNYKLPDDFTGCVIAWNSNNLDSKVGGNYNYLYRLFRKSNLKPFERDISTEIYQAGSTPCNGVEGFNCYFPLQSYGFQPTNGVGYQPYRVVVLSFELLHAPATVCGPKKSTNLVKNKCVNFNFNGLTGTGVLTESNKKFLPFQQFGRDIADTTDAVRDPQTLEILDITPCSFGGVSVITPGTNTSNQVAVLYQGVNCTEVPVAIHADQLTPTWRVYSTGSNVFQTRAGCLIGAEHVNNSYECDIPIGAGICASYQTQTNSPRRARSVASQSIIAYTMSLGAENSVAYSNNSIAICTNFTISVTTEILPVSMTKTSVDCTMYICGDSTECSNLLLQYGSFCTQLNRALTGIALEQDKNTQEVFAQVKQIYKTPPIKDFGGFNFSQILPDPSKPSKRSFIEDLLFNKVTLADAGFIKQYGDCLGDIAARDLICAQKFNGLTVLPPLLTDEMIAQYTSALLAGTITSGWTFGAGAALQIPFAMQMAYRFNGIGVTQNVLYENQKLIANQFNSAIGKIQDSLSSTASALGKLQDVVNQNAQALNTLVKQLSSNFGAISSVLNDILSRLDKVEAEVQIDRLITGRLQSLQTYVTQQLIRAAEIRASANLAATKMSECVLGQSKRVDFCGKGYHLMSFPQSAPHGVVFLHVTYVCAQEKNFTTAPAICHDGKAHFPREGVFVSNGTHWFVTQRNFYEPQIITTDNTFVSGNCDVVIGIVNNTVYDPLQPELDSGGGGSDIDPYKEFGSSYQLLNFLPLDFFPDLNALVDTATALYEEELTGREHCSPHHTAIRQALVCWDELTKLIAWMSSNITSEQVRTIIVNHVNDTWGLKVRQSLWFHLSCLTFGQHTVQEFLVSFGVWIRTPAPYRPPNAPILSTLPEHTVIC

SEQ ID NO: 11162 - protein, 1301 aa, Artificial Sequence
  SARS-CoV-2/USA/WA-UW31/2020__EPI_ISL_414618 spike protein (1-1147)(P715C_P1069C) WhcAg construct
MFVFLVLLPLVSSQCVNLTTRTQLPPAYTNSFTRGVYYPDKVFRSSVLHSTQDLFLPFFSNVTWFHAIHVSGTNGTKRFDNPVLPFNDGVYFASTEKSNIIRGWIFGTTLDSKTQSLLIVNNATNVVIKVCEFQFCNDPFLGVYYHKNNKSWMESEFRVYSSANNCTFEYVSQPFLMDLEGKQGNFKNLREFVFKNIDGYFKIYSKHTPINLVRDLPQGFSALEPLVDLPIGINITRFQTLLALHRSYLTPGDSSSGWTAGAAAYYVGYLQPRTFLLKYNENGTITDAVDCALDPLSETKCTLKSFTVEKGIYQTSNFRVQPTESIVRFPNITNLCPFGEVFNATRFASVYAWNRKRISNCVADYSVLYNSASFSTFKCYGVSPTKLNDLCFTNVYADSFVIRGDEVRQIAPGQTGKIADYNYKLPDDFTGCVIAWNSNNLDSKVGGNYNYLYRLFRKSNLKPFERDISTEIYQAGSTPCNGAEGFNCYFPLQSYGFQPTNGVGYQPYRVVVLSFELLHAPATVCGPKKSTNLVKNKCVNFNFNGLTGTGVLTESNKKFLPFQQFGRDIADTTDAVRDPQTLEILDITPCSFGGVSVITPGTNTSNQVAVLYQDVNCTEVPVAIHADQLTPTWRVYSTGSNVFQTRAGCLIGAEHVNNSYECDIPIGAGICASYQTQTNSPRRARSVASQSIIAYTMSLGAENSVAYSNNSIAICTNFTISVTTEILPVSMTKTSVDCTMYICGDSTECSNLLLQYGSFCTQLNRALTGIAVEQDKNTQEVFAQVKQIYKTPPIKDFGGFNFSQILPDPSKPSKRSFIEDLLFNKVTLADAGFIKQYGDCLGDIAARDLICAQKFNGLTVLPPLLTDEMIAQYTSALLAGTITSGWTFGAGAALQIPFAMQMAYRFNGIGVTQNVLYENQKLIANQFNSAIGKIQDSLSSTASALGKLQDVVNQNAQALNTLVKQLSSNFGAISSVLNDILSRLDKVEAEVQIDRLITGRLQSLQTYVTQQLIRAAEIRASANLAATKMSECVLGQSKRVDFCGKGYHLMSFPQSAPHGVVFLHVTYVCAQEKNFTTAPAICHDGKAHFPREGVFVSNGTHWFVTQRNFYEPQIITTDNTFVSGNCDVVIGIVNNTVYDPLQPELDSGGGGSDIDPYKEFGSSYQLLNFLPLDFFPDLNALVDTATALYEEELTGREHCSPHHTAIRQALVCWDELTKLIAWMSSNITSEQVRTIIVNHVNDTWGLKVRQSLWFHLSCLTFGQHTVQEFLVSFGVWIRTPAPYRPPNAPILSTLPEHTVIC

SEQ ID NO: 11163 - protein, 1301 aa, Artificial Sequence
  SARS-CoV-2/South Korea/SNU01/2020__EPI_ISL_411929 spike protein (1-1147)(P715C_P1069C) WhcAg construct
MFVFLVLLPLVSSQCVNLTTRTQLPPAYTNSFTRGVYYPDKVFRSSVLHSTQDLFLPFFSNVTWFHAIHVSGTNGTKRFDNPVLPFNDGVYFASTEKSNIIRGWIFGTTLDSKTQSLLIVNNATNVVIKVCEFQFCNDPFLGVYYHKNNKSWMESEFRVYSSANNCTFEYVSQPFLMDLEGKQGNFKNLREFVFKNIDGYFKIYSKHTPINLVRDLPQGFWALEPLVDLPIGINITRFQTLLALHRSYLTPGDSSSGWTAGAAAYYVGYLQPRTFLLKYNENGTITDAVDCALDPLSETKCTLKSFTVEKGIYQTSNFRVQPTESIVRFPNITNLCPFGEVFNATRFASVYAWNRKRISNCVADYSVLYNSASFSTFKCYGVSPTKLNDLCFTNVYADSFVIRGDEVRQIAPGQTGKIADYNYKLPDDFTGCVIAWNSNNLDSKVGGNYNYLYRLFRKSNLKPFERDISTEIYQAGSTPCNGVEGFNCYFPLQSYGFQPTNGVGYQPYRVVVLSFELLHAPATVCGPKKSTNLVKNKCVNFNFNGLTGTGVLTESNKKFLPFQQFGRDIADTTDAVRDPQTLEILDITPCSFGGVSVITPGTNTSNQVAVLYQDVNCTEVPVAIHADQLTPTWRVYSTGSNVFQTRAGCLIGAEHVNNSYECDIPIGAGICASYQTQTNSPRRARSVASQSIIAYTMSLGAENSVAYSNNSIAICTNFTISVTTEILPVSMTKTSVDCTMYICGDSTECSNLLLQYGSFCTQLNRALTGIAVEQDKNTQEVFAQVKQIYKTPPIKDFGGFNFSQILPDPSKPSKRSFIEDLLFNKVTLADAGFIKQYGDCLGDIAARDLICAQKFNGLTVLPPLLTDEMIAQYTSALLAGTITSGWTFGAGAALQIPFAMQMAYRFNGIGVTQNVLYENQKLIANQFNSAIGKIQDSLSSTASALGKLQDVVNQNAQALNTLVKQLSSNFGAISSVLNDILSRLDKVEAEVQIDRLITGRLQSLQTYVTQQLIRAAEIRASANLAATKMSECVLGQSKRVDFCGKGYHLMSFPQSAPHGVVFLHVTYVCAQEKNFTTAPAICHDGKAHFPREGVFVSNGTHWFVTQRNFYEPQIITTDNTFVSGNCDVVIGIVNNTVYDPLQPELDSGGGGSDIDPYKEFGSSYQLLNFLPLDFFPDLNALVDTATALYEEELTGREHCSPHHTAIRQALVCWDELTKLIAWMSSNITSEQVRTIIVNHVNDTWGLKVRQSLWFHLSCLTFGQHTVQEFLVSFGVWIRTPAPYRPPNAPILSTLPEHTVIC

SEQ ID NO: 11164 - protein, 1301 aa, Artificial Sequence
  SARS-CoV-2/China/WF0004/2020__EPI_ISL_413694 spike protein (1-1147)(P715C_P1069C) WhcAg construct
MFVFLVLLPLVSSQCVNLTTRTQLPPAYTNSFTRGVYYPDKVFRSSVLHSTQDLFLPFFSNVTWFHAIHVSGTNGTKRFDNPVLPFNDGVYFASTEKSNIIRGWIFGTTLDSKTQSLLIVNNATNVVIKVCEFQFCNDPFLGVYYHKNNKSWTESEFRVYSSANNCTFEYVSQPFLMDLEGKQGNFKNLREFVFKNIDGYFKIYSKHTPINLVRDLPQGFSALEPLVDLPIGINITRFQTLLALHRSYLTPGDSSSGWTAGAAAYYVGYLQPRTFLLKYNENGTITDAVDCALDPLSETKCTLKSFTVEKGIYQTSNFRVQPTESIVRFPNITNLCPFGEVFNATRFASVYAWNRKRISNCVADYSVLYNSASFSTFKCYGVSPTKLNDLCFTNVYADSFVIRGDEVRQIAPGQTGKIADYNYKLPDDFTGCVIAWNSNNLDSKVGGNYNYLYRLFRKSNLKPFERDISTEIYQAGSTPCNGVEGFNCYFPLQSYGFQPTNGVGYQPYRVVVLSFELLHAPATVCGPKKSTNLVKNKCVNFNFNGLTGTGVLTESNKKFLPFQQFGRDIADTTDAVRDPQTLEILDITPCSFGGVSVITPGTNTSNQVAVLYQDVNCTEVPVAIHADQLTPTWRVYSTGSNVFQTRAGCLIGAEHVNNSYECDIPIGAGICASYQTQTNSPRRARSVASQSIIAYTMSLGAENSVAYSNNSIAICTNFTISVTTEILPVSMTKTSVDCTMYICGDSTECSNLLLQYGSFCTQLNRALTGIAVEQDKNTQEVFAQVKQIYKTPPIKDFGGFNFSQILPDPSKPSKRSFIEDLLFNKVTLADAGFIKQYGDCLGDIAARDLICAQKFNGLTVLPPLLTDEMIAQYTSALLAGTITSGWTFGAGAALQIPFAMQMAYRFNGIGVTQNVLYENQKLIANQFNSAIGKIQDSLSSTASALGKLQDVVNQNAQALNTLVKQLSSNFGAISSVLNDILSRLDKVEAEVQIDRLITGRLQSLQTYVTQQLIRAAEIRASANLAATKMSECVLGQSKRFDFCGKGYHLMSFPQSAPHGVVFLHVTYVCAQEKNFTTAPAICHDGKAHFPREGVFVSNGTHWFVTQRNFYEPQIITTDNTFVSGNCDVVIGIVNNTVYDPLQPELDSGGGGSDIDPYKEFGSSYQLLNFLPLDFFPDLNALVDTATALYEEELTGREHCSPHHTAIRQALVCWDELTKLIAWMSSNITSEQVRTIIVNHVNDTWGLKVRQSLWFHLSCLTFGQHTVQEFLVSFGVWIRTPAPYRPPNAPILSTLPEHTVIC

SEQ ID NO: 11165 - protein, 1301 aa, Artificial Sequence
  SARS-CoV-2/China/WF0028/2020__EPI_ISL_413791 spike protein (1-1147)(P715C_P1069C) WhcAg construct
MFVFLVLLPLVSSQCVNLTTRTQLPPAYTNSFTRGVYYPDKVFRSSVLHSTQDLFLPFFSNVTWFHAIHVSGTNGTKRFDNPVLPFNDGVYFASTEKSNIIRGWIFGTTLDSKTQSLLIVNNATNVVIKVCEFQFCNDPFLGVYYHKNNKSWMESEFRVYSSANNCTFEYVSQPFLMDLEGKQGNFKNLREFVFKNIDGYFKIYSKHTPINLVRDLPQGFSALEPLVDLPIGINITRFQTLLALHRSYLTPGDSSSGWTAGAAAYYVGYLQPRTFLLKYNENGTITDAVDCALDPLSETKCTLKSFTVEKGIYQTSNFRVQPTESIVRFPNITNLCPFGEVFNATRFASVYAWNRKRISNCVADYSVLYNSASFSTFKCYGVSPTKLNDLCFTNVYADSFVIRGDEVRQIAPGQTGKIADYNYKLPDDFTGCVIAWNSNNLDSKVGGNYNYLYRLFRKSNLKPFERDISTEIYQAGSTPCNGVEGFNCYFPLQSYGFQPTNGVGYQPYRVVVLSFELLHAPATVCGPKKSTNLVKNKCVNFNFNGLTGTGVLTESNKKFLPFQQFGRDIADTTDAVRDPQTLEILDITPCSFGGVSVITPGTNTSNQVAVLYQDVNCTEVPVAIHADQLTPTWRVYSTGSNVFQTRAGCLIGAEHVNNSYECDIPIGAGICASYQTQTNSPRRARSVASQSIIAYTMSLGAENSVAYSNNSIAICTNFTISVTTEILPVSMTKTSVDCTMYICGDSTECSNLLLQYGSFCTQLNRALTGIAVEQDKNTQEVFAQVKQIYKTPPIKDFGGFNFSQILPDPSKPSKRSFIEDLLFNKVTLADAGFIKQYGDCLGDIAARDLICAQKFNGLTVLPPLLTDEMIAQYTSALLAGTITSGWTFGAGAALQIPFAMQMAYRFNGIGVTQNVLYENQKLIANQFNSAIGKIQDSLSSTASALGKLQDVVNQNAQALNTLVKQLSSNFGAISSVLNDILSRLDKVEAEVQIDRLITGRLQSLQTYVTQQLIRAAEIRASANLAATKMSECVLGQSKRVDFCGKGYHLMSFPQSAPHGVVFLHVTYVCAQEKNFTTAPAICHDGKAHFPREGVFVSNGTHWFVTQRNFYEPQIITTDNTFVSGNCDVVIGIVNNTVYDPLQPELESGGGGSDIDPYKEFGSSYQLLNFLPLDFFPDLNALVDTATALYEEELTGREHCSPHHTAIRQALVCWDELTKLIAWMSSNITSEQVRTIIVNHVNDTWGLKVRQSLWFHLSCLTFGQHTVQEFLVSFGVWIRTPAPYRPPNAPILSTLPEHTVIC

SEQ ID NO: 11166 - protein, 1301 aa, Artificial Sequence
  SARS-CoV-2/2019-nCoV/USA-CruiseA-18/2020__MT159716.1 spike protein (1-1147)(P715C_P1069C) WhcAg construct
MFVFLVLLPLVSSQCVNLTTRTQLPPAYTNSFTRGVYYPDKVFRSSVLHSTQDLFLPFFSNVTWFHAIHVSGTNGTKRFDNPVLPFNDGVYFASTEKSNIIRGWIFGTTLDSKTQSLLIVNNATNVVIKVCEFQFCNDPFLGVYYHKNNKSWMESELRVYSSANNCTFEYVSQPFLMDLEGKQGNFKNLREFVFKNIDGYFKIYSKHTPINLVRDLPQGFSALEPLVDLPIGINITRFQTLLALHRSYLTPGDSSSGWTAGAAAYYVGYLQPRTFLLKYNENGTITDAVDCALDPLSETKCTLKSFTVEKGIYQTSNFRVQPTESIVRFPNITNLCPFGEVFNATRFASVYAWNRKRISNCVADYSVLYNSASFSTFKCYGVSPTKLNDLCFTNVYADSFVIRGDEVRQIAPGQTGKIADYNYKLPDDFTGCVIAWNSNNLDSKVGGNYNYLYRLFRKSNLKPFERDISTEIYQAGSTPCNGVEGFNCYFPLQSYGFQPTNGVGYQPYRVVVLSFELLHAPATVCGPKKSTNLVKNKCVNFNFNGLTGTGVLTESNKKFLPFQQFGRDIADTTDAVRDPQTLEILDITPCSFGGVSVITPGTNTSNQVAVLYQDVNCTEVPVAIHADQLTPTWRVYSTGSNVFQTRAGCLIGAEHVNNSYECDIPIGAGICASYQTQTNSPRRARSVASQSIIAYTMSLGAENSVAYSNNSIAICTNFTISVTTEILPVSMTKTSVDCTMYICGDSTECSNLLLQYGSFCTQLNRALTGIAVEQDKNTQEVFAQVKQIYKTPPIKDFGGFNFSQILPDPSKPSKRSFIEDLLFNKVTLADAGFIKQYGDCLGDIAARDLICAQKFNGLTVLPPLLTDEMIAQYTSALLAGTITSGWTFGAGAALQIPFAMQMAYRFNGIGVTQNVLYENQKLIANQFNSAIGKIQDSLSSTASALGKLQDVVNQNAQALNTLVKQLSSNFGAISSVLNDILSRLDKVEAEVQIDRLITGRLQSLQTYVTQQLIRAAEIRASANLAATKMSECVLGQSKRVDFCGKGYHLMSFPQSAPHGVVFLHVTYVCAQEKNFTTAPAICHDGKAHFPREGVFVSNGTHWFVTQRNFYEPQIITTDNTFVSGNCDVVIGIVNNTVYDPLQPELDSGGGGSDIDPYKEFGSSYQLLNFLPLDFFPDLNALVDTATALYEEELTGREHCSPHHTAIRQALVCWDELTKLIAWMSSNITSEQVRTIIVNHVNDTWGLKVRQSLWFHLSCLTFGQHTVQEFLVSFGVWIRTPAPYRPPNAPILSTLPEHTVIC

SEQ ID NO: 11167 - protein, 1301 aa, Artificial Sequence
  SARS-CoV-2/SARS-CoV-2/Yunnan-01/human/2020/CHN__MT049951.1 spike protein (1-1147)(P715C_P1069C) WhcAg construct
MFVFLVLLPLVSSQCVNLTTRTQLPPANTNSFTRGVYYPDKVFRSSVLHSTQDLFLPFFSNVTWFHAIHVSGTNGTKRFDNPVLPFNDGVYFASTEKSNIIRGWIFGTTLDSKTQSLLIVNNATNVVIKVCEFQFCNDPFLGVYYHKNNKSWMESEFRVYSSANNCTFEYVSQPFLMDLEGKQGNFKNLREFVFKNIDGYFKIYSKHTPINLVRDLPQGFSALEPLVDLPIGINITRFQTLLALHRSYLTPGDSSSGWTAGAAAYYVGYLQPRTFLLKYNENGTITDAVDCALDPLSETKCTLKSFTVEKGIYQTSNFRVQPTESIVRFPNITNLCPFGEVFNATRFASVYAWNRKRISNCVADYSVLYNSASFSTFKCYGVSPTKLNDLCFTNVYADSFVIRGDEVRQIAPGQTGKIADYNYKLPDDFTGCVIAWNSNNLDSKVGGNYNYLYRLFRKSNLKPFERDISTEIYQAGSTPCNGVEGFNCYFPLQSYGFQPTNGVGYQPYRVVVLSFELLHAPATVCGPKKSTNLVKNKCVNFNFNGLTGTGVLTESNKKFLPFQQFGRDIADTTDAVRDPQTLEILDITPCSFGGVSVITPGTNTSNQVAVLYQDVNCTEVPVAIHADQLTPTWRVYSTGSNVFQTRAGCLIGAEHVNNSYECDIPIGAGICASYQTQTNSPRRARSVASQSIIAYTMSLGAENSVAYSNNSIAICTNFTISVTTEILPVSMTKTSVDCTMYICGDSTECSNLLLQYGSFCTQLNRALTGIAVEQDKNTQEVFAQVKQIYKTPPIKDFGGFNFSQILPDPSKPSKRSFIEDLLFNKVTLADAGFIKQYGDCLGDIAARDLICAQKFNGLTVLPPLLTDEMIAQYTSALLAGTITSGWTFGAGAALQIPFAMQMAYRFNGIGVTQNVLYENQKLIANQFNSAIGKIQDSLSSTASALGKLQDVVNQNAQALNTLVKQLSSNFGAISSVLNDILSRLDKVEAEVQIDRLITGRLQSLQTYVTQQLIRAAEIRASANLAATKMSECVLGQSKRVDFCGKGYHLMSFPQSAPHGVVFLHVTYVCAQEKNFTTAPAICHDGKAHFPREGVFVSNGTHWFVTQRNFYEPQIITTDNTFVSGNCDVVIGIVNNTVYDPLQPELDSGGGGSDIDPYKEFGSSYQLLNFLPLDFFPDLNALVDTATALYEEELTGREHCSPHHTAIRQALVCWDELTKLIAWMSSNITSEQVRTIIVNHVNDTWGLKVRQSLWFHLSCLTFGQHTVQEFLVSFGVWIRTPAPYRPPNAPILSTLPEHTVIC

SEQ ID NO: 11168 - protein, 1301 aa, Artificial Sequence
  SARS-CoV-2/USA/WA-UW292/2020__EPI_ISL_418077 spike protein (1-1147)(P715C_P1069C) WhcAg construct
MFVFLVLLPLVSSQCVNLTTRTQLPPAYTNSFTRGVYYPDKVFRSSVLHSTQDLFLPFFSNVTWFHAIHVSGTNGTKRFDNPVLPFNDGVYFASTEKSNIIRGWIFGTTLDSKTQSLLIVNNATNVVIKVCEFQFCNDPFLGVYYHKNNKSWMESEFRVYSSANNCTFEYVSQPFLMDLEGKQGNFKNLREFVFKNIDGYFKIYSKHTPINLVRDLPQGFSALEPLVDLPIGINITRFQTLLALHRSYLTPGDSSSGWTAGAAAYYVGYLQPRTFLLKYNENGTITDAVDCALDPLSETKCTLKSFTVEKGIYQTSNFRVQPTESIVRFPNITNLCPFGEVFNATRFASVYAWNRKRISNCVADYSVLYNSASFSTFKCYGVSPTKLNDLCFTNVYADSFVIRGDEVRQIAPGQTGKIADYNYKLPDDFTGCVIAWNSNNLDSKVGGNYNYLYRLFRKSNLKPFERDISTEIYQASSTPCNGVEGFNCYFPLQSYGFQPTNGVGYQPYRVVVLSFELLHAPATVCGPKKSTNLVKNKCVNFNFNGLTGTGVLTESNKKFLPFQQFGRDIADTTDAVRDPQTLEILDITPCSFGGVSVITPGTNTSNQVAVLYQDVNCTEVPVAIHADQLTPTWRVYSTGSNVFQTRAGCLIGAEHVNNSYECDIPIGAGICASYQTQTNSPRRARSVASQSIIAYTMSLGAENSVAYSNNSIAICTNFTISVTTEILPVSMTKTSVDCTMYICGDSTECSNLLLQYGSFCTQLNRALTGIAVEQDKNTQEVFAQVKQIYKTPPIKDFGGFNFSQILPDPSKPSKRSFIEDLLFNKVTLADAGFIKQYGDCLGDIAARDLICAQKFNGLTVLPPLLTDEMIAQYTSALLAGTITSGWTFGAGAALQIPFAMQMAYRFNGIGVTQNVLYENQKLIANQFNSAIGKIQDSLSSTASALGKLQDVVNQNAQALNTLVKQLSSNFGAISSVLNDILSRLDKVEAEVQIDRLITGRLQSLQTYVTQQLIRAAEIRASANLAATKMSECVLGQSKRVDFCGKGYHLMSFPQSAPHGVVFLHVTYVCAQEKNFTTAPAICHDGKAHFPREGVFVSNGTHWFVTQRNFYEPQIITTDNTFVSGNCDVVIGIVNNTVYDPLQPELDSGGGGSDIDPYKEFGSSYQLLNFLPLDFFPDLNALVDTATALYEEELTGREHCSPHHTAIRQALVCWDELTKLIAWMSSNITSEQVRTIIVNHVNDTWGLKVRQSLWFHLSCLTFGQHTVQEFLVSFGVWIRTPAPYRPPNAPILSTLPEHTVIC

SEQ ID NO: 11169 - protein, 1301 aa, Artificial Sequence
  SARS-CoV-2/Iceland/192/2020__EPI_ISL_417819 spike protein (1-1147)(P715C_P1069C) WhcAg construct
MFVFFVLLPLVSSQCVNLTTRTQLPPAYTNSFTRGVYYPDKVFRSSVLHSTQDLFLPFFSNVTWFHAIHVSGTNGTKRFDNPVLPFNDGVYFASTEKSNIIRGWIFGTTLDSKTQSLLIVNNATNVVIKVCEFQFCNDPFLGVYYHKNNKSWMESEFRVYSSANNCTFEYVSQPFLMDLEGKQGNFKNLREFVFKNIDGYFKIYSKHTPINLVRDLPQGFSALEPLVDLPIGINITRFQTLLALHRSYLTPGDSSSGWTAGAAAYYVGYLQPRTFLLKYNENGTITDAVDCALDPLSETKCTLKSFTVEKGIYQTSNFRVQPTESIVRFPNITNLCPFGEVFNATRFASVYAWNRKRISNCVADYSVLYNSASFSTFKCYGVSPTKLNDLCFTNVYADSFVIRGDEVRQIAPGQTGKIADYNYKLPDDFTGCVIAWNSNNLDSKVGGNYNYLYRLFRKSNLKPFERDISTEIYQAGSTPCNGVEGFNCYFPLQSYGFQPTNGVGYQPYRVVVLSFELLHAPATVCGPKKSTNLVKNKCVNFNFNGLTGTGVLTESNKKFLPFQQFGRDIADTTDAVRDPQTLEILDITPCSFGGVSVITPGTNTSNQVAVLYQGVNCTEVPVAIHADQLTPTWRVYSTGSNVFQTRAGCLIGAEHVNNSYECDIPIGAGICASYQTQTNSPRRARSVASQSIIAYTMSLGAENSVAYSNNSIAICTNFTISVTTEILPVSMTKTSVDCTMYICGDSTECSNLLLQYGSFCTQLNRALTGIAVEQDKNTQEVFAQVKQIYKTPPIKDFGGFNFSQILPDPSKPSKRSFIEDLLFNKVTLADAGFIKQYGDCLGDIAARDLICAQKFNGLTVLPPLLTDEMIAQYTSALLAGTITSGWTFGAGAALQIPFAMQMAYRFNGIGVTQNVLYENQKLIANQFNSAIGKIQDSLSSTASALGKLQDVVNQNAQALNTLVKQLSSNFGAISSVLNDILSRLDKVEAEVQIDRLITGRLQSLQTYVTQQLIRAAEIRASANLAATKMSECVLGQSKRVDFCGKGYHLMSFPQSAPHGVVFLHVTYVCAQEKNFTTAPAICHDGKAHFPREGVFVSNGTHWFVTQRNFYEPQIITTDNTFVSGNCDVVIGIVNNTVYDPLQPELDSGGGGSDIDPYKEFGSSYQLLNFLPLDFFPDLNALVDTATALYEEELTGREHCSPHHTAIRQALVCWDELTKLIAWMSSNITSEQVRTIIVNHVNDTWGLKVRQSLWFHLSCLTFGQHTVQEFLVSFGVWIRTPAPYRPPNAPILSTLPEHTVIC

SEQ ID NO: 11170 - protein, 1301 aa, Artificial Sequence
  SARS-CoV-2/Belgium/ULG-6939/2020__EPI_ISL_417020 spike protein (1-1147)(P715C_P1069C) WhcAg construct
MFVFLVLLPLVSSQCVNLTTRTQLPPAYTNSFTRGVYYPDKVFRSSVLHSTQDLFLPFFSNVTWFHAIHVSGTNGTKRFDNPVLPFNDGVYFASTEKSNIIRGWIFGTTLDSKTQSLLIVNNATNVVIKVCEFQFCNDPFLGVYYHKNNKSWMESEFRVYSSANNCTFEYVSQPFLMDLEGKQGNFKNLREFVFKNIDGYFKIYSKHTPINLVRDLPQGFSALEPLVDLPIGINITRFQTLLALHRSYLTPGDSSSGWTAGAAAYYVGYLQPRTFLLKYNENGTITDAVDCALDPLSETKCTLKSFTVEKGIYQTSNFRVQPTESIVRFPNITNLCPFGEVFNATRFASVYAWNRKRISNCVADYSVLYNSASFSTFKCYGVSPTKLNDLCFTNVYADSFVIRGDEVRQIAPGQTGKIADYNYKLPDDFTGCVIAWNSNNLDSKVGGNYNYLYRLFRKSNLKPFERDISTEIYQAGSTPCNGVEGFNCYFPLQSYGFQPTNGVGYQPYRVVVLSFELLHAPATVCGPKKSTNLVKNKCVNFNFNGLTGTGVLTESNKKFLPFQQFGRDIADTTDAVRDPQTLEILDITPCSFGGVSVITPGTNTSNQVAVLYQGVNCTEVPVAIHADQLTPTWRVYSTGSNVFQTRAGCLIGAEHVNNSYECDIPIGAGICASYQTQTNSPRRARSVASQSIIAYTMSLGAENSVVYSNNSIAICTNFTISVTTEILPVSMTKTSVDCTMYICGDSTECSNLLLQYGSFCTQLNRALTGIAVEQDKNTQEVFAQVKQIYKTPPIKDFGGFNFSQILPDPSKPSKRSFIEDLLFNKVTLADAGFIKQYGDCLGDIAARDLICAQKFNGLTVLPPLLTDEMIAQYTSALLAGTITSGWTFGAGAALQIPFAMQMAYRFNGIGVTQNVLYENQKLIANQFNSAIGKIQDSLSSTASALGKLQDVVNQNAQALNTLVKQLSSNFGAISSVLNDILSRLDKVEAEVQIDRLITGRLQSLQTYVTQQLIRAAEIRASANLAATKMSECVLGQSKRVDFCGKGYHLMSFPQSAPHGVVFLHVTYVCAQEKNFTTAPAICHDGKAHFPREGVFVSNGTHWFVTQRNFYEPQIITTDNTFVSGNCDVVIGIVNNTVYDPLQPELDSGGGGSDIDPYKEFGSSYQLLNFLPLDFFPDLNALVDTATALYEEELTGREHCSPHHTAIRQALVCWDELTKLIAWMSSNITSEQVRTIIVNHVNDTWGLKVRQSLWFHLSCLTFGQHTVQEFLVSFGVWIRTPAPYRPPNAPILSTLPEHTVIC

SEQ ID NO: 11171 - protein, 1301 aa, Artificial Sequence
  SARS-CoV-2/France/HF2496/2020__EPI_ISL_418231 spike protein (1-1147)(P715C_P1069C) WhcAg construct
MFVFLVLLPLVSSQCVNLTTRTQLPPAYTNSFTRGVYYPDKVFRSSVLHSTQDLFLPFFSNVTWFHAIHVSGTNGTKRFDNPVLPFNDGVYFASTEKSNIIRGWIFGTTLDSKTQSLLIVNNATNVVIKVCEFQFCNDPFLGVYYHKNNKSWMESEFRVYSSANNCTFEYVSQPFLMDLEGKQGNFKNLREFVFKNIDGYFKIYSKHTPINLVRDLPQGFSALEPLVDLPIGINITRFQTLLALHRSYLTPGDSSSGWTAGAAAYYVGYLQPRTFLLKYNENGTITDAVDCALDPLSETKCTLKSFTVEKGIYQTSNFRVQPTESIVRFPNITNLCPFGEVFNATRFASVYAWNRKRISNCVADYSVLYNSASFSTFKCYGVSPTKLNDLCFTNVYADSFVIRGDEVRQIAPGQTGKIADYNYKLPDDFTGCVIAWNSNNLDSKVGGNYNYLYRLFRKSNLKPFERDISTEIYQAGSTPCNGVEGFNCYFPLQSYGFQPTNGVGYQPYRVVVLSFELLHAPATVCGPKKSTNLVKNKCVNFNFNGLTGTGVLTESNKKFLPFQQFGRDIADTTDAVRDPQTLEILDITPCSFGGVSVITPGTNTSNQVAVLYQGVNCTEVPVAIHADQLTPTWRVYSTGSNVFQTRAGCLIGAEHVNNSYECDIPIGAGICASYQTQTNSPRRARSVASQSIIAYTMSLGAENSVAYSNNSIAICTNFTISVTTEILPVSMTKTSVDCTMYICGDSTECSNLLLQYGSFCTQLNRALTGIAVEQDKNTQEVFAQVKQIYKTPPIKDFGGFNFSQILPDPSKPSKRSFIEDLLFNKVTLADAGFIKQYGDCLGDIVARDLICAQKFNGLTVLPPLLTDEMIAQYTSALLAGTITSGWTFGAGAALQIPFAMQMAYRFNGIGVTQNVLYENQKLIANQFNSAIGKIQDSLSSTASALGKLQDVVNQNAQALNTLVKQLSSNFGAISSVLNDILSRLDKVEAEVQIDRLITGRLQSLQTYVTQQLIRAAEIRASANLAATKMSECVLGQSKRVDFCGKGYHLMSFPQSAPHGVVFLHVTYVCAQEKNFTTAPAICHDGKAHFPREGVFVSNGTHWFVTQRNFYEPQIITTDNTFVSGNCDVVIGIVNNTVYDPLQPELDSGGGGSDIDPYKEFGSSYQLLNFLPLDFFPDLNALVDTATALYEEELTGREHCSPHHTAIRQALVCWDELTKLIAWMSSNITSEQVRTIIVNHVNDTWGLKVRQSLWFHLSCLTFGQHTVQEFLVSFGVWIRTPAPYRPPNAPILSTLPEHTVIC

SEQ ID NO: 11172 - protein, 1301 aa, Artificial Sequence
  SARS-CoV-2/USA/WA-UW291/2020__EPI_ISL_418076 spike protein (1-1147)(P715C_P1069C) WhcAg construct
MFVFLVLLPLVSSQCVNLTTRTQLPPAYTNSFTRGVYYPDKVFRSSVLHSTQDLFLPFFSNVTWFHAIHVSGTNGTKRFDNPVLPFNDGVYFASTEKSNIIRGWIFGTTLDSKTQSLLIVNNATNVVIKVCEFQFCNDPFLGVYYHKNNKSWMESEFRVYSSANNCTFEYVSQPFLMDLEGKQGNFKNLREFVFKNIDGYFKIYSKHTPINLVRDLPQGFSALEPLVDLPIGINITRFQTLLALHRSYLTPGDSSSGWTAGAAAYYVGYLQPRTFLLKYNENGTITDAVDCALDPLSETKCTLKSFTVEKGIYQTSNFRVQPTESIVRFPNITNLCPFGEVFNATRFASVYAWNRKRISNCVADYSVLYNSASFSTFKCYGVSPTKLNDLCFTNVYADSFVIRGDEVRQIAPGQTGKIADYNYKLPDDFTGCVIAWNSNNLDSKVGGNYNYLYRLFRKSNLKPFERDISTEIYQAGSTPCNGVEGFNCYFPLQSYGFQPTNGVGYQPYRVVVLSFELLHAPATVCGPKKSTNLVKNKCVNFNFNGLTGTGVLTESNKKFLPFQQFGRDIADTTDAVRDPQTLEILDITPCSFGGVSVITPGTNTSNQVAVLYQGVNCTEVPVAIHADQLTPTWRVYSTGSNVFQTRAGCLIGAEHVNNSYECDIPIGAGICASYQTQTNSPRRARSVASQSIIAYTMSLGAENSVAYSNNSIAICTNFTISVTTEILPVSMTKTSVDCTMYICGDSTECSNLLLQYGSFCTQLNRALTGIAVEQDKNTQEVFAQVKQIYKTPPIKDFGGFNFSQILPDPSKPSKRSFIEDLLFNKVTLADAGFIKQYGDCLGDIAARDLICAQKFNGLTVLPPLLTDEMIAQYTSALLAGTITSGWTFGAGAALQIPFAMQMAYRFNGIGVTQNVLYENQKLIANQFNSAIGKIQYSLSSTASALGKLQDVVNQNAQALNTLVKQLSSNFGAISSVLNDILSRLDKVEAEVQIDRLITGRLQSLQTYVTQQLIRAAEIRASANLAATKMSECVLGQSKRVDFCGKGYHLMSFPQSAPHGVVFLHVTYVCAQEKNFTTAPAICHDGKAHFPREGVFVSNGTHWFVTQRNFYEPQIITTDNTFVSGNCDVVIGIVNNTVYDPLQPELDSGGGGSDIDPYKEFGSSYQLLNFLPLDFFPDLNALVDTATALYEEELTGREHCSPHHTAIRQALVCWDELTKLIAWMSSNITSEQVRTIIVNHVNDTWGLKVRQSLWFHLSCLTFGQHTVQEFLVSFGVWIRTPAPYRPPNAPILSTLPEHTVIC

SEQ ID NO: 11173 - protein, 1301 aa, Artificial Sequence; identical to SEQ ID NO: 11136
  SARS-CoV-2/Portugal/PT0034/2020__EPI_ISL_418019 spike protein (1-1147)(P715C_P1069C) WhcAg construct

SEQ ID NO: 11174 - protein, 1301 aa, Artificial Sequence; identical to SEQ ID NO: 11128
  SARS-CoV-2/Iceland/202/2020__EPI_ISL_417750 spike protein (1-1147)(P715C_P1069C) WhcAg construct

SEQ ID NO: 11175 - protein, 1301 aa, Artificial Sequence
  SARS-CoV-2/USA/WA-UW261/2020__EPI_ISL_418046 spike protein (1-1147)(P715C_P1069C) WhcAg construct
MFVFLVLLPLVSSQCVNLTTRTQLPPAYTNSFTRGVYYPDKVFRSSVLHSTQDLFLPFFSNVTWFHAIHVSGTNGTKRFDNPVLPFNDGVYFASTEKSNIIRGWIFGTTLDSKTQSLLIVNNATNVVIKVCEFQFCNDPFLGVYYHKNNKSWMESEFRVYSSANNCTFEYVSQPFLMDLEGKQGNFKNLREFVFKNIDGYFKIYSKHTPINLVRDLPQGFSALEPLVDLPIGINITRFQTLLALHRSYLTPGDSSSGWTAGAAAYYVGYLQPRTFLLKYNENGTITDAVDCALDPLSETKCTLKSFTVEKGIYQTSNFRVQPTESIVRFPNITNLCPFGEVFNATRFTSVYAWNRKRISNCVADYSVLYNSASFSTFKCYGVSPTKLNDLCFTNVYADSFVIRGDEVRQIAPGQTGKIADYNYKLPDDFTGCVIAWNSNNLDSKVGGNYNYLYRLFRKSNLKPFERDISTEIYQAGSTPCNGVEGFNCYFPLQSYGFQPTNGVGYQPYRVVVLSFELLHAPATVCGPKKSTNLVKNKCVNFNFNGLTGTGVLTESNKKFLPFQQFGRDIADTTDAVRDPQTLEILDITPCSFGGVSVITPGTNTSNQVAVLYQDVNCTEVPVAIHADQLTPTWRVYSTGSNVFQTRAGCLIGAEHVNNSYECDIPIGAGICASYQTQTNSPRRARSVASQSIIAYTMSLGAENSVAYSNNSIAICTNFTISVTTEILPVSMTKTSVDCTMYICGDSTECSNLLLQYGSFCTQLNRALTGIAVEQDKNTQEVFAQVKQIYKTPPIKDFGGFNFSQILPDPSKPSKRSFIEDLLFNKVTLADAGFIKQYGDCLGDIAARDLICAQKFNGLTVLPPLLTDEMIAQYTSALLAGTITSGWTFGAGAALQIPFAMQMAYRFNGIGVTQNVLYENQKLIANQFNSAIGKIQDSLSSTASALGKLQDVVNQNAQALNTLVKQLSSNFGAISSVLNDILSRLDKVEAEVQIDRLITGRLQSLQTYVTQQLIRAAEIRASANLAATKMSECVLGQSKRVDFCGKGYHLMSFPQSAPHGVVFLHVTYVCAQEKNFTTAPAICHDGKAHFPREGVFVSNGTHWFVTQRNFYEPQIITTDNTFVSGNCDVVIGIVNNTVYDPLQPELDSGGGGSDIDPYKEFGSSYQLLNFLPLDFFPDLNALVDTATALYEEELTGREHCSPHHTAIRQALVCWDELTKLIAWMSSNITSEQVRTIIVNHVNDTWGLKVRQSLWFHLSCLTFGQHTVQEFLVSFGVWIRTPAPYRPPNAPILSTLPEHTVIC

SEQ ID NO: 11176 - protein, 1301 aa, Artificial Sequence
  SARS-CoV-2/Portugal/PT0035/2020__EPI_ISL_418020 spike protein (1-1147)(P715C_P1069C) WhcAg construct
MFVFLVLLPLVSSQCVNLTTRTQLPPAYTNSFTRGVYYPDKVFRSSVLHSTQDLFLPFFSNVTWFHAIHVSGTNGTKRFDNPVLPFNDGVYFASTEKSNIIRGWIFGTTLDSKTQSLLIVNNATNVVIKVCEFQFCNDPFLGVYYHKNNKSWMESEFRVYSSANNCTFEYVSQPFLMDLEGKQGNFKNLREFVFKNIDGYFKIYSKHTPINLVRDLPQGFSALEPLVDLPIGINITRFQTLLALHRSYLTPGDSSSGWTAGAAAYYVGYLQPRTFLLKYNENGTITDAVDCALDPLSETKCTLKSFTVEKGIYQTSNFRVQPTESIVRFPNITNLCPFGEVFNATRFASVYAWNRKRISNCVADYSVLYNSASFSTFKCYGVSPTKLNDLCFTNVYADSFVIRGDEVRQIAPGQTGKIADYNYKLPDDFTGCVIAWNSNNLDSKVGGNYNYLYRLFRKSNLKPFERDISTEIYQAGSTPCNGVEGFNCYFPLQSYGFQPTNGVGYQPYRVVVLSFELLHAPATVCGPKKSTNLVKNKCVNFNFNGLTGTGVLTESNKKFLPFQQFGRDIADTTDAVRDPQTLEILDITPCSFGGVSVITPGTNTSNQVAVLYQDVNCTEVPVAIHADQLTPTWRVYSTGSNVFQTRAGCLIGAEHVNNSYECDIPIGAGICASYQTQTNSPRRARSVASQSIIAYTMSLGAENSVAYSNNSIAICTNFTISVTTEILPVSMTKTSVDCTMYICGDSTECSNLLLQYGSFCTQLNRALTGIAVEQDKNTQEVFAQVKQIYKTPPIKDFGGFNFSQILPDPSKPSKRSFIEDLLFNKVTLADAGFIKQYGDCLGDISARDLICAQKFNGLTVLPPLLTDEMIAQYTSALLAGTITSGWTFGAGAALQIPFAMQMAYRFNGIGVTQNVLYENQKLIANQFNSAIGKIQDSLSSTASALGKLQDVVNQNAQALNTLVKQLSSNFGAISSVLNDILSRLDKVEAEVQIDRLITGRLQSLQTYVTQQLIRAAEIRASANLAATKMSECVLGQSKRVDFCGKGYHLMSFPQSAPHGVVFLHVTYVCAQEKNFTTAPAICHDGKAHFPREGVFVSNGTHWFVTQRNFYEPQIITTDNTFVSGNCDVVIGIVNNTVYDPLQPELDSGGGGSDIDPYKEFGSSYQLLNFLPLDFFPDLNALVDTATALYEEELTGREHCSPHHTAIRQALVCWDELTKLIAWMSSNITSEQVRTIIVNHVNDTWGLKVRQSLWFHLSCLTFGQHTVQEFLVSFGVWIRTPAPYRPPNAPILSTLPEHTVIC

SEQ ID NO: 11177 - protein, 1301 aa, Artificial Sequence
  SARS-CoV-2/USA/NY-NYUMC7/2020__EPI_ISL_418192 spike protein (1-1147)(P715C_P1069C) WhcAg construct
MFVFLVLLPLVSSQCVNLTTRTQLPPAYTNSFTRGVYYPDKVFRSSVLHSTQDLFLPFFSNVTWFHAIHVSGTNGTKRFDNPVLPFNDGVYFASTEKSNIIRGWIFGTTLDSKTQSLLIVNNATNVVIKVCEFQFCNDPFLGVYHHKNNKSWMESEFRVYSSANNCTFEYVSQPFLMDLEGKQGNFKNLREFVFKNIDGYFKIYSKHTPINLVRDLPQGFSALEPLVDLPIGINITRFQTLLALHRSYLTPGDSSSGWTAGAAAYYVGYLQPRTFLLKYNENGTITDAVDCALDPLSETKCTLKSFTVEKGIYQTSNFRVQPTESIVRFPNITNLCPFGEVFNATRFASVYAWNRKRISNCVADYSVLYNSASFSTFKCYGVSPTKLNDLCFTNVYADSFVIRGDEVRQIAPGQTGKIADYNYKLPDDFTGCVIAWNSNNLDSKVGGNYNYLYRLFRKSNLKPFERDISTEIYQAGSTPCNGVEGFNCYFPLQSYGFQPTNGVGYQPYRVVVLSFELLHAPATVCGPKKSTNLVKNKCVNFNFNGLTGTGVLTESNKKFLPFQQFGRDIADTTDAVRDPQTLEILDITPCSFGGVSVITPGTNTSNQVAVLYQGVNCTEVPVAIHADQLTPTWRVYSTGSNVFQTRAGCLIGAEHVNNSYECDIPIGAGICASYQTQTNSPRRARSVASQSIIAYTMSLGAENSVAYSNNSIAICTNFTISVTTEILPVSMTKTSVDCTMYICGDSTECSNLLLQYGSFCTQLNRALTGIAVEQDKNTQEVFAQVKQIYKTPPIKDFGGFNFSQILPDPSKPSKRSFIEDLLFNKVTLADAGFIKQYGDCLGDIAARDLICAQKFNGLTVLPPLLTDEMIAQYTSALLAGTITSGWTFGAGAALQIPFAMQMAYRFNGIGVTQNVLYENQKLIANQFNSAIGKIQDSLSSTASALGKLQDVVNQNAQALNTLVKQLSSNFGAISSVLNDILSRLDKVEAEVQIDRLITGRLQSLQTYVTQQLIRAAEIRASANLAATKMSECVLGQSKRVDFCGKGYHLMSFPQSAPHGVVFLHVTYVCAQEKNFTTAPAICHDGKAHFPREGVFVSNGTHWFVTQRNFYEPQIITTDNTFVSGNCDVVIGIVNNTVYDPLQPELDSGGGGSDIDPYKEFGSSYQLLNFLPLDFFPDLNALVDTATALYEEELTGREHCSPHHTAIRQALVCWDELTKLIAWMSSNITSEQVRTIIVNHVNDTWGLKVRQSLWFHLSCLTFGQHTVQEFLVSFGVWIRTPAPYRPPNAPILSTLPEHTVIC

SEQ ID NO: 11178 - protein, 1301 aa, Artificial Sequence
  SARS-CoV-2/Iceland/189/2020__EPI_ISL_417709 spike protein (1-1147)(P715C_P1069C) WhcAg construct
MFVFLVLLPLVSSQCVNLTTRTQLPPAYTNSFTRGVYYPDKVFRSSVLHSTQDLFLPFFSNVTWFHAIHVSGTNGTKRFDNPVLPFNDGVYFASTEKSNIIRGWIFGTTLDSKTQSLLIVNNATNVVIKVCEFQFCNDPFLGVYYHKNNKSWMESEFRVYSSANNCTFEYVSQPFLMDLEGKQGNFKNLREFVFKNIDGYFKIYSKHTPINLVRDLPQGFSALEPLVDLPIGINITRFQTLLALHRSYLTPGDSSSGWTAGAAAYYVGYLQPRTFLLKYNENGTITDAVDCALDPLSETKCTLKSFTVEKGIYQTSNFRVQPTESIVRFPNITNLCPFGEVFNATRFASVYAWNRKRISNCVADYSVLYNSASFSTFKCYGVSPTKLNDLCFTNVYADSFVIRGDEVRQIAPGQTGKIADYNYKLPDDFTGCVIAWNSNNLDSKVGGNYNYLYRLFRKSNLKPFERDISTEIYQAGSTPCNGVEGFNCYFPLQSYGFQPTNGVGYQPYRVVVLSFELLHAPATVCGPKKSTNLVKNKCVNFNFNGLTGTGVLTESNKKFLPFQQFGRDIADTTDAVRDPQTLEILDITPCSFGGVSVITPGTNTSNQVAVLYQGVNCTEVPVAIHADQLTPTWRVYSTGSNVFQTRAGCLIGAEHVNNSYECDIPIGAGICASYQTQTNSPRRARSVASQSIIAYTMSLGAENSVAYSNNSIAICTNFTISVTTEILPVSMTKTSVDCTMYICGDSTECSNLLLQYGSFCTQLNRALTGIAVEQDKNTQEVFAQVKQIYKTPPIKDFGGFNFSQILPDPSKPSKRSFIEDLLFNKVTLADAGFTKQYGDCLGDIAARDLICAQKFNGLTVLPPLLTDEMIAQYTSALLAGTITSGWTFGAGAALQIPFAMQMAYRFNGIGVTQNVLYENQKLIANQFNSAIGKIQDSLSSTASALGKLQDVVNQNAQALNTLVKQLSSNFGAISSVLNDILSRLDKVEAEVQIDRLITGRLQSLQTYVTQQLIRAAEIRASANLAATKMSECVLGQSKRVDFCGKGYHLMSFPQSAPHGVVFLHVTYVCAQEKNFTTAPAICHDGKAHFPREGVFVSNGTHWFVTQRNFYEPQIITTDNTFVSGNCDVVIGIVNNTVYDPLQPELDSGGGGSDIDPYKEFGSSYQLLNFLPLDFFPDLNALVDTATALYEEELTGREHCSPHHTAIRQALVCWDELTKLIAWMSSNITSEQVRTIIVNHVNDTWGLKVRQSLWFHLSCLTFGQHTVQEFLVSFGVWIRTPAPYRPPNAPILSTLPEHTVIC

SEQ ID NO: 11179 - protein, 1301 aa, Artificial Sequence
  SARS-CoV-2/Australia/NSW56/2020__EPI_ISL_417408 spike protein (1-1147)(P715C_P1069C) WhcAg construct
MFVFLVLLPLVSSQCVNLTTRTQLPPAYTNSFTRGVYYPDKVFRSSVLHSTQDLFLPFFSNVTWFHAIHVSGTNGTKRFDNPVLPFNDGVYFASTEKSNIIRGWIFGTTLDSKTQSLLIVNNATNVVIKVCEFQFCNDPFLGVYYHKNNKSWMESEFRVYSSANNCTFEYVSQPFLMDLEGKQGNFKNLREFVFKNIDGYFKIYSKHTPINLVRDLPQGFSALEPLVDLPIGINITRFQTLLALHRSYLTPGDSSSGWTAGAAAYYVGYLQPRTFLLKYNENGTITDAVDCALDPLSETKCTLKSFTVEKGIYQTSNFRVQPTESIVRFPNITNLCPFGEVFNATRFASVYAWNRKRISNCVADYSVLYNSASFSTFKCYGVSPTKLNDLCFTNVYADSFVIRGDEVRQIAPGQTGKIADYNYKLPDDFTGCVIAWNSNNLDSKVGGNYNYLYRLFRKSNLKPFERDISTEIYQAGSTPCNGVEGFNCYFPLQSYGFQPTNGVGYQPYRVVVLSFELLHAPATVCGPKKSTNLVKNKCVNFNFNGLTGTGVLTESNKKFLPFQQFGRDIADTTDAVRDPQTLEILDITPCSFGGVSVITPGTNTSNQVAVLYQDVNCTEVPVAIHADQLTPTWRVYSTGSNVFQTRAGCLIGAEHVNNSYECDIPIGAGICASYQTQTNSPRRARSVASQSIIAYTMSLGAENSVAYSNNSIAICTNFTISVTTEILPVSMTKTSVDCTMYICGDSTECSNLLLQYGSFCTQLNRALTGIAVEQDKNTQEVFAQVKQIYKTPPIKDFGGFNFSQILPDSSKPSKRSFIEDLLFNKVTLADAGFIKQYGDCLGDIAARDLICAQKFNGLTVLPPLLTDEMIAQYTSALLAGTITSGWTFGAGAALQIPFAMQMAYRFNGIGVTQNVLYENQKLIANQFNSAIGKIQDSLSSTASALGKLQDVVNQNAQALNTLVKQLSSNFGAISSVLNDILSRLDKVEAEVQIDRLITGRLQSLQTYVTQQLIRAAEIRASANLAATKMSECVLGQSKRVDFCGKGYHLMSFPQSAPHGVVFLHVTYVCAQEKNFTTAPAICHDGKAHFPREGVFVSNGTHWFVTQRNFYEPQIITTDNTFVSGNCDVVIGIVNNTVYDPLQPELDSGGGGSDIDPYKEFGSSYQLLNFLPLDFFPDLNALVDTATALYEEELTGREHCSPHHTAIRQALVCWDELTKLIAWMSSNITSEQVRTIIVNHVNDTWGLKVRQSLWFHLSCLTFGQHTVQEFLVSFGVWIRTPAPYRPPNAPILSTLPEHTVIC

SEQ ID NO: 11180 - protein, 1301 aa, Artificial Sequence
  SARS-CoV-2/Iceland/280/2020__EPI_ISL_417608 spike protein (1-1147)(P715C_P1069C) WhcAg construct
MFVFLVLLPLVSSQCVNLTTRTQLPPAYTNSFTRGVYYPDKVFRSSVLHSTQDLFLPFFSNVTWFHAIHVSGTNGTKRFDNPVLPFNDGVYFASTEKSNIIRGWIFGTTLDSKTQSLLIVNNATNVVIKVCEFQFCNDPFLGVYYHKNNKSWMESEFRVYSSANNCTFEYVSQPFLMDLEGKQGNFKNLREFVFKNIDGYFKIYSKHTPINLVRDLPQGFSALEPLVDLPIGINITRFQTLLALHRSYLTPGDSSSGWTAGAAAYYVGYLQPRTFLLKYNENGTITDAVDCALDPLSETKCTLKSFTVEKGIYQTSNFRVQPTESIVRFPNITNLCPFGEVFNATRFASVYAWNRKRISNCVADYSVLYNSASFSTFKCYGVSPTKLNDLCFTNVYADSFVIRGDEVRQIAPGQTGKIADYNYKLPDDFTGCVIAWNSNNLDSKVGGNYNYLYRLFRKSNLKPFERDISTEIYQAGSTPCNGVEGFNCYFPLQSYGFQPTNGVGYQPYRVVVLSFELLHAPATVCGPKKSTNLVKNKCVNFNFNGLTGTGVLTESNKKFLPFQQFGRDIADTTDAVRDPQTLEILDITPCSFGGVSVITPGTNTSNQVAVLYQGVNCTEVPVAIHADQLTPTWRVYSTGSNVFQTRAGCLIGAEHVNNSYECDIPIGAGICASYHTQTNSPRRARSVASQSIIAYTMSLGAENSVAYSNNSIAICTNFTISVTTEILPVSMTKTSVDCTMYICGDSTECSNLLLQYGSFCTQLNRALTGIAVEQDKNTQEVFAQVKQIYKTPPIKDFGGFNFSQILPDPSKPSKRSFIEDLLFNKVTLADAGFIKQYGDCLGDIAARDLICAQKFNGLTVLPPLLTDEMIAQYTSALLAGTITSGWTFGAGAALQIPFAMQMAYRFNGIGVTQNVLYENQKLIANQFNSAIGKIQDSLSSTASALGKLQDVVNQNAQALNTLVKQLSSNFGAISSVLNDILSRLDKVEAEVQIDRLITGRLQSLQTYVTQQLIRAAEIRASANLAATKMSECVLGQSKRVDFCGKGYHLMSFPQSAPHGVVFLHVTYVCAQEKNFTTAPAICHDGKAHFPREGVFVSNGTHWFVTQRNFYEPQIITTDNTFVSGNCDVVIGIVNNTVYDPLQPELDSGGGGSDIDPYKEFGSSYQLLNFLPLDFFPDLNALVDTATALYEEELTGREHCSPHHTAIRQALVCWDELTKLIAWMSSNITSEQVRTIIVNHVNDTWGLKVRQSLWFHLSCLTFGQHTVQEFLVSFGVWIRTPAPYRPPNAPILSTLPEHTVIC

SEQ ID NO: 11181 - protein, 1301 aa, Artificial Sequence; identical to SEQ ID NO: 11136
  SARS-CoV-2/Iceland/247/2020__EPI_ISL_417575 spike protein (1-1147)(P715C_P1069C) WhcAg construct

SEQ ID NO: 11182 - protein, 1301 aa, Artificial Sequence
  SARS-CoV-2/Iceland/238/2020__EPI_ISL_417566 spike protein (1-1147)(P715C_P1069C) WhcAg construct
MFVFLVLLPLVSSQCVNLTTRTQLPPAYTNSFTRGVYYPDKVFRSSVLHSTQDLFLPFFSNVTWFHAIHVSGTNGTKRFDNPVLPFNDGVYFASTEKSNIIRGWIFGTTLDSKTQSLLIVNNATNVVIKVCEFQFCNDPFLGVYYHKNNKSWMESEFRVYSSANNCTFEYVSQPFLMDLEGKQGNFKNLREFVFKNIDGYFKIYSKHTPINLVRDLPQGFSALEPLVDLPIGINITRFQTLLALHRSYLTPGDSSSGWTAGAAAYYVGYLQPRTFLLKYNENGTITDAVDCALDPLSETKCTLKSFTVEKGIYQTSNFRVQPTESIVRFPNITNLCPFGEVFNATRFASVYAWNRKRISNCVADYSVLYNSASFSTFKCYGVSPTKLNDLCFTNVYADSFVIRGDEVRQIAPGQTGKIADYNYKLPDDFTGCVIAWNSNNLDSKVGGNYNYLYRLFRKSNLKPFERDISTEIYQAGSTPCNGVEGFNCYFPLQSYGFQPTNGVGYQPYRVVVLSFELLHAPATVCGPKKSTNLVKNKCVNFNFNGLTGTGVLTESNKKFLPFQQFGRDIADTTDAVRDPQTLEILDITPCSFGGVSVITPGTNTSNQVAVLYQGVNCTEVPVAIHADQLTPTWRVYSTGSNVFQTRAGCLIGAEHVNNSYECDIPIGAGICASYQTQTNSPRRARSVASQSIIAYTMSLGAENSVAYSNNSIAICTNFTISVTTEILPVSMTKTSVDCTMYICGDSTECSNLLLQYGSFCTQLNRALTGIAVEQDKNTQEVFAQVKQIYKTPPIKDFGGFNFSQILPDPSKPSKRSFIEDLLFNKVTLADVGFIKQYGDCLGDIAARDLICAQKFNGLTVLPPLLTDEMIAQYTSALLAGTITSGWTFGAGAALQIPFAMQMAYRFNGIGVTQNVLYENQKLIANQFNSAIGKIQDSLSSTASALGKLQDVVNQNAQALNTLVKQLSSNFGAISSVLNDILSRLDKVEAEVQIDRLITGRLQSLQTYVTQQLIRAAEIRASANLAATKMSECVLGQSKRVDFCGKGYHLMSFPQSAPHGVVFLHVTYVCAQEKNFTTAPAICHDGKAHFPREGVFVSNGTHWFVTQRNFYEPQIITTDNTFVSGNCDVVIGIVNNTVYDPLQPELDSGGGGSDIDPYKEFGSSYQLLNFLPLDFFPDLNALVDTATALYEEELTGREHCSPHHTAIRQALVCWDELTKLIAWMSSNITSEQVRTIIVNHVNDTWGLKVRQSLWFHLSCLTFGQHTVQEFLVSFGVWIRTPAPYRPPNAPILSTLPEHTVIC

SEQ ID NO: 11183 - protein, 1301 aa, Artificial Sequence
  SARS-CoV-2/Greece/16/2020__EPI_ISL_418265 spike protein (1-1147)(P715C_P1069C) WhcAg construct
MFVFLVLLPLVSSQCVNLTTRTQLPPAYTNSFTRGVYYPDKVFRSSVLHSTQDLFLPFFSNVTWFHAIHVSGTNGTKRFDNPVLPFNDGVYFASTEKSNIIRGWIFGTTLDSKTQSLLIVNNATNVVIKVCEFQFCNDPFLGVYYHKNNKSWMESEFRVYSSANNCTFEYVSQPFLMDLEGKQGNFKNLREFVFKNVDGYFKIYSKHTPINLVRDLPQGFSALEPLVDLPIGINITRFQTLLALHRSYLTPGDSSSGWTAGAAAYYVGYLQPRTFLLKYNENGTITDAVDCALDPLSETKCTLKSFTVEKGIYQTSNFRVQPTESIVRFPNITNLCPFGEVFNATRFASVYAWNRKRISNCVADYSVLYNSASFSTFKCYGVSPTKLNDLCFTNVYADSFVIRGDEVRQIAPGQTGKIADYNYKLPDDFTGCVIAWNSNNLDSKVGGNYNYLYRLFRKSNLKPFERDISTEIYQAGSTPCNGVEGFNCYFPLQSYGFQPTNGVGYQPYRVVVLSFELLHAPATVCGPKKSTNLVKNKCVNFNFNGLTGTGVLTESNKKFLPFQQFGRDIADTTDAVRDPQTLEILDITPCSFGGVSVITPGTNTSNQVAVLYQDVNCTEVPVAIHADQLTPTWRVYSTGSNVFQTRAGCLIGAEHVNNSYECDIPIGAGICASYQTQTNSPRRARSVASQSIIAYTMSLGAENSVAYSNNSIAICTNFTISVTTEILPVSMTKTSVDCTMYICGDSTECSNLLLQYGSFCTQLNRALTGIAVEQDKNTQEVFAQVKQIYKTPPIKDFGGFNFSQILPDPSKPSKRSFIEDLLFNKVTLADAGFIKQYGDCLGDIAARDLICAQKFNGLTVLPPLLTDEMIAQYTSALLAGTITSGWTFGAGAALQIPFAMQMAYRFNGIGVTQNVLYENQKLIANQFNSAIGKIQDSLSSTASALGKLQDVVNQNAQALNTLVKQLSSNFGAISSVLNDILSRLDKVEAEVQIDRLITGRLQSLQTYVTQQLIRAAEIRASANLAATKMSECVLGQSKRVDFCGKGYHLMSFPQSAPHGVVFLHVTYVCAQEKNFTTAPAICHDGKAHFPREGVFVSNGTHWFVTQRNFYEPQIITTDNTFVSGNCDVVIGIVNNTVYDPLQPELDSGGGGSDIDPYKEFGSSYQLLNFLPLDFFPDLNALVDTATALYEEELTGREHCSPHHTAIRQALVCWDELTKLIAWMSSNITSEQVRTIIVNHVNDTWGLKVRQSLWFHLSCLTFGQHTVQEFLVSFGVWIRTPAPYRPPNAPILSTLPEHTVIC

SEQ ID NO: 11184 - protein, 1301 aa, Artificial Sequence
  SARS-CoV-2/Iceland/319/2020__EPI_ISL_417648 spike protein (1-1147)(P715C_P1069C) WhcAg construct
MFVFLVLLPLVSSQCVNLTTRTQLPPAYTNSFTRGVYYPDKVFRSSVLHSTQDLFLPFFSNVTWFHAIHVSGTNGTKRFDNPVLPFNDGVYFASTEKSNIIRGWIFGTTLDSKTQSLLIVNNATNVVIKVCEFQFCNDPFLGVYYHKNNKSWMESEFRVYSSANNCTFEYVSQPFLIDLEGKQGNFKNLREFVFKNIDGYFKIYSKHTPINLVRDLPQGFSALEPLVDLPIGINITRFQTLLALHRSYLTPGDSSSGWTAGAAAYYVGYLQPRTFLLKYNENGTITDAVDCALDPLSETKCTLKSFTVEKGIYQTSNFRVQPTESIVRFPNITNLCPFGEVFNATRFASVYAWNRKRISNCVADYSVLYNSASFSTFKCYGVSPTKLNDLCFTNVYADSFVIRGDEVRQIAPGQTGKIADYNYKLPDDFTGCVIAWNSNNLDSKVGGNYNYLYRLFRKSNLKPFERDISTEIYQAGSTPCNGVEGFNCYFPLQSYGFQPTNGVGYQPYRVVVLSFELLHAPATVCGPKKSTNLVKNKCVNFNFNGLTGTGVLTESNKKFLPFQQFGRDIADTTDAVRDPQTLEILDITPCSFGGVSVITPGTNTSNQVAVLYQGVNCTEVPVAIHADQLTPTWRVYSTGSNVFQTRAGCLIGAEHVNNSYECDIPIGAGICASYQTQTNSPRRARSVASQSIIAYTMSLGAENSVAYSNNSIAICTNFTISVTTEILPVSMTKTSVDCTMYICGDSTECSNLLLQYGSFCTQLNRALTGIAVEQDKNTQEVFAQVKQIYKTPPIKDFGGFNFSQILPDPSKPSKRSFIEDLLFNKVTLADAGFIKQYGDCLGDIAARDLICAQKFNGLTVLPPLLTDEMIAQYTSALLAGTITSGWTFGAGAALQIPFAMQMAYRFNGIGVTQNVLYENQKLIANQFNSAIGKIQDSLSSTASALGKLQDVVNQNAQALNTLVKQLSSNFGAISSVLNDILSRLDKVEAEVQIDRLITGRLQSLQTYVTQQLIRAAEIRASANLAATKMSECVLGQSKRVDFCGKGYHLMSFPQSAPHGVVFLHVTYVCAQEKNFTTAPAICHDGKAHFPREGVFVSNGTHWFVTQRNFYEPQIITTDNTFVSGNCDVVIGIVNNTVYDPLQPELDSGGGGSDIDPYKEFGSSYQLLNFLPLDFFPDLNALVDTATALYEEELTGREHCSPHHTAIRQALVCWDELTKLIAWMSSNITSEQVRTIIVNHVNDTWGLKVRQSLWFHLSCLTFGQHTVQEFLVSFGVWIRTPAPYRPPNAPILSTLPEHTVIC

SEQ ID NO: 11185 - protein, 1301 aa, Artificial Sequence
  SARS-CoV-2/Congo/94/2020__EPI_ISL_417947 spike protein (1-1147)(P715C_P1069C) WhcAg construct
MFVFLVLLPLVSSQCVNLTTRTQLPPAYTNSFTRGVYYPDKVFRSSVLHSTQDLFLPFFSNVTWFHAIHVSGTNGTKRFDNPVLPFNDGVYFASTEKSNIIRGWIFGTTLDSKTQSLLIVNNATNVVIKVCEFQFCNDPFLGVYYHKNNKSWMESEFRVYSSANNCTFEYVSQPFLMDLEGKQGNFKNLREFVFKNIDGYFKIYSKHTPINLVRDLPQGFSALEPLVDLPIGINITRFQTLLALHRSYLTPGDSSSGWTAGAAAYYVGYLQPRTFLLKYNENGTITDAVDCALDPLSETKCTLKSFTVEKGIYQTSNFRVQPTESIVRFPNITNLCPFGEVFNATRFASVYAWNRKRISNCVADYSVLYNSASFSTFKCYGVSPTKLNDLCFTNVYADSFVIRGDEVRQIAPGQTGKIADYNYKLPDDFTGCVIAWNSNNLDSKVGGNYNYLYRLFRKSNLKPFERDISTEIYQAGSTPCNGVEGFNCYFPLQSYGFQPTNGVGYQPYRVVVLSFELLHAPATVCGPKKSTNLVKNKCVNFNFNGLTGTGVLTESNKKFLPFQQFGRDIADTTDAVRDPQTLEILDITPCSFGGVSVITPGTNTSNQVAVLYQGVNCTEVPVAIHADQLTPTWRVYSTGSNVFQTRAGCLIGAEHVNNSYECDIPIGAGICASYQTQTNSPRRARSVASQSIIAYTMSLGAENSVAYSNNSIAICTNFTISVTTEILPVSMTKTSVDCTMYICGDSTECSNLLLQYGSFCTQLNRALTGIAVEQDKNTQEVFAQVKQIYKTPPIKDFGGFNFSQILPDPSKPSKRSFIEDILFNKVTLADAGFIKQYGDCLGDIAARDLICAQKFNGLTVLPPLLTDEMIAQYTSALLAGTITSGWTFGAGAALQIPFAMQMAYRFNGIGVTQNVLYENQKLIANQFNSAIGKIQDSLSSTASALGKLQDVVNQNAQALNTLVKQLSSNFGAISSVLNDILSRLDKVEAEVQIDRLITGRLQSLQTYVTQQLIRAAEIRASANLAATKMSECVLGQSKRVDFCGKGYHLMSFPQSAPHGVVFLHVTYVCAQEKNFTTAPAICHDGKAHFPREGVFVSNGTHWFVTQRNFYEPQIITTDNTFVSGNCDVVIGIVNNTVYDPLQPELDSGGGGSDIDPYKEFGSSYQLLNFLPLDFFPDLNALVDTATALYEEELTGREHCSPHHTAIRQALVCWDELTKLIAWMSSNITSEQVRTIIVNHVNDTWGLKVRQSLWFHLSCLTFGQHTVQEFLVSFGVWIRTPAPYRPPNAPILSTLPEHTVIC

SEQ ID NO: 11186 - protein, 1301 aa, Artificial Sequence
  SARS-CoV-2/Congo/158/2020__EPI_ISL_417950 spike protein (1-1147)(P715C_P1069C) WhcAg construct
MFVFLVLLPLVSSQCVNLTTRTQLPPAYTNSFTRGVYYPDKVFRSSVLHSTQDLFLPFFSNVTWFHAIHVSGTNGTKRFDNPVLPFNDGVYFASTEKSNIIRGWIFGTTLDSKTQSLLIVNNATNVVIKVCEFQFCNDPFLGVYYHKNNKSWMESEFRVYSSANNCTFEYVSQPFLMDLEGKQGNFKNLREFVFKNIDGYFKIYSKHTPINLVRDLPQGFSALEPLVDLPIGINITRFQTLLALHRSYLTPGDSSSGWTAGAAAYYVGYLQPRTFLLKYNENGTITDAVDCALDPLSETKCTLKSFTVEKGIYQTSNFRVQPTESIVRFPNITNLCPFGEVFNATRFASVYAWNRKRISNCVADYSVLYNSASFSTFKCYGVSPTKLNDLCFTNVYADSFVIRGDEVRQIAPGQTGKIADYNYKLPDDFTGCVIAWNSNNLDSKVGGNYNYLYRLFRKSNLKPFERDISTEIYQAGSTPCNGVEGFNCYFPLQSYGFQPTNGVGYQPYRVVVLSFELLHAPATVCGPKKSTNLVKNKCVNFNFNGLTGTGVLTESNKKFLPFQQFGRDIADTTDAVRDPQTLEILDITPCSFGGVSVITPGTNTSNQVAVLYQDVNCTEVPVAIHADQLTPTWRVYSTGSNVFQTRAGCLIGAEHVNNSYECDIPIGAGICASYQTQTNSPRRARSVASQSIIAYTMSLGAENSVAYSNNSIAICTNFTISVTTEILPVSMTKTSVDCTMYICGDSTECSNLLLQYGSFCTQLNRALTGIAVEQDKNTQEVFAQVKQIYKTPPIKDFGGFNFSQILPDPSKPSKRSFIEDLLFNKVTLADAGFIKQYGDCLGDIAARDLICAQKFNGLTVLPPLLTDEMIAQYTSALLAGTITSGWTFGAGAALQIPFAMQMAYRFNGIGVTQNVLYENQKLIANQFNSAIGKIQDSLSSTASALGKLQDVVNQNAQALNTLVKQLSSNFGAISSVLNDILSRLDKVEAEVQIDRLITGRLQSLQTYVTQQLIRAAEIRASANLAATKMSECVLGQSKRVDFCGKGYHLMSFPQSAPHGVVFLHVTYVCAQEKNFTTAPAICHDGKAHFPREGVFVSNGTHWFVTQRNFYEPQIITTDNTFLSGNCDVVIGIVNNTVYDPLQPELDSGGGGSDIDPYKEFGSSYQLLNFLPLDFFPDLNALVDTATALYEEELTGREHCSPHHTAIRQALVCWDELTKLIAWMSSNITSEQVRTIIVNHVNDTWGLKVRQSLWFHLSCLTFGQHTVQEFLVSFGVWIRTPAPYRPPNAPILSTLPEHTVIC

SEQ ID NO: 11187 - protein, 1301 aa, Artificial Sequence
  SARS-CoV-2/USA/UT-00034/2020__EPI_ISL_417977 spike protein (1-1147)(P715C_P1069C) WhcAg construct
MFVFLVLLPLVSSQCVNLTTRTQLPPAYTNSFTRGVYYPDKVFRSSVLHSTQDLFLPFFSNVTWFHAIHVSGTNGTKRFDNPVLPFNDGVYFASTEKSNIIRGWIFGTTLDSKTQSLLIVNNATNVVIKVCEFQFCNDPFLGVYYYKNNKSWMESEFRVYSSANNCTFEYVSQPFLMDLEGKQGNFKNLREFVFKNIDGYFKIYSKHTPINLVRDLPQGFSALEPLVDLPIGINITRFQTLLALHRSYLTPGDSSSGWTAGAAAYYVGYLQPRTFLLKYNENGTITDAVDCALDPLSETKCTLKSFTVEKGIYQTSNFRVQPTESIVRFPNITNLCPFGEVFNATRFASVYAWNRKRISNCVADYSVLYNSASFSTFKCYGVSPTKLNDLCFTNVYADSFVIRGDEVRQIAPGQTGKIADYNYKLPDDFTGCVIAWNSNNLDSKVGGNYNYLYRLFRKSNLKPFERDISTEIYQAGSTPCNGVEGFNCYFPLQSYGFQPTNGVGYQPYRVVVLSFELLHAPATVCGPKKSTNLVKNKCVNFNFNGLTGTGVLTESNKKFLPFQQFGRDIADTTDAVRDPQTLEILDITPCSFGGVSVITPGTNTSNQVAVLYQGVNCTEVPVAIHADQLTPTWRVYSTGSNVFQTRAGCLIGAEHVNNSYECDIPIGAGICASYQTQTNSPRRARSVASQSIIAYTMSLGAENSVAYSNNSIAICTNFTISVTTEILPVSMTKTSVDCTMYICGDSTECSNLLLQYGSFCTQLNRALTGIAVEQDKNTQEVFAQVKQIYKTPPIKDFGGFNFSQILPDPSKPSKRSFIEDLLFNKVTLADAGFIKQYGDCLGDIAARDLICAQKFNGLTVLPPLLTDEMIAQYTSALLAGTITSGWTFGAGAALQIPFAMQMAYRFNGIGVTQNVLYENQKLIANQFNSAIGKIQDSLSSTASALGKLQDVVNQNAQALNTLVKQLSSNFGAISSVLNDILSRLDKVEAEVQIDRLITGRLQSLQTYVTQQLIRAAEIRASANLAATKMSECVLGQSKRVDFCGKGYHLMSFPQSAPHGVVFLHVTYVCAQEKNFTTAPAICHDGKAHFPREGVFVSNGTHWFVTQRNFYEPQIITTDNTFVSGNCDVVIGIVNNTVYDPLQPELDSGGGGSDIDPYKEFGSSYQLLNFLPLDFFPDLNALVDTATALYEEELTGREHCSPHHTAIRQALVCWDELTKLIAWMSSNITSEQVRTIIVNHVNDTWGLKVRQSLWFHLSCLTFGQHTVQEFLVSFGVWIRTPAPYRPPNAPILSTLPEHTVIC

SEQ ID NO: 11188 - protein, 1301 aa, Artificial Sequence
  SARS-CoV-2/USA/UT-00033/2020__EPI_ISL_417976 spike protein (1-1147)(P715C_P1069C) WhcAg construct
MFVFLVLLPLVSSQCVNLTTRTQLPPAYTNSFTRGVYYPDKVFRSSVLHSTQDLFLPFFSNVTWFHAIHVSGTNGTKRFDNPVLPFNDGVYFASTEKSNIIRGWIFGTTLDSKTQSLLIVNNATNVVIKVCEFQFCNDPFLGVYYHKNNKSWMESEFRVYSSANNCTFEYVSQPFLMDLEGKQGNFKNLREFVFKNIDGYFKIYSKHTPINLVRDLPQGFSALEPLVDLPIGINITRFQTLLALHRSYLTPGDSSSGLTAGAAAYYVGYLQPRTFLLKYNENGTITDAVDCALDPLSETKCTLKSFTVEKGIYQTSNFRVQPTESIVRFPNITNLCPFGEVFNATRFASVYAWNRKRISNCVADYSVLYNSASFSTFKCYGVSPTKLNDLCFTNVYADSFVIRGDEVRQIAPGQTGKIADYNYKLPDDFTGCVIAWNSNNLDSKVGGNYNYLYRLFRKSNLKPFERDISTEIYQAGSTPCNGVEGFNCYFPLQSYGFQPTNGVGYQPYRVVVLSFELLHAPATVCGPKKSTNLVKNKCVNFNFNGLTGTGVLTESNKKFLPFQQFGRDIADTTDAVRDPQTLEILDITPCSFGGVSVITPGTNTSNQVAVLYQGVNCTEVPVAIHADQLTPTWRVYSTGSNVFQTRAGCLIGAEHVNNSYECDIPIGAGICASYQTQTNSPRRARSVASQSIIAYTMSLGAENSVAYSNNSIAICTNFTISVTTEILPVSMTKTSVDCTMYICGDSTECSNLLLQYGSFCTQLNRALTGIAVEQDKNTQEVFAQVKQIYKTPPIKDFGGFNFSQILPDPSKPSKRSFIEDLLFNKVTLADAGFIKQYGDCLGDIAARDLICAQKFNGLTVLPPLLTDEMIAQYTSALLAGTITSGWTFGAGAALQIPFAMQMAYRFNGIGVTQNVLYENQKLIANQFNSAIGKIQDSLSSTASALGKLQDVVNQNAQALNTLVKQLSSNFGAISSVLNDILSRLDKVEAEVQIDRLITGRLQSLQTYVTQQLIRAAEIRASANLAATKMSECVLGQSKRVDFCGKGYHLMSFPQSAPHGVVFLHVTYVCAQEKNFTTAPAICHDGKAHFPREGVFVSNGTHWFVTQRNFYEPQIITTDNTFVSGNCDVVIGIVNNTVYDPLQPELDSGGGGSDIDPYKEFGSSYQLLNFLPLDFFPDLNALVDTATALYEEELTGREHCSPHHTAIRQALVCWDELTKLIAWMSSNITSEQVRTIIVNHVNDTWGLKVRQSLWFHLSCLTFGQHTVQEFLVSFGVWIRTPAPYRPPNAPILSTLPEHTVIC

SEQ ID NO: 11189 - protein, 1301 aa, Artificial Sequence
  SARS-CoV-2/USA/WI-13/2020__EPI_ISL_417516 spike protein (1-1147)(P715C_P1069C) WhcAg construct
MFVFLVLLPLVSSQCVNLTTRTQLPPAYTNSFTRGVYYPDKVFRSSVLHSTQDLFLPFFSNVTWFHAIHVSGTNGTKRFDNPVLPFNDGVYFASTEKSNIIRGWIFGTTLDSKTQSLLIVNNATNVVIKVCEFQFCNDPFLGVYYHKNNKSWMESEFRVYSSANNCTFEYVSQPFLMDLEGKQGNFKNLREFVFKNIDGYFKIYSKHTPINLVRDLPQGFSALEPLVDLPIGINITRFQTLLALHRSYLTPGDSSSGWTAGAAAYYVGYLQPRTFLLKYNENGTITDAVDCALDPLSETKCTLKSFTVEKGIYQTSNFRVLPTESIVRFPNITNLCPFGEVFNATRFASVYAWNRKRISNCVADYSVLYNSASFSTFKCYGVSPTKLNDLCFTNVYADSFVIRGDEVRQIAPGQTGKIADYNYKLPDDFTGCVIAWNSNNLDSKVGGNYNYLYRLFRKSNLKPFERDISTEIYQAGSTPCNGVEGFNCYFPLQSYGFQPTNGVGYQPYRVVVLSFELLHAPATVCGPKKSTNLVKNKCVNFNFNGLTGTGVLTESNKKFLPFQQFGRDIADTTDAVRDPQTLEILDITPCSFGGVSVITPGTNTSNQVAVLYQGVNCTEVPVAIHADQLTPTWRVYSTGSNVFQTRAGCLIGAEHVNNSYECDIPIGAGICASYQTQTNSPRRARSVASQSIIAYTMSLGAENSVAYSNNSIAICTNFTISVTTEILPVSMTKTSVDCTMYICGDSTECSNLLLQYGSFCTQLNRALTGIAVEQDKNTQEVFAQVKQIYKTPPIKDFGGFNFSQILPDPSKPSKRSFIEDLLFNKVTLADAGFIKQYGDCLGDIAARDLICAQKFNGLTVLPPLLTDEMIAQYTSALLAGTITSGWTFGAGAALQIPFAMQMAYRFNGIGVTQNVLYENQKLIANQFNSAIGKIQDSLSSTASALGKLQDVVNQNAQALNTLVKQLSSNFGAISSVLNDILSRLDKVEAEVQIDRLITGRLQSLQTYVTQQLIRAAEIRASANLAATKMSECVLGQSKRVDFCGKGYHLMSFPQSAPHGVVFLHVTYVCAQEKNFTTAPAICHDGKAHFPREGVFVSNGTHWFVTQRNFYEPQIITTDNTFVSGNCDVVIGIVNNTVYDPLQPELDSGGGGSDIDPYKEFGSSYQLLNFLPLDFFPDLNALVDTATALYEEELTGREHCSPHHTAIRQALVCWDELTKLIAWMSSNITSEQVRTIIVNHVNDTWGLKVRQSLWFHLSCLTFGQHTVQEFLVSFGVWIRTPAPYRPPNAPILSTLPEHTVIC

SEQ ID NO: 11190 - protein, 1300 aa, Artificial Sequence
  SARS-CoV-2/India/1-27/2020__EPI_ISL_413522 spike protein (1-1146)(P714C_P1068C) WhcAg construct
MFVFLVLLPLVSSQCVNLTTRTQLPPAYTNSFTRGVYYPDKVFRSSVLHSTQDLFLPFFSNVTWFHAIHVSGTNGTKRFDNPVLPFNDGVYFASTEKSNIIRGWIFGTTLDSKTQSLLIVNNATNVVIKVCEFQFCNDPFLGVYHKNNKSWMESEFRVYSSANNCTFEYVSQPFLMDLEGKQGNFKNLREFVFKNIDGYFKIYSKHTPINLVRDLPQGFSALEPLVDLPIGINITRFQTLLALHRSYLTPGDSSSGWTAGAAAYYVGYLQPRTFLLKYNENGTITDAVDCALDPLSETKCTLKSFTVEKGIYQTSNFRVQPTESIVRFPNITNLCPFGEVFNATRFASVYAWNRKRISNCVADYSVLYNSASFSTFKCYGVSPTKLNDLCFTNVYADSFVIRGDEVIQIAPGQTGKIADYNYKLPDDFTGCVIAWNSNNLDSKVGGNYNYLYRLFRKSNLKPFERDISTEIYQAGSTPCNGVEGFNCYFPLQSYGFQPTNGVGYQPYRVVVLSFELLHAPATVCGPKKSTNLVKNKCVNFNFNGLTGTGVLTESNKKFLPFQQFGRDIADTTDAVRDPQTLEILDITPCSFGGVSVITPGTNTSNQVAVLYQDVNCTEVPVAIHADQLTPTWRVYSTGSNVFQTRAGCLIGAEHVNNSYECDIPIGAGICASYQTQTNSPRRARSVASQSIIAYTMSLGAENSVAYSNNSIAICTNFTISVTTEILPVSMTKTSVDCTMYICGDSTECSNLLLQYGSFCTQLNRALTGIAVEQDKNTQEVFAQVKQIYKTPPIKDFGGFNFSQILPDPSKPSKRSFIEDLLFNKVTLADAGFIKQYGDCLGDIAARDLICAQKFNGLTVLPPLLTDEMIAQYTSALLAGTITSGWTFGAGAALQIPFAMQMAYRFNGIGVTQNVLYENQKLIANQFNSAIGKIQDSLSSTASALGKLQDVVNQNAQALNTLVKQLSSNFGAISSVLNDILSRLDKVEAEVQIDRLITGRLQSLQTYVTQQLIRAAEIRASANLAATKMSECVLGQSKRVDFCGKGYHLMSFPQSAPHGVVFLHVTYVCAQEKNFTTAPAICHDGKAHFPREGVFVSNGTHWFVTQRNFYEPQIITTDNTFVSGNCDVVIGIVNNTVYDPLQPELDSGGGGSDIDPYKEFGSSYQLLNFLPLDFFPDLNALVDTATALYEEELTGREHCSPHHTAIRQALVCWDELTKLIAWMSSNITSEQVRTIIVNHVNDTWGLKVRQSLWFHLSCLTFGQHTVQEFLVSFGVWIRTPAPYRPPNAPILSTLPEHTVIC

SEQ ID NO: 11191 - protein, 1295 aa, Artificial Sequence
  SARS-CoV-2/pangolin/Guangxi/P4L/2017__EPI_ISL_410538 spike protein (1-1141)(P709C_P1063C) WhcAg construct
MFVFLFVLPLVSSQCVNLTTRTGIPPGYTNSSTRGVYYPDKVFRSSILHLTQDLFLPFFSNVTWFNTINYQGGFKKFDNPVLPFNDGVYFASTEKSNIIRGWIFGTTLDARTQSLLIVNNATNVVIKVCEFQFCTDPFLGVYYHNNNKTWVENEFRVYSSANNCTFEYISQPFLMDLEGKQGNFKNLREFVFKNVDGYFKIYSKHTPIDLVRDLPRGFAALEPLVDLPIGINITRFQTLLALHRSYLTPGNLESGWTTGAAAYYVGYLQQRTFLLSYNQNGTITDAVDCSLDPLSETKCTLKSLTVEKGIYQTSNFRVQPTISIVRFPNITNLCPFGEVFNASKFASVYAWNRKRISNCVADYSVLYNSTSFSTFKCYGVSPTKLNDLCFTNVYADSFVVKGDEVRQIAPGQTGVIADYNYKLPDDFTGCVIAWNSVKQDALTGGNYGYLYRLFRKSKLKPFERDISTEIYQAGSTPCNGQVGLNCYYPLERYGFHPTTGVNYQPFRVVVLSFELLNGPATVCGPKLSTTLVKDKCVNFNFNGLTGTGVLTTSKKQFLPFQQFGRDISDTTDAVRDPQTLEILDITPCSFGGVSVITPGTNTSNQVAVLYQDVNCTEVPMAIHAEQLTPAWRVYSAGANVFQTRAGCLVGAEHVNNSYECDIPVGAGICASYHSMSSLRSVNQRSIIAYTMSLGAENSVAYSNNSIAICTNFTISVTTEILPVSMTKTSVDCTMYICGDSIECSNLLLQYGSFCTQLNRALTGIAVEQDKNTQEVFAQVKQIYKTPPIKDFGGFNFSQILPDPSKPSKRSFIEDLLFNKVTLADAGFIKQYGDCLGDIAARDLICAQKFNGLTVLPPLLTDEMIAQYTSALLAGTITSGWTFGAGAALQIPFAMQMAYRFNGIGVTQNVLYENQKLIANQFNSAIGKIQDSLSSTASALGKLQDVVNQNAQALNTLVKQLSSNFGAISSVLNDILSRLDKVEAEVQIDRLITGRLQSLQTYVTQQLIRAAEIRASANLAATKMSECVLGQSKRVDFCGKGYHLMSFPQSAPHGVVFLHVTYVCAQEKNFTTAPAICHEGKAHFPREGVFVSNGTHWFITQRNFYEPQIITTDNTFVSGSCDVVIGIVNNTVYDPLQPELDSGGGGSDIDPYKEFGSSYQLLNFLPLDFFPDLNALVDTATALYEEELTGREHCSPHHTAIRQALVCWDELTKLIAWMSSNITSEQVRTIIVNHVNDTWGLKVRQSLWFHLSCLTFGQHTVQEFLVSFGVWIRTPAPYRPPNAPILSTLPEHTVIC

SEQ ID NO: 11192 - protein, 1295 aa, Artificial Sequence
  SARS-CoV-2/pangolin/Guangxi/P5L/2017__EPI_ISL_410540 spike protein (1-1141)(P709C_P1063C) WhcAg construct
MFVFLFVLPLVSSQCVNLTTRTGIPPGYTNSSTRGVYYPDKVFRSSILHLTQDLFLPFFSNVTWFNTINYQGGFKKFDNPVLPFNDGVYFASTEKSNIIRGWIFGTTLDARTQSLLIVNNATNVVIKVCEFQFCTDPFLGVYYHNNNKTWVENEFRVYSSANNCTFEYISQPFLMDLEGKQGNFKNLREFVFKNVDGYFKIYSKHTPIDLVRDLPRGFAALEPLVDLPIGINITRFQTLLALHRSYLTPGKLESGWTTGAAAYYVGYLQQRTFLLSYNQNGTITDAVDCSLDPLSETKCTLKSLTVEKGIYQTSNFRVQPTISIVRFPNITNLCPFGEVFNASKFASVYAWNRKRISNCVADYSVLYNSTSFSTFKCYGVSPTKLNDLCFTNVYADSFVVKGDEVRQIAPGQTGVIADYNYKLPDDFTGCVIAWNSVKQDALTGGNYGYLYRLFRKSKLKPFERDISTEIYQAGSTPCNGQVGLNCYYPLERYGFHPTTGVNYQPFRVVVLSFELLNGPATVCGPKLSTTLVKDKCVNFNFNGLTGTGVLTTSKKQFLPFQQFGRDISDTTDAVRDPQTLEILDITPCSFGGVSVITPGTNTSNQVAVLYQDVNCTEVPMAIHAEQLTPAWRVYSAGANVFQTRAGCLVGAEHVNNSYECDIPVGAGICASYHSMSSFRSVNQRSIIAYTMSLGAENSVAYSNNSIAICTNFTISVTTEILPVSMTKTSVDCTMYICGDSIECSNLLLQYGSFCTQLNRALTGIAVEQDKNTQEVFAQVKQIYKTPPIKDFGGFNFSQILPDPSKPSKRSFIEDLLFNKVTLADAGFIKQYGDCLGDIAARDLICAQKFNGLTVLPPLLTDEMIAQYTSALLAGTITSGWTFGAGAALQIPFAMQMAYRFNGIGVTQNVLYENQKLIANQFNSAIGKIQDSLSSTASALGKLQDVVNQNAQALNTLVKQLSSNFGAISSVLNDILSRLDKVEAEVQIDRLITGRLQSLQTYVTQQLIRAAEIRASANLAATKMSECVLGQSKRVDFCGKGYHLMSFPQSAPHGVVFLHVTYVCAQEKNFTTAPAICHEGKAHFPREGVFVSNGTHWFITQRNFYEPQIITTDNTFVSGSCDVVIGIVNNTVYDPLQPELDSGGGGSDIDPYKEFGSSYQLLNFLPLDFFPDLNALVDTATALYEEELTGREHCSPHHTAIRQALVCWDELTKLIAWMSSNITSEQVRTIIVNHVNDTWGLKVRQSLWFHLSCLTFGQHTVQEFLVSFGVWIRTPAPYRPPNAPILSTLPEHTVIC

SEQ ID NO: 11193 - protein, 1295 aa, Artificial Sequence
  SARS-CoV-2/pangolin/Guangxi/P5E/2017__EPI_ISL_410541 spike protein (1-1141)(P709C_P1063C) WhcAg construct
MFVFLFVLPLVSSQCVNLTTRTGIPPGYTNSSTRGVYYPDKVFRSSILHLTQDLFLPFFSNVTWFNTITYQGGSKKFDNPVLPFNDGVYFASTEKSNIIRGWIFGTTLDARTQSLLIVNNATNVVIKVCEFQFCTDPFLGVYYHNNNKTWVENEFRVYSSANNCTFEYISQPFLMDLEGKQGNFKNLREFVFKNVDGYFKIYSKHTPIDLVRDLPRGFAALEPLVDLPIGINITRFQTLLALHRSYLTPGKLESGWTTGAAAYYVGYLQQRTFLLSYNQNGTITDAVDCSLDPLSETKCTLKSLTVEKGIYQTSNFRVQPTISIVRFPNITNLCPFGEVFNASKFASVYAWNRKRISNCVADYSVLYNSTSFSTFKCYGVSPTKLNDLCFTNVYADSFVVKGDEVRQIAPGQTGVIADYNYKLPDDFTGCVIAWNSVKQDALTGDNYGYLYRLFRKSKLKPFERDISTEIYQAGSTPCNGQVGLNCYYPLERYGFHPTTGVNYQPFRVVVLSFELLNGPATVCGPKLSTTLVKDKCVNFNFNGLTGTGVLTTSKKQFLPFQQFGRDISDTTDAVRDPQTLEILDITPCSFGGVSVITPGTNTSNQVAVLYQDVNCTEVPMAIHAEQLTPAWRVYSAGANVFQTRAGCLVGAEHVNNSYECDIPVGAGICASYHSMSSFRSVNQRSIIAYTMSLGAENSVAYSNNSIAICTNFTISVTTEILPVSMTKTSVDCTMYICGDSIECSNLLLQYGSFCTQLNRALTGIAVEQDKNTQEVFAQVKQIYKTPPIKDFGGFNFSQILPDPSKPSKRSFIEDLLFNKVTLADAGFIKQYGDCLGDIAARDLICAQKFNGLTVLPPLLTDEMIAQYTSALLAGTITSGWTFGAGAALQIPFAMQMAYRFNGIGVTQNVLYENQKLIANQFNSAIGKIQDSLSSTASALGKLQDVVNQNAQALNTLVKQLSSNFGAISSVLNDILSRLDKVEAEVQIDRLITGRLQSLQTYVTQQLIRAAEIRASANLAATKMSECVLGQSKRVDFCGKGYHLMSFPQSAPHGVVFLHVTYVCAQEKNFTTAPAICHEGKAHFPREGVFVSNGTHWFITQRNFYEPQIITTDNTFVSGSCDVVIGIVNNTVYDPLQPELDSGGGGSDIDPYKEFGSSYQLLNFLPLDFFPDLNALVDTATALYEEELTGREHCSPHHTAIRQALVCWDELTKLIAWMSSNITSEQVRTIIVNHVNDTWGLKVRQSLWFHLSCLTFGQHTVQEFLVSFGVWIRTPAPYRPPNAPILSTLPEHTVIC

SEQ ID NO: 11194 - protein, 1293 aa, Artificial Sequence
  SARS-CoV-2/pangolin/Guangxi/P1E/2017__EPI_ISL_410539 spike protein (1-1139)(P707C_P1061C) WhcAg construct
MFVFLFVLPLVSSQCVNLTTRTGIQPGYTNSSTRGVYYPDKVFRSSILHLTQDLFLPFFSNVTWFNTINYQGGFKKFDNPVLPFNDGVYFASTEKSNIIRGWIFGTTLDARTQSLLIVNNATNVVIKVCEFQFCTDPFLGVYYHNNNKTWVENEFRVYSSANNCTFEYISQPFLMDLEGKQGNFKNLREFVFKNVDGYFKIYSKHTPIDLVRDLPRGFAALEPLVDLPIGINITRFQTLLALHRSYLTPGKLESGWTTGAAAYYVGYLQQRTFLLSYNQNGTITDAVDCSLDPLSETKCTLKSLTVEKGIYQTSNFRVQPTISIVRFPNITNLCPFGEVFNASKFASVYAWNRKRISNCVADYSVLYNSTSFSTFKCYGVSPTKLNDLCFTNVYADSFVVKGDEVRQIAPGQTGVIADYNYKLPDDFTGCVIAWNSVKQDALTGGNYLYRLFRKSKLKPFERDISTEIYQAGSTPCNGQVGLNCYYPLERYGFHPTTGVNYQPFRVVVLSFELLNGPATVCGPKLSTTLVKDKCVNFNFNGLTGTGVLTTSKKQFLPFQQFGRDISDTTDAVRDPQTLEILDITPCSFGGVSVITPGTNTSNQVAVLYQDVNCTEVPMAIHAEQLTPAWRVYSAGANVFQTRAGCLVGAEHVNNSYECDIPVGAGICASYHSMSSLRSVNQRSIIAYTMSLGAENSVAYSNNSIAICTNFTISVTTEILPVSMTKTSVDCTMYICGDSIECSNLLLQYGSFCTQLNRALTGIAVEQDKNTQEVFAQVKQIYKTPPIKDFGGFNFSQILPDPSKPSKRSFIEDLLFNKVTLADAGFIKQYGDCLGDIAARDLICAQKFNGLTVLPPLLTDEMIAQYTSALLAGTITSGWTFGAGAALQIPFAMQMAYRFNGIGVTQNVLYENQKLIANQFNSAIGKIQDSLSSTASALGKLQDVVNQNAQALNTLVKQLSSNFGAISSVLNDILSRLDKVEAEVQIDRLITGRLQSLQTYVTQQLIRAAEIRASANLAATKMSECVLGQSKRVDFCGKGYHLMSFPQSAPHGVVFLHVTYVCAQEKNFTTAPAICHEGKAHFPREGVFVSNGTHWFITQRNFYEPQIITTDNTFVSGSCDVVIGIVNNTVYDPLQPELDSGGGGSDIDPYKEFGSSYQLLNFLPLDFFPDLNALVDTATALYEEELTGREHCSPHHTAIRQALVCWDELTKLIAWMSSNITSEQVRTIIVNHVNDTWGLKVRQSLWFHLSCLTFGQHTVQEFLVSFGVWIRTPAPYRPPNAPILSTLPEHTVIC

SEQ ID NO: 11195 - protein, 1301 aa, Artificial Sequence
  SARS-CoV-2/Wuhan/WIV05/2019__EPI_ISL_402128 spike protein (1-1147)(G889C_L1034C) WhcAg construct
MFVFLVLLPLVSSQCVNLTTRTQLPPAYTNSFTRGVYYPDKVFRSSVLHSTQDLFLPFFSNVTWFHAIHVSGTNGTKRFDNPVLPFNDGVYFASTEKSNIIRGWIFGTTLDSKTQSLLIVNNATNVVIKVCEFQFCNDPFLGVYYHKNNKSWMESEFRVYSSANNCTFEYVSQPFLMDLEGKQGNFKNLREFVFKNIDGYFKIYSKHTPINLVRDLPQGFSALEPLVDLPIGINITRFQTLLALHRSYLTPGDSSSGWTAGAAAYYVGYLQPRTFLLKYNENGTITDAVDCALDPLSETKCTLKSFTVEKGIYQTSNFRVQPTESIVRFPNITNLCPFGEVFNATRFASVYAWNRKRISNCVADYSVLYNSASFSTFKCYGVSPTKLNDLCFTNVYADSFVIRGDEVRQIAPGQTGKIADYNYKLPDDFTGCVIAWNSNNLDSKVGGNYNYLYRLFRKSNLKPFERDISTEIYQAGSTPCNGVEGFNCYFPLQSYGFQPTNGVGYQPYRVVVLSFELLHAPATVCGPKKSTNLVKNKCVNFNFNGLTGTGVLTESNKKFLPFQQFGRDIADTTDAVRDPQTLEILDITPCSFGGVSVITPGTNTSNQVAVLYQDVNCTEVPVAIHADQLTPTWRVYSTGSNVFQTRAGCLIGAEHVNNSYECDIPIGAGICASYQTQTNSPRRARSVASQSIIAYTMSLGAENSVAYSNNSIAIPTNFTISVTTEILPVSMTKTSVDCTMYICGDSTECSNLLLQYGSFCTQLNRALTGIAVEQDKNTQEVFAQVKQIYKTPPIKDFGGFNFSQILPDPSKPSKRSFIEDLLFNKVTLADAGFIKQYGDCLGDIAARDLICAQKFNGLTVLPPLLTDEMIAQYTSALLAGTITSGWTFCAGAALQIPFAMQMAYRFNGIGVTQNVLYENQKLIANQFNSAIGKIQDSLSSTASALGKLQDVVNQNAQALNTLVKQLSSNFGAISSVLNDILSRLDKVEAEVQIDRLITGRLQSLQTYVTQQLIRAAEIRASANLAATKMSECVCGQSKRVDFCGKGYHLMSFPQSAPHGVVFLHVTYVPAQEKNFTTAPAICHDGKAHFPREGVFVSNGTHWFVTQRNFYEPQIITTDNTFVSGNCDVVIGIVNNTVYDPLQPELDSGGGGSDIDPYKEFGSSYQLLNFLPLDFFPDLNALVDTATALYEEELTGREHCSPHHTAIRQALVCWDELTKLIAWMSSNITSEQVRTIIVNHVNDTWGLKVRQSLWFHLSCLTFGQHTVQEFLVSFGVWIRTPAPYRPPNAPILSTLPEHTVIC

SEQ ID NO: 11196 - protein, 1297 aa, Artificial Sequence
  SARS-CoV-2/bat/Yunnan/RaTG13/2013__EPI_ISL_402131 spike protein (1-1143)(G885C_L1030C) WhcAg construct
MFVFLVLLPLVSSQCVNLTTRTQLPPAYTNSSTRGVYYPDKVFRSSVLHLTQDLFLPFFSNVTWFHAIHVSGTNGIKRFDNPVLPFNDGVYFASTEKSNIIRGWIFGTTLDSKTQSLLIVNNATNVVIKVCEFQFCNDPFLGVYYHKNNKSWMESEFRVYSSANNCTFEYVSQPFLMDLEGKQGNFKNLREFVFKNIDGYFKIYSKHTPINLVRDLPPGFSALEPLVDLPIGINITRFQTLLALHRSYLTPGDSSSGWTAGAAAYYVGYLQPRTFLLKYNENGTITDAVDCALDPLSETKCTLKSFTVEKGIYQTSNFRVQPTDSIVRFPNITNLCPFGEVFNATTFASVYAWNRKRISNCVADYSVLYNSTSFSTFKCYGVSPTKLNDLCFTNVYADSFVITGDEVRQIAPGQTGKIADYNYKLPDDFTGCVIAWNSKHIDAKEGGNFNYLYRLFRKANLKPFERDISTEIYQAGSKPCNGQTGLNCYYPLYRYGFYPTDGVGHQPYRVVVLSFELLNAPATVCGPKKSTNLVKNKCVNFNFNGLTGTGVLTESNKKFLPFQQFGRDIADTTDAVRDPQTLEILDITPCSFGGVSVITPGTNASNQVAVLYQDVNCTEVPVAIHADQLTPTWRVYSTGSNVFQTRAGCLIGAEHVNNSYECDIPIGAGICASYQTQTNSRSVASQSIIAYTMSLGAENSVAYSNNSIAIPTNFTISVTTEILPVSMTKTSVDCTMYICGDSTECSNLLLQYGSFCTQLNRALTGIAVEQDKNTQEVFAQVKQIYKTPPIKDFGGFNFSQILPDPSKPSKRSFIEDLLFNKVTLADAGFIKQYGDCLGDIAARDLICAQKFNGLTVLPPLLTDEMIAQYTSALLAGTITSGWTFCAGAALQIPFAMQMAYRFNGIGVTQNVLYENQKLIANQFNSAIGKIQDSLSSTASALGKLQDVVNQNAQALNTLVKQLSSNFGAISSVLNDILSRLDKVEAEVQIDRLITGRLQSLQTYVTQQLIRAAEIRASANLAATKMSECVCGQSKRVDFCGKGYHLMSFPQSAPHGVVFLHVTYVPAQEKNFTTAPAICHDGKAHFPREGVFVSNGTHWFVTQRNFYEPQIITTDNTFVSGSCDVVIGIVNNTVYDPLQPELDSGGGGSDIDPYKEFGSSYQLLNFLPLDFFPDLNALVDTATALYEEELTGREHCSPHHTAIRQALVCWDELTKLIAWMSSNITSEQVRTIIVNHVNDTWGLKVRQSLWFHLSCLTFGQHTVQEFLVSFGVWIRTPAPYRPPNAPILSTLPEHTVIC

SEQ ID NO: 11197 - protein, 1301 aa, Artificial Sequence
  SARS-CoV-2/Wuhan/HBCDC-HB-01/2019__EPI_ISL_402132 spike protein (1-1147)(G889C_L1034C) WhcAg construct
MFVFLVLLPLVSSQCVNLTTRTQLPPAYTNSITRGVYYPDKVFRSSVLHSTQDLFLPFFSNVTWFHAIHVSGTNGTKRFDNPVLPFNDGVYFASTEKSNIIRGWIFGTTLDSKTQSLLIVNNATNVVIKVCEFQFCNDPFLGVYYHKNNKSWMESEFRVYSSANNCTFEYVSQPFLMDLEGKQGNFKNLREFVFKNIDGYFKIYSKHTPINLVRDLPQGFSALEPLVDLPIGINITRFQTLLALHRSYLTPGDSSSGWTAGAAAYYVGYLQPRTFLLKYNENGTITDAVDCALDPLSETKCTLKSFTVEKGIYQTSNFRVQPTESIVRFPNITNLCPFGEVFNATRFASVYAWNRKRISNCVADYSVLYNSASFSTFKCYGVSPTKLNDLCFTNVYADSFVIRGDEVRQIAPGQTGKIADYNYKLPDDFTGCVIAWNSNNLDSKVGGNYNYLYRLFRKSNLKPFERDISTEIYQAGSTPCNGVEGFNCYFPLQSYGFQPTNGVGYQPYRVVVLSFELLHAPATVCGPKKSTNLVKNKCVNFNFNGLTGTGVLTESNKKFLPFQQFGRDIADTTDAVRDPQTLEILDITPCSFGGVSVITPGTNTSNQVAVLYQDVNCTEVPVAIHADQLTPTWRVYSTGSNVFQTRAGCLIGAEHVNNSYECDIPIGAGICASYQTQTNSPRRARSVASQSIIAYTMSLGAENSVAYSNNSIAIPTNFTISVTTEILPVSMTKTSVDCTMYICGDSTECSNLLLQYGSFCTQLNRALTGIAVEQDKNTQEVFAQVKQIYKTPPIKDFGGFNFSQILPDPSKPSKRSFIEDLLFNKVTLADAGFIKQYGDCLGDIAARDLICAQKFNGLTVLPPLLTDEMIAQYTSALLAGTITSGWTFCAGAALQIPFAMQMAYRFNGIGVTQNVLYENQKLIANQFNSAIGKIQDSLSSTASALGKLQDVVNQNAQALNTLVKQLSSNFGAISSVLNDILSRLDKVEAEVQIDRLITGRLQSLQTYVTQQLIRAAEIRASANLAATKMSECVCGQSKRVDFCGKGYHLMSFPQSAPHGVVFLHVTYVPAQEKNFTTAPAICHDGKAHFPREGVFVSNGTHWFVTQRNFYEPQIITTDNTFVSGNCDVVIGIVNNTVYDPLQPELDSGGGGSDIDPYKEFGSSYQLLNFLPLDFFPDLNALVDTATALYEEELTGREHCSPHHTAIRQALVCWDELTKLIAWMSSNITSEQVRTIIVNHVNDTWGLKVRQSLWFHLSCLTFGQHTVQEFLVSFGVWIRTPAPYRPPNAPILSTLPEHTVIC

SEQ ID NO: 11198 - protein, 1301 aa, Artificial Sequence
  SARS-CoV-2/Guangdong/20SF028/2020__EPI_ISL_403936 spike protein (1-1147)(G889C_L1034C) WhcAg construct
MFVFLVLLPLVSSQCVNLTTRTQLPPAYTNSFTRGVYYPDKVFRSSVLYSTQDLFLPFFSNVTWFHAIHVSGTNGTKRFDNPVLPFNDGVYFASTEKSNIIRGWIFGTTLDSKTQSLLIVNNATNVVIKVCEFQFCNDPFLGVYYHKNNKSWMESEFRVYSSANNCTFEYVSQPFLMDLEGKQGNFKNLREFVFKNIDGYFKIYSKHTPINLVRDLPQGFSALEPLVDLPIGINITRFQTLLALHRSYLTPGDSSSGWTAGAAAYYVGYLQPRTFLLKYNENGTITDAVDCALDPLSETKCTLKSFTVEKGIYQTSNFRVQPTESIVRFPNITNLCPFGEVFNATRFASVYAWNRKRISNCVADYSVLYNSASFSTFKCYGVSPTKLNDLCFTNVYADSFVIRGDEVRQIAPGQTGKIADYNYKLPDDFTGCVIAWNSNNLDSKVGGNYNYLYRLFRKSNLKPFERDISTEIYQAGSTPCNGVEGFNCYFPLQSYGFQPTNGVGYQPYRVVVLSFELLHAPATVCGPKKSTNLVKNKCVNFNFNGLTGTGVLTESNKKFLPFQQFGRDIADTTDAVRDPQTLEILDITPCSFGGVSVITPGTNTSNQVAVLYQDVNCTEVPVAIHADQLTPTWRVYSTGSNVFQTRAGCLIGAEHVNNSYECDIPIGAGICASYQTQTNSPRRARSVASQSIIAYTMSLGAENSVAYSNNSIAIPTNFTISVTTEILPVSMTKTSVDCTMYICGDSTECSNLLLQYGSFCTQLNRALTGIAVEQDKNTQEVFAQVKQIYKTPPIKDFGGFNFSQILPDPSKPSKRSFIEDLLFNKVTLADAGFIKQYGDCLGDIAARDLICAQKFNGLTVLPPLLTDEMIAQYTSALLAGTITSGWTFCAGAALQIPFAMQMAYRFNGIGVTQNVLYENQKLIANQFNSAIGKIQDSLSSTASALGKLQDVVNQNAQALNTLVKQLSSNFGAISSVLNDILSRLDKVEAEVQIDRLITGRLQSLQTYVTQQLIRAAEIRASANLAATKMSECVCGQSKRVDFCGKGYHLMSFPQSAPHGVVFLHVTYVPAQEKNFTTAPAICHDGKAHFPREGVFVSNGTHWFVTQRNFYEPQIITTDNTFVSGNCDVVIGIVNNTVYDPLQPELDSGGGGSDIDPYKEFGSSYQLLNFLPLDFFPDLNALVDTATALYEEELTGREHCSPHHTAIRQALVCWDELTKLIAWMSSNITSEQVRTIIVNHVNDTWGLKVRQSLWFHLSCLTFGQHTVQEFLVSFGVWIRTPAPYRPPNAPILSTLPEHTVIC

SEQ ID NO: 11199 - protein, 1301 aa, Artificial Sequence
  SARS-CoV-2/Shenzhen/SZTH-001/2020__EPI_ISL_406592 spike protein (1-1147)(G889C_L1034C) WhcAg construct
MFVFLVLLPLVSSQCVNLTTRTQLPPAYTNSFTRGVYYPDKVFRSSVLHSTQDLFLPFFSNVTWFHAIHVSGTNGTKRFDNPVLPFNDGVYFASTEKSNIIRGWIFGTTLDSKTQSLLIVNNATNVVIKVCEFQFCNDPFLGVYYHKNNKSWMESEFRVYSSANNCTFEYVSQPFLMDLEGKQGNFKNLREFVFKNIDGYFKIYSKHTPINLVRDLPQGFSALEPLVDLPIGINITRFQTLLALHRSYLTPGDSSSGWTAGAAAYYVGYLQPRTFLLKYNENGTITDAVDCALDPLSETKCTLKSFTVEKGIYQTSNFRVQPTESIVRFPNITNLCPFGEVFNATRFASVYAWNRKRISNCVADYSVLYNSASFSTFKCYGVSPTKLNDLCFTNVYADSFVIRGDEVRQIAPGQTGKIADYNYKLPDDFTGCVIAWNSNNLDSKVGGNYNYLYRLFRKSNLKPFERDISTEIYQAGSTPCNGVEGFNCYFPLQSYGFQPTNGVGYQPYRVVVLSFELLHAPATVCGPKKSTNLVKNKCVNFNFNGLTGTGVLTESNKKFLPFQQFGRDIADTTDAVRDPQTLEILDITPCSFGGVSVITPGTNTSNQVAVLYQDVNCTEVPVAIHADQLTPTWRVYSTGSNVFQTRAGCLIGAEHVNNSYECDIPIGAGICASYQTQTNSPRRARSVASQSIIAYTMSLGAENSVAYSNNSIAIPTNFTISVTTEILPVSMTKTSVDCTMYICGDSTECSNLLLQYGSFCTQLNRALTGIAVEQDKNTQEVFAQVKQIYKTPPIKDFGGFNFSQILPDPSKPSKRSFIEDLLFNKVTLADAGFIKQYGDCLGDIAARDLICAQKFNGLTVLPPLLTDEMIAQYTSALLAGTITSGWTFCAGAALQIPFAMQMAYRFNGIGVTQNVLYENQKLIANQFNSAIGKIQDSLSSTASALGKLQDVVNQNAQALNTLVKQLSSNFGAISSVLNDILSRLDKVEAEVQIDRLITGRLQSLQTYVTQQLIRAAEIRASANLAATKMSECVCGQSKRVDFCGKGYHLMSFPQSAPHGVVFLHVTYVPAQEKNFTTAPAICHDGKAHFPREGVFVSNGTHWFVTQRNFYEPQIITTDNTFVSGNCDVLIGIVNNTVYDPLQPELDSGGGGSDIDPYKEFGSSYQLLNFLPLDFFPDLNALVDTATALYEEELTGREHCSPHHTAIRQALVCWDELTKLIAWMSSNITSEQVRTIIVNHVNDTWGLKVRQSLWFHLSCLTFGQHTVQEFLVSFGVWIRTPAPYRPPNAPILSTLPEHTVIC

SEQ ID NO: 11200 - protein, 1301 aa, Artificial Sequence
  SARS-CoV-2/Shenzhen/SZTH-004/2020__EPI_ISL_406595 spike protein (1-1147)(G889C_L1034C) WhcAg construct
MFVFLVLLPLVSSQCVNLTTRTQLPPAYTNSFTRGVYYPDKVFRSSVLHSTQDLFLPFFSNVTWFHAIHVSGTNGTKRFDNPVLPFNDGVYFASTEKSNIIRGWIFGTTLDSKTQSLLIVNNATNVVIKVCEFQFCNDPFLGVYYHKNNKSWMESEFRVYSSANNCTFEYVSQPFLMDLEGKQGNFKNLREFVFKNIDGYFKIYSKHTPINLVRDLPQGFSALEPLVDLPIGINITRFQTLLALHRSYLTPGDSSSGWTAGAAAYYVGYLQPRTFLLKYNENGTITDAVDCALDPLSETKCTLKSFTVEKGIYQTSNFRVQPTESIVRFPNITNLCPFGEVFNATRFASVYAWDRKRISNCVAYYSVLYNSASFSTFKCYGVSPTKLNDLCFTNVYADSFVIRGDEVRQIAPGQTGKIADYNYKLPDDFTGCVIAWNSNNLDSKVGGNYNYLYRLFRKSNLKPFERDISTEIYQAGSTPCNGVEGFNCYFPLQSYGFQPTNGVGYQPYRVVVLSFELLHAPATVCGPKKSTNLVKNKCVNFNFNGLTGTGVLTESNKKFLPFQQFGRDIADTTDAVRDPQTLEILDITPCSFGGVSVITPGTNTSNQVAVLYQDVNCTEVPVAIHADQLTPTWRVYSTGSNVFQTRAGCLIGAEHVNNSYECDIPIGAGICASYQTQTNSPRRARSVASQSIIAYTMSLGAENSVAYSNNSIAIPTNFTISVTTEILPVSMTKTSVDCTMYICGDSTECSNLLLQYGSFCTQLNRALTGIAVEQDKNTQEVFAQVKQIYKTPPIKDFGGFNFSQILPDPSKPSKRSFIEDLLFNKVTLADAGFIKQYGDCLGDIAARDLICAQKFNGLTVLPPLLTDEMIAQYTSALLAGTITSGWTFCAGAALQIPFAMQMAYRFNGIGVTQNVLYENQKLIANQFNSAIGKIQDSLSSTASALGKLQDVVNQNAQALNTLVKQLSSNFGAISSVLNDILSRLDKVEAEVQIDRLITGRLQSLQTYVTQQLIRAAEIRASANLAATKMSECVCGQSKRVDFCGKGYHLMSFPQSAPHGVVFLHVTYVPAQEKNFTTAPAICHDGKAHFPREGVFVSNGTHWFVTQRNFYEPQIITTDNTFVSGNCDVVIGIVNNTVYDPLQPELDSGGGGSDIDPYKEFGSSYQLLNFLPLDFFPDLNALVDTATALYEEELTGREHCSPHHTAIRQALVCWDELTKLIAWMSSNITSEQVRTIIVNHVNDTWGLKVRQSLWFHLSCLTFGQHTVQEFLVSFGVWIRTPAPYRPPNAPILSTLPEHTVIC

SEQ ID NO: 11201 - protein, 1301 aa, Artificial Sequence
  SARS-CoV-2/France/IDF0372/2020__EPI_ISL_406596 spike protein (1-1147)(G889C_L1034C) WhcAg construct
MFVFLVLLPLVSSQCVNLTTRTQLPPAYTNSFTRGVYYPDKVFRSSVLHSTQDLFLPFFSNVTWFHAIHVSGTNGTKRFDNPVLPFNDGVYFASTEKSNIIRGWIFGTTLDSKTQSLLIVNNATNVVIKVCEFQFCNDPFLGVYYHKNNKSWMESEFRVYSSANNCTFEYVSQPFLMDLEGKQGNFKNLREFVFKNIDGYFKIYSKHTPINLVRDLPQGFSALEPLVDLPIGINITRFQTLLALHRSYLTPGDSSSGWTAGAAAYYVGYLQPRTFLLKYNENGTITDAVDCALDPLSETKCTLKSFTVEKGIYQTSNFRVQPTESIVRFPNITNLCPFGEVFNATRFASVYAWNRKRISNCVADYSFLYNSASFSTFKCYGVSPTKLNDLCFTNVYADSFVIRGDEVRQIAPGQTGKIADYNYKLPDDFTGCVIAWNSNNLDSKVGGNYNYLYRLFRKSNLKPFERDISTEIYQAGSTPCNGVEGFNCYFPLQSYGFQPTNGVGYQPYRVVVLSFELLHAPATVCGPKKSTNLVKNKCVNFNFNGLTGTGVLTESNKKFLPFQQFGRDIADTTDAVRDPQTLEILDITPCSFGGVSVITPGTNTSNQVAVLYQDVNCTEVPVAIHADQLTPTWRVYSTGSNVFQTRAGCLIGAEHVNNSYECDIPIGAGICASYQTQTNSPRRARSVASQSIIAYTMSLGAENSVAYSNNSIAIPTNFTISVTTEILPVSMTKTSVDCTMYICGDSTECSNLLLQYGSFCTQLNRALTGIAVEQDKNTQEVFAQVKQIYKTPPIKDFGGFNFSQILPDPSKPSKRSFIEDLLFNKVTLADAGFIKQYGDCLGDIAARDLICAQKFNGLTVLPPLLTDEMIAQYTSALLAGTITSGWTFCAGAALQIPFAMQMAYRFNGIGVTQNVLYENQKLIANQFNSAIGKIQDSLSSTASALGKLQDVVNQNAQALNTLVKQLSSNFGAISSVLNDILSRLDKVEAEVQIDRLITGRLQSLQTYVTQQLIRAAEIRASANLAATKMSECVCGQSKRVDFCGKGYHLMSFPQSAPHGVVFLHVTYVPAQEKNFTTAPAICHDGKAHFPREGVFVSNGTHWFVTQRNFYEPQIITTDNTFVSGNCDVVIGIVNNTVYDPLQPELDSGGGGSDIDPYKEFGSSYQLLNFLPLDFFPDLNALVDTATALYEEELTGREHCSPHHTAIRQALVCWDELTKLIAWMSSNITSEQVRTIIVNHVNDTWGLKVRQSLWFHLSCLTFGQHTVQEFLVSFGVWIRTPAPYRPPNAPILSTLPEHTVIC

SEQ ID NO: 11202 - protein, 1301 aa, Artificial Sequence
  SARS-CoV-2/Australia/VIC01/2020__EPI_ISL_406844 spike protein (1-1147)(G889C_L1034C) WhcAg construct
MFVFLVLLPLVSSQCVNLTTRTQLPPAYTNSFTRGVYYPDKVFRSSVLHSTQDLFLPFFSNVTWFHAIHVSGTNGTKRFDNPVLPFNDGVYFASTEKSNIIRGWIFGTTLDSKTQSLLIVNNATNVVIKVCEFQFCNDPFLGVYYHKNNKSWMESEFRVYSSANNCTFEYVSQPFLMDLEGKQGNFKNLREFVFKNIDGYFKIYSKHTPINLVRDLPQGFSALEPLVDLPIGINITRFQTLLALHRRYLTPGDSSSGWTAGAAAYYVGYLQPRTFLLKYNENGTITDAVDCALDPLSETKCTLKSFTVEKGIYQTSNFRVQPTESIVRFPNITNLCPFGEVFNATRFASVYAWNRKRISNCVADYSVLYNSASFSTFKCYGVSPTKLNDLCFTNVYADSFVIRGDEVRQIAPGQTGKIADYNYKLPDDFTGCVIAWNSNNLDSKVGGNYNYLYRLFRKSNLKPFERDISTEIYQAGSTPCNGVEGFNCYFPLQSYGFQPTNGVGYQPYRVVVLSFELLHAPATVCGPKKSTNLVKNKCVNFNFNGLTGTGVLTESNKKFLPFQQFGRDIADTTDAVRDPQTLEILDITPCSFGGVSVITPGTNTSNQVAVLYQDVNCTEVPVAIHADQLTPTWRVYSTGSNVFQTRAGCLIGAEHVNNSYECDIPIGAGICASYQTQTNSPRRARSVASQSIIAYTMSLGAENSVAYSNNSIAIPTNFTISVTTEILPVSMTKTSVDCTMYICGDSTECSNLLLQYGSFCTQLNRALTGIAVEQDKNTQEVFAQVKQIYKTPPIKDFGGFNFSQILPDPSKPSKRSFIEDLLFNKVTLADAGFIKQYGDCLGDIAARDLICAQKFNGLTVLPPLLTDEMIAQYTSALLAGTITSGWTFCAGAALQIPFAMQMAYRFNGIGVTQNVLYENQKLIANQFNSAIGKIQDSLSSTASALGKLQDVVNQNAQALNTLVKQLSSNFGAISSVLNDILSRLDKVEAEVQIDRLITGRLQSLQTYVTQQLIRAAEIRASANLAATKMSECVCGQSKRVDFCGKGYHLMSFPQSAPHGVVFLHVTYVPAQEKNFTTAPAICHDGKAHFPREGVFVSNGTHWFVTQRNFYEPQIITTDNTFVSGNCDVVIGIVNNTVYDPLQPELDSGGGGSDIDPYKEFGSSYQLLNFLPLDFFPDLNALVDTATALYEEELTGREHCSPHHTAIRQALVCWDELTKLIAWMSSNITSEQVRTIIVNHVNDTWGLKVRQSLWFHLSCLTFGQHTVQEFLVSFGVWIRTPAPYRPPNAPILSTLPEHTVIC

SEQ ID NO: 11203 - protein, 1301 aa, Artificial Sequence
  SARS-CoV-2/Germany/BavPat1/2020__EPI_ISL_406862 spike protein (1-1147)(G889C_L1034C) WhcAg construct
MFVFLVLLPLVSSQCVNLTTRTQLPPAYTNSFTRGVYYPDKVFRSSVLHSTQDLFLPFFSNVTWFHAIHVSGTNGTKRFDNPVLPFNDGVYFASTEKSNIIRGWIFGTTLDSKTQSLLIVNNATNVVIKVCEFQFCNDPFLGVYYHKNNKSWMESEFRVYSSANNCTFEYVSQPFLMDLEGKQGNFKNLREFVFKNIDGYFKIYSKHTPINLVRDLPQGFSALEPLVDLPIGINITRFQTLLALHRSYLTPGDSSSGWTAGAAAYYVGYLQPRTFLLKYNENGTITDAVDCALDPLSETKCTLKSFTVEKGIYQTSNFRVQPTESIVRFPNITNLCPFGEVFNATRFASVYAWNRKRISNCVADYSVLYNSASFSTFKCYGVSPTKLNDLCFTNVYADSFVIRGDEVRQIAPGQTGKIADYNYKLPDDFTGCVIAWNSNNLDSKVGGNYNYLYRLFRKSNLKPFERDISTEIYQAGSTPCNGVEGFNCYFPLQSYGFQPTNGVGYQPYRVVVLSFELLHAPATVCGPKKSTNLVKNKCVNFNFNGLTGTGVLTESNKKFLPFQQFGRDIADTTDAVRDPQTLEILDITPCSFGGVSVITPGTNTSNQVAVLYQGVNCTEVPVAIHADQLTPTWRVYSTGSNVFQTRAGCLIGAEHVNNSYECDIPIGAGICASYQTQTNSPRRARSVASQSIIAYTMSLGAENSVAYSNNSIAIPTNFTISVTTEILPVSMTKTSVDCTMYICGDSTECSNLLLQYGSFCTQLNRALTGIAVEQDKNTQEVFAQVKQIYKTPPIKDFGGFNFSQILPDPSKPSKRSFIEDLLFNKVTLADAGFIKQYGDCLGDIAARDLICAQKFNGLTVLPPLLTDEMIAQYTSALLAGTITSGWTFCAGAALQIPFAMQMAYRFNGIGVTQNVLYENQKLIANQFNSAIGKIQDSLSSTASALGKLQDVVNQNAQALNTLVKQLSSNFGAISSVLNDILSRLDKVEAEVQIDRLITGRLQSLQTYVTQQLIRAAEIRASANLAATKMSECVCGQSKRVDFCGKGYHLMSFPQSAPHGVVFLHVTYVPAQEKNFTTAPAICHDGKAHFPREGVFVSNGTHWFVTQRNFYEPQIITTDNTFVSGNCDVVIGIVNNTVYDPLQPELDSGGGGSDIDPYKEFGSSYQLLNFLPLDFFPDLNALVDTATALYEEELTGREHCSPHHTAIRQALVCWDELTKLIAWMSSNITSEQVRTIIVNHVNDTWGLKVRQSLWFHLSCLTFGQHTVQEFLVSFGVWIRTPAPYRPPNAPILSTLPEHTVIC

SEQ ID NO: 11204 - protein, 1301 aa, Artificial Sequence
  SARS-CoV-2/Wuhan/HBCDC-HB-02/2020__EPI_ISL_412978 spike protein (1-1147)(G889C_L1034C) WhcAg construct
MFVFLVLLPLVSSQCVNLTTRTQLPPAYTNSFTRGVYYPDKVFRSSVLHSTQDLFLPFFSNVTWFHAIHVSGTNGTKRFDNPVLPFNDGVYFASTEKSNIIRGWIFGTTLDSKTQSLLIVNNATNVVIKVCEFQFCNDPFLGVYYHKNNKSWMESEFRVYSSANNCTFEYVSQPFLMDLEGKQGNFKNLREFVFKNIDGYFKIYSKHTPINLVRDLPQGFSALEPLVDLPIGINITRFQTLLALHRSYLTPGDSSSGWTAGAAAYYVGYLQPRTFLLKYNENGTITDAVDCALDPLSETKCTLKSFTVEKGIYQTSNFRVQPTESIVRFPNITNLCPFGEVFNATRFASVYAWNRKRISNCVADYSVLYNSASFSTFKCYGVSPTKLNDLCFTNVYADSFVIRGDEVRQIAPGQTGKIADYNYKLPDDFTGCVIAWNSNNLDSKVGGNYNYLYRLFRKSNLKPFERDISTEIYQAGSTPCNGVEGFNCYFPLQSYGFQPTNGVGYQPYRVVVLSFELLHAPATVCGPKKSTNLVKNKCVNFNFNGLTGTGVLTESNKKFLPFQQFGRDIADTTDAVRDPQTLEILDITPCSFGGVSVITPGTNTSNQVAVLYQDVNCTEVPVAIHADQLTPTWRVYSTGSNVFQTRAGCLIGAEHVNNSYECDIPIGAGICASYQTQTNSPRRARSVASQSIIAYTMSLGAENSVAYSNNSIAIPTNFTISVTTEILPVSMTKTSVDCTMYICGDSTECSNFLLQYGSFCTQLNRALTGIAVEQDKNTQEVFAQVKQIYKTPPIKDFGGFNFSQILPDPSKPSKRSFIEDLLFNKVTLADAGFIKQYGDCLGDIAARDLICAQKFNGLTVLPPLLTDEMIAQYTSALLAGTITSGWTFCAGAALQIPFAMQMAYRFNGIGVTQNVLYENQKLIANQFNSAIGKIQDSLSSTASALGKLQDVVNQNAQALNTLVKQLSSNFGAISSVLNDILSRLDKVEAEVQIDRLITGRLQSLQTYVTQQLIRAAEIRASANLAATKMSECVCGQSKRVDFCGKGYHLMSFPQSAPHGVVFLHVTYVPAQEKNFTTAPAICHDGKAHFPREGVFVSNGTHWFVTQRNFYEPQIITTDNTFVSGNCDVVIGIVNNTVYDPLQPELDSGGGGSDIDPYKEFGSSYQLLNFLPLDFFPDLNALVDTATALYEEELTGREHCSPHHTAIRQALVCWDELTKLIAWMSSNITSEQVRTIIVNHVNDTWGLKVRQSLWFHLSCLTFGQHTVQEFLVSFGVWIRTPAPYRPPNAPILSTLPEHTVIC

SEQ ID NO: 11205 - protein, 1301 aa, Artificial Sequence
  SARS-CoV-2/Australia/QLD02/2020__EPI_ISL_407896 spike protein (1-1147)(G889C_L1034C) WhcAg construct
MFVFLVLLPLVSSQCVNLTTRTQLPPAYTNSFTRGVYYPDKVFRSSVLHSTQDLFLPFFSNVTWFHAIHVSGTNGTKRFDNPVLPFNDGVYFASTEKSNIIRGWIFGTTLDSKTQSLLIVNNATNVVIKVCEFQFCNDPFLGVYYHKNNKSWMESEFRVYSSANNCTFEYVSQPFLMDLEGKQGNFKNLREFVFKNIDGYFKIYSKHTPINLVRDLPQGFSALEPLVDLPIGINITRFQTLLALHRSYLTPGDSSSGWTAGAAAYYVGYLQPRTFLLKYNENGTITDAVDCALDPLSETKCTLKSFTVEKGIYQTSNFRVQPTESIVRFPNITNLCPFGEVFNATRFASVYAWNRKRISNCVADYSVLYNSASFSTFKCYGVSPTKLNDLCFTNVYADSFVIRGDEVRQIAPGQTGKIADYNYKLPDDFTGCVIAWNSNNLDSKVGGNYNYLYRLFRKSNLKPFERDISTEIYQAGSTPCNGVEGFNCYFPLQSYGFQPTNGVGYQPYRVVVLSFELLHAPATVCGPKKSTNLVKNKCVNFNFNGLTGTGVLTESNKKFLPFQQFGRDIADTTDAVRDPQTLEILDITPCSFGGVSVITPGTNTSNQVAVLYQDVNCTEVPVAIHADQLTPTWRVYSTGSNVFQTRAGCLIGAEHVNNSYECDIPIGAGICASYQTQTNSPRRARSVASQSIIAYTMSLGAENSVAYSNNSIAIPTNFTISVTTEILPVSMTKTSVDCTMYICGDSTECSNLLLQYGSFCTQLNRALTGIAVEQDKNTQEVFAQVKQIYKTPPIKDFGGFNFSQILPDPSKPSKRSFIEDLLFNKVTLADAGFIKQYGDCLGDIAARDLICAQKFNGLTVLPPLLTDEMIAQYTSALLAGTITSGWTFCAGAALQIPFAMQMAYRFNGIGVTQNVLYENQKLIANQFNSAIGKIQDSLSSTASALGKLQDVVNQNAQALNTLVKQLSSNFGAISSVLNDILSRLDKVEAEVQIDRLITGRLQSLQTYVTQQLIRAAEIRASANLAATKMSECVCGQSKRVDFCGKGYHLMSFPQSAPHGVVFLHVTYVPAQEKNFTTAPAICHDGKAHFPREGVFVSNGTHWFVTQRNFYEPQIITTDNTFVSGNCDVVIGIVNNTVYDPLQLELDSGGGGSDIDPYKEFGSSYQLLNFLPLDFFPDLNALVDTATALYEEELTGREHCSPHHTAIRQALVCWDELTKLIAWMSSNITSEQVRTIIVNHVNDTWGLKVRQSLWFHLSCLTFGQHTVQEFLVSFGVWIRTPAPYRPPNAPILSTLPEHTVIC

SEQ ID NO: 11206 - protein, 1301 aa, Artificial Sequence
  SARS-CoV-2/India/1-31/2020__EPI_ISL_413523 spike protein (1-1147)(G889C_L1034C) WhcAg construct
MFVFLVLLPLVSSQCVNLTTRTQLPPAYTNSFTRGVYYPDKVFRSSVLHSTQDLFLPFFSNVTWFHAIHVSGTNGTKRFDNPVLPFNDGVYFASTEKSNIIRGWIFGTTLDSKTQSLLIVNNATNVVIKVCEFQFCNDPFLGVYYHKNNKSWMESEFRVYSSANNCTFEYVSQPFLMDLEGKQGNFKNLREFVFKNIDGYFKIYSKHTPINLVRDLPQGFSALEPLVDLPIGINITRFQTLLALHRSYLTPGDSSSGWTAGAAAYYVGYLQPRTFLLKYNENGTITDAVDCALDPLSETKCTLKSFTVEKGIYQTSNFRVQPTESIVRFPNITNLCPFGEVFNATRFASVYAWNRKRISNCVADYSVLYNSASFSTFKCYGVSPTKLNDLCFTNVYADSFVIRGDEVRQIAPGQTGKIADYNYKLPDDFTGCVIAWNSNNLDSKVGGNYNYLYRLFRKSNLKPFERDISTEIYQAGSTPCNGVEGFNCYFPLQSYGFQPTNGVGYQPYRVVVLSFELLHAPATVCGPKKSTNLVKNKCVNFNFNGLTGTGVLTESNKKFLPFQQFGRDIADTTDAVRDPQTLEILDITPCSFGGVSVITPGTNTSNQVAVLYQDVNCTEVPVAIHADQLTPTWRVYSTGSNVFQTRAGCLIGAEHVNNSYECDIPIGAGICASYQTQTNSPRRARSVASQSIIAYTMSLGAENSVAYSNNSIAIPTNFTISVTTEILPVSMTKTSVDCTMYICGDSTECSNLLLQYGSFCTQLNRALTGIAVEQDKNTQEVFAQVKQIYKTPPIKDFGGFNFSQILPDPSKPSKRSFIEDLLFNKVTLADAGFIKQYGDCLGDIAARDLICAQKFNGLTVLPPLLTDEMIAQYTSALLAGTITSGWTFCAGAALQIPFAMQMAYRFNGIGVTQNVLYENQKLIANQFNSVIGKIQDSLSSTASALGKLQDVVNQNAQALNTLVKQLSSNFGAISSVLNDILSRLDKVEAEVQIDRLITGRLQSLQTYVTQQLIRAAEIRASANLAATKMSECVCGQSKRVDFCGKGYHLMSFPQSAPHGVVFLHVTYVPAQEKNFTTAPAICHDGKAHFPREGVFVSNGTHWFVTQRNFYEPQIITTDNTFVSGNCDVVIGIVNNTVYDPLQPELDSGGGGSDIDPYKEFGSSYQLLNFLPLDFFPDLNALVDTATALYEEELTGREHCSPHHTAIRQALVCWDELTKLIAWMSSNITSEQVRTIIVNHVNDTWGLKVRQSLWFHLSCLTFGQHTVQEFLVSFGVWIRTPAPYRPPNAPILSTLPEHTVIC

SEQ ID NO: 11207 - protein, 1301 aa, Artificial Sequence
  SARS-CoV-2/Guangdong/GD2020087-P0008/2020__EPI_ISL_413863 spike protein (1-1147)(G889C_L1034C) WhcAg construct
MFVFLVLLPLVSSQCVNLTTRTQLPPAYTNSFTRGVYYPDKVFRSSVLHSTQDLFLPFFSNVTWFHAIHVSGTNGTKRFDNPVLPFNDGVYFASTEKSNIIRGWIFGTTLDSKTQSLLIVNNATNVVIKVCEFQFCNDPFLGVYYHKNNKSWMESEFRVYSSANNCTFEYVSQPFLMDLEGKQGNFKNLREFVFKNIDGYFKIYSKHTPINLVRDLPQGFSALEPLVDLPIGINITRFQTLLALHRSYLTPGDSSSGWTAGAAAYYVGYLQPRTFLLKYNENGTITDAVDCALDPLSETKCTLKSFTVEKGIYQTSNFRVQPTESIVRFPNITNLCPFGEVFNATRFASVYAWNRKRISNCVADYSVLYNSASFSTFKCYGVSPTKLNDLCFTNVYADSFVIRGDEVREIAPGQTGKIADYNYKLPDDFTGCVIAWNSNNLDSKVGGNYNYLYRLFRKSNLKPFERDISTEIYQAGSTPCNGVEGFNCYFPLQSYGFQPTNGVGYQPYRVVVLSFELLHAPATVCGPKKSTNLVKNKCVNFNFNGLTGTGVLTESNKKFLPFQQFGRDIADTTDAVRDPQTLEILDITPCSFGGVSVITPGTNTSNQVAVLYQDVNCTEVPVAIHADQLTPTWRVYSTGSNVFQTRAGCLIGAEHVNNSYECDIPIGAGICASYQTQTNSPRRARSVASQSIIAYTMSLGAENSVAYSNNSIAIPTNFTISVTTEILPVSMTKTSVDCTMYICGDSTECSNLLLQYGSFCTQLNRALTGIAVEQDKNTQEVFAQVKQIYKTPPIKDFGGFNFSQILPDPSKPSKRSFIEDLLFNKVTLADAGFIKQYGDCLGDIAARDLICAQKFNGLTVLPPLLTDEMIAQYTSALLAGTITSGWTFCAGAALQIPFAMQMAYRFNGIGVTQNVLYENQKLIANQFNSAIGKIQDSLSSTASALGKLQDVVNQNAQALNTLVKQLSSNFGAISSVLNDILSRLDKVEAEVQIDRLITGRLQSLQTYVTQQLIRAAEIRASANLAATKMSECVCGQSKRVDFCGKGYHLMSFPQSAPHGVVFLHVTYVPAQEKNFTTAPAICHDGKAHFPREGVFVSNGTHWFVTQRNFYEPQIITTDNTFVSGNCDVVIGIVNNTVYDPLQPELDSGGGGSDIDPYKEFGSSYQLLNFLPLDFFPDLNALVDTATALYEEELTGREHCSPHHTAIRQALVCWDELTKLIAWMSSNITSEQVRTIIVNHVNDTWGLKVRQSLWFHLSCLTFGQHTVQEFLVSFGVWIRTPAPYRPPNAPILSTLPEHTVIC

SEQ ID NO: 11208 - protein, 1301 aa, Artificial Sequence
  SARS-CoV-2/Sweden/01/2020__EPI_ISL_411951 spike protein (1-1147)(G889C_L1034C) WhcAg construct
MFVFLVLLPLVSSQCVNLTTRTQLPPAYTNSFTRGVYYPDKVFRSSVLHSTQDLFLPFFSNVTWFHAIHVSGTNGTKRFDNPVLPFNDGVYFASTEKSNIIRGWIFGTTLDSKTQSLLIVNNATNVVIKVCEFQFCNDPFLGVYYHKNNKSWMESEFRVYSSANNCTFEYVSQPFLMDLEGKQGNFKNLREFVFKNIDGYFKIYSKHTPINLVRDLPQGFSALEPLVDLPIGINITRFQTLLALHRSYLTPGDSSSGWTAGAAAYYVGYLQPRTFLLKYNENGTITDAVDCALDPLSETKCTLKSFTVEKGIYQTSNFRVQPTESIVRFPNITNLCPFGEVFNATRFASVYAWNRKRISNCVADYSVLYNSASFSTFKCYGVSPTKLNDLCFTNVYADSFVIRGDEVRQIAPGQTGKIADYNYKLPDDFTGCVIAWNSNNLDSKVGGNYNYLYRLFRKSNLKPFERDISTEIYQAGSTPCNGVEGFNCYFPLQSYGFQPTNGVGYQPYRVVVLSFELLHAPATVCGPKKSTNLVKNKCVNFNFNGLTGTGVLTESNKKFLPFQQFGRDIADTTDAVRDPQTLEILDITPCSFGGVSVITPGTNTSNQVAVLYQDVNCTEVPVAIHADQLTPTWRVYSTGSNVFQTRAGCLIGAEHVNNSYECDIPIGAGICASYQTQTNSPRRARSVASQSIIAYTMSLGAENSVAYSNNSIAIPTNFTISVTTEILPVSMTKTSVDCTMYICGDSTECSNLLLQYGSFCTQLNRALTGIAVEQDKNTQEVFAQVKQIYKTPPIKDCGGFNFSQILPDPSKPSKRSFIEDLLFNKVTLADAGFIKQYGDCLGDIAARDLICAQKFNGLTVLPPLLTDEMIAQYTSALLAGTITSGWTFCAGAALQIPFAMQMAYRFNGIGVTQNVLYENQKLIANQFNSAIGKIQDSLSSTASALGKLQDVVNQNAQALNTLVKQLSSNFGAISSVLNDILSRLDKVEAEVQIDRLITGRLQSLQTYVTQQLIRAAEIRASANLAATKMSECVCGQSKRVDFCGKGYHLMSFPQSAPHGVVFLHVTYVPAQEKNFTTAPAICHDGKAHFPREGVFVSNGTHWFVTQRNFYEPQIITTDNTFVSGNCDVVIGIVNNTVYDPLQPELDSGGGGSDIDPYKEFGSSYQLLNFLPLDFFPDLNALVDTATALYEEELTGREHCSPHHTAIRQALVCWDELTKLIAWMSSNITSEQVRTIIVNHVNDTWGLKVRQSLWFHLSCLTFGQHTVQEFLVSFGVWIRTPAPYRPPNAPILSTLPEHTVIC

SEQ ID NO: 11209 - protein, 1301 aa, Artificial Sequence
  SARS-CoV-2/Tianmen/HBCDC-HB-07/2020__EPI_ISL_412983 spike protein (1-1147)(G889C_L1034C) WhcAg construct
MFVFLVLLPLVSSQCVNLTTRTQLPPAYTNSFTRGVYYPDKVFRSSVLHSTQDLFLPFFSNVTWFHAIHVSGTNGTKRFDNPVLPFNDGVYFASTEKSNIIRGWIFGTTLDSKTQSLLIVNNATNVVIKVCEFQFCNDPFLGVYYHKNNKSWMESEFRVYSSANNCTFEYVSQPFLMDLEGKQGNFKNLREFVFKNIDGYFKIYSKHTPINLVRDLPQGFSALEPLVDLPIGINITRFQTLLALHRSYLTPGDSSSGWTAGAAAYYVGYLQPRTFLLKYNENGTITDAVDCALDPLSETKCTLKSFTVEKGIYQTSNFRVQPTESIVRFPNITNLCPFGEVFNATRFASVYAWNRKRISNCVADYSVLYNSASFSTFKCYGVSPTKLNDLCFTNVYADSFVIRGDEVRQIAPGQTGKIADYNYKLPDDFTGCVIAWNSNNLDSKVGGNYNYLYRLFRKSNLKPFERDISTEIYQAGSTPCNGVEGFNCYFPLQSYGFQPTNGVGYQPYRVVVLSFELLHAPATVCGPKKSTNLVKNKCVNFNFNGLTGTGVLTESNKKFLPFQQFGRDIADTTDAVRDPQTLEILDITPCSFGGVSVITPGTNTSNQVAVLYQDLNCTEVPVAIHADQLTPTWRVYSTGSNVFQTRAGCLIGAEHVNNSYECDIPIGAGICASYQTQTNSPRRARSVASQSIIAYTMSLGAENSVAYSNNSIAIPTNFTISVTTEILPVSMTKTSVDCTMYICGDSTECSNLLLQYGSFCTQLNRALTGIAVEQDKNTQEVFAQVKQIYKTPPIKDFGGFNFSQILPDPSKPSKRSFIEDLLFNKVTLADAGFIKQYGDCLGDIAARDLICAQKFNGLTVLPPLLTDEMIAQYTSALLAGTITSGWTFCAGAALQIPFAMQMAYRFNGIGVTQNVLYENQKLIANQFNSAIGKIQDSLSSTASALGKLQDVVNQNAQALNTLVKQLSSNFGAISSVLNDILSRLDKVEAEVQIDRLITGRLQSLQTYVTQQLIRAAEIRASANLAATKMSECVCGQSKRVDFCGKGYHLMSFPQSAPHGVVFLHVTYVPAQEKNFTTAPAICHDGKAHFPREGVFVSNGTHWFVTQRNFYEPQIITTDNTFVSGNCDVVIGIVNNTVYDPLQPELDSGGGGSDIDPYKEFGSSYQLLNFLPLDFFPDLNALVDTATALYEEELTGREHCSPHHTAIRQALVCWDELTKLIAWMSSNITSEQVRTIIVNHVNDTWGLKVRQSLWFHLSCLTFGQHTVQEFLVSFGVWIRTPAPYRPPNAPILSTLPEHTVIC

SEQ ID NO: 11210 - protein, 1301 aa, Artificial Sequence
  SARS-CoV-2/Hong Kong/case42_VM20002493/2020__EPI_ISL_414527 spike protein (1-1147)(G889C_L1034C) WhcAg construct
MFVFLVLLPLVSSQCVNLTTRTQLPPAYTNSFTRGVYYPDKVFRSSVLHSTQDLFLPFFSNVTWFHAIHVSGTNGTKRFDNPVLPFNDGVYFASTEKSNIIRGWIFGTTLDSKTQSLLIVNNATNVVIKVCEFQFCNDPFLGVYYHKNNKSWMESEFRVYSSANNCTFEYVSQPFLMDLEGKQGNFKNLREFVFKNIDGYFKIYSKHTPINLVRDLPQGFSALEPLVDLPIGINITRFQTLLALHRSYLTPGDSSSGWTAGAAAYYVGYLQPRTFLLKYNENGTITDAVDCALDPLSETKCTLKSFTVEKGIYQTSNFRVQPTESIVRFPNITNLCPFGEVFNATRFASVYAWNRKRISNCVADYSVLYNSASFSTFKCYGVSPTKLNDLCFTNVYADSFVIRGDEVRQIAPGQTGKIADYNYKLPDDFTGCVIAWNSNNLDSKVGGNYNYLYRLFRKSNLKPFERDISTEIYQAGSTPCNGVEGFNCYFPLQSYGFQPTNGVGYQPYRVVVLSFELLHAPATVCGPKKSTNLVKNKCVNFNFNGLTGTGVLTESNKKFLPFQQFGRDIADTTDAVRDPQTLEILDITPCSFGGVSVITPGTNTSNQVAVLYQDVNCTEVPVAIHADQLTPTWRVYSTGSNVFQTRAGCLIGAEHVNNSYECDIPIGAGICASYQTQTNSPRRARSVASQSIIAYTMSLGAENSVAYSNNSIAIPTNFAISVTTEILPVSMTKTSVDCTMYICGDSTECSNLLLQYGSFCTQLNRALTGIAVEQDKNTQEVFAQVKQIYKTPPIKDFGGFNFSQILPDPSKPSKRSFIEDLLFNKVTLADAGFIKQYGDCLGDIAARDLICAQKFNGLTVLPPLLTDEMIAQYTSALLAGTITSGWTFCAGAALQIPFAMQMAYRFNGIGVTQNVLYENQKLIANQFNSAIGKIQDSLSSTASALGKLQDVVNQNAQALNTLVKQLSSNFGAISSVLNDILSRLDKVEAEVQIDRLITGRLQSLQTYVTQQLIRAAEIRASANLAATKMSECVCGQSKRVDFCGKGYHLMSFPQSAPHGVVFLHVTYVPAQEKNFTTAPAICHDGKAHFPREGVFVSNGTHWFVTQRNFYEPQIITTDNTFVSGNCDVVIGIVNNTVYDPLQPELDSGGGGSDIDPYKEFGSSYQLLNFLPLDFFPDLNALVDTATALYEEELTGREHCSPHHTAIRQALVCWDELTKLIAWMSSNITSEQVRTIIVNHVNDTWGLKVRQSLWFHLSCLTFGQHTVQEFLVSFGVWIRTPAPYRPPNAPILSTLPEHTVIC

SEQ ID NO: 11211 - protein, 1301 aa, Artificial Sequence
  SARS-CoV-2/USA/CruiseA-23/2020__EPI_ISL_414482 spike protein (1-1147)(G889C_L1034C) WhcAg construct
MFVFLVLLPLVSSQCVNLTTRTQLPPAYTNSFTRGVYYPDKVFRSSVLHSTQDLFLPFFSNVTWFHAIHVSGTNGTKRFDNPVLPFNDGVYFASTEKSNIIRGWIFGTTLDSKTQSLLIVNNATNVVIKVCEFQFCNDPFLGVYYHKNNKSWMESEFRVYSSANNCTFEYVSQPFLMDLEVKQGNFKNLREFVFKNIDGYFKIYSKHTPINLVRDLPQGFSALEPLVDLPIGINITRFQTLLALHRSYLTPGDSSSGWTAGAAAYYVGYLQPRTFLLKYNENGTITDAVDCALDPLSETKCTLKSFTVEKGIYQTSNFRVQPTESIVRFPNITNLCPFGEVFNATRFASVYAWNRKRISNCVADYSVLYNSASFSTFKCYGVSPTKLNDLCFTNVYADSFVIRGDEVRQIAPGQTGKIADYNYKLPDDFTGCVIAWNSNNLDSKVGGNYNYLYRLFRKSNLKPFERDISTEIYQAGSTPCNGVEGFNCYFPLQSYGFQPTNGVGYQPYRVVVLSFELLHAPATVCGPKKSTNLVKNKCVNFNFNGLTGTGVLTESNKKFLPFQQFGRDIADTTDAVRDPQTLEILDITPCSFGGVSVITPGTNTSNQVAVLYQDVNCTEVPVAIHADQLTPTWRVYSTGSNVFQTRAGCLIGAEHVNNSYECDIPIGAGICASYQTQTNSPRRARSVASQSIIAYTMSLGAENSVAYSNNSIAIPTNFTISVTTEILPVSMTKTSVDCTMYICGDSTECSNLLLQYGSFCTQLNRALTGIAVEQDKNTQEVFAQVKQIYKTPPIKDFGGFNFSQILPDPSKPSKRSFIEDLLFNKVTLADAGFIKQYGDCLGDIAARDLICAQKFNGLTVLPPLLTDEMIAQYTSALLAGTITSGWTFCAGAALQIPFAMQMAYRFNGIGVTQNVLYENQKLIANQFNSAIGKIQDSLSSTASALGKLQDVVNQNAQALNTLVKQLSSNFGAISSVLNDILSRLDKVEAEVQIDRLITGRLQSLQTYVTQQLIRAAEIRASANLAATKMSECVCGQSKRVDFCGKGYHLMSFPQSAPHGVVFLHVTYVPAQEKNFTTAPAICHDGKAHFPREGVFVSNGTHWFVTQRNFYEPQIITTDNTFVSGNCDVVIGIVNNTVYDPLQPELDSGGGGSDIDPYKEFGSSYQLLNFLPLDFFPDLNALVDTATALYEEELTGREHCSPHHTAIRQALVCWDELTKLIAWMSSNITSEQVRTIIVNHVNDTWGLKVRQSLWFHLSCLTFGQHTVQEFLVSFGVWIRTPAPYRPPNAPILSTLPEHTVIC

SEQ ID NO: 11212 - protein, 1301 aa, Artificial Sequence
  SARS-CoV-2/Hong Kong/case85_VM20002868/2020__EPI_ISL_414519 spike protein (1-1147)(G889C_L1034C) WhcAg construct
MFVFLVLVPLVSSQCVNLTTRTQLPPAYTNSFTRGVYYPDKVFRSSVLHSTQDLFLPFFSNVTWFHAIHVSGTNGTKRFDNPVLPFNDGVYFASTEKSNIIRGWIFGTTLDSKTQSLLIVNNATNVVIKVCEFQFCNDPFLGVYYHKNNKSWMESEFRVYSSANNCTFEYVSQPFLMDLEGKQGNFKNLREFVFKNIDGYFKIYSKHTPINLVRDLPQGFSALEPLVDLPIGINITRFQTLLALHRSYLTPGDSSSGWTAGAAAYYVGYLQPRTFLLKYNENGTITDAVDCALDPLSETKCTLKSFTVEKGIYQTSNFRVQPTESIVRFPNITNLCPFGEVFNATRFASVYAWNRKRISNCVADYSVLYNSASFSTFKCYGVSPTKLNDLCFTNVYADSFVIRGDEVRQIAPGQTGKIADYNYKLPDDFTGCVIAWNSNNLDSKVGGNYNYLYRLFRKSNLKPFERDISTEIYQAGSTPCNGVEGFNCYFPLQSYGFQPTNGVGYQPYRVVVLSFELLHAPATVCGPKKSTNLVKNKCVNFNFNGLTGTGVLTESNKKFLPFQQFGRDIADTTDAVRDPQTLEILDITPCSFGGVSVITPGTNTSNQVAVLYQDVNCTEVPVAIHADQLTPTWRVYSTGSNVFQTRAGCLIGAEHVNNSYECDIPIGAGICASYQTQTNSPRRARSVASQSIIAYTMSLGAENSVAYSNNSIAIPTNFTISVTTEILPVSMTKTSVDCTMYICGDSTECSNLLLQYGSFCTQLNRALTGIAVEQDKNTQEVFAQVKQIYKTPPIKDFGGFNFSQILPDPSKPSKRSFIEDLLFNKVTLADAGFIKQYGDCLGDIAARDLICAQKFNGLTVLPPLLTDEMIAQYTSALLAGTITSGWTFCAGAALQIPFAMQMAYRFNGIGVTQNVLYENQKLIANQFNSAIGKIQDSLSSTASALGKLQDVVNQNAQALNTLVKQLSSNFGAISSVLNDILSRLDKVEAEVQIDRLITGRLQSLQTYVTQQLIRAAEIRASANLAATKMSECVCGQSKRVDFCGKGYHLMSFPQSAPHGVVFLHVTYVPAQEKNFTTAPAICHDGKAHFPREGVFVSNGTHWFVTQRNFYEPQIITTDNTFVSGNCDVVIGIVNNTVYDPLQPELDSGGGGSDIDPYKEFGSSYQLLNFLPLDFFPDLNALVDTATALYEEELTGREHCSPHHTAIRQALVCWDELTKLIAWMSSNITSEQVRTIIVNHVNDTWGLKVRQSLWFHLSCLTFGQHTVQEFLVSFGVWIRTPAPYRPPNAPILSTLPEHTVIC

SEQ ID NO: 11213 - protein, 1301 aa, Artificial Sequence; identical to SEQ ID NO: 11203
  SARS-CoV-2/England/200990660/2020__EPI_ISL_414523 spike protein (1-1147)(G889C_L1034C) WhcAg construct

SEQ ID NO: 11214 - protein, 1301 aa, Artificial Sequence
  SARS-CoV-2/Australia/NSW09/2020__EPI_ISL_413595 spike protein (1-1147)(G889C_L1034C) WhcAg construct
MFVFLVLLPLVSSQCVNLTTRTQLPPAYTNSFTRGVYYPDKVFRSSVLHSTQDLFLPFFSNVTWFHAIHVSGTNGTKRFDNPVLPFNDGVYFASTEKSNIIRGWIFGTTLDSKTQSLLIVNNATNVVIKVCEFQFCNDPFLGVYYHKNNKSWMESEFRVYSSANNCTFEYVSQPFLMDLEGKQGNFKNLREFVFKNIDGYFKIYSKHTPINLVRDLPQGFSALEPLVDLPIGINITRFQTLLALHRSYLTPGDSSSGWTAGAAAYYVGYLQPRTFLLKYNENGTITDAVDCALDPLSETKCTLKSFTVEKGIYQTSNFRVQPTESIVRFPNITNLCPFGEVFNATRFASVYAWNRKRISNCVADYSVLYNSASFSTFKCYGVSPTKLNDLCFTNVYADSFVIRGDEVRQIAPGQTGKIADYNYKLPDDFTGCVIAWNSNNLDSKVGGNYNYLYRLFRKSNLKPFERDISTEIYQAGSTPCNGVEGFNCYFPLQSYGFQPTNGVGYQPYRVVVLSFELLHAPATVCGPKKSTNLVKNKCVNFNFNGLTGTGVLTESNKKFLPFQQFGRDIADTTDAVRDPQTLEILDITPCSFGGVSVITPGTNTSNQVAVLYQDVNCTEVPVAIHADQLTPTWRVYSTGSNVFQTRAGCLIGAEHVNNSYECDIPIGAGICASYQTQTNSPRRARSVASQSIIAYTMSLGAENSVAYSNNSIAIPTNFTISVTTEILPVSMTKTSVDCTMYICGDSTECSNLLLQYGSFCTQLNRALTGIAVEQDKNTQEVFAQVKQIYKTPPIKDFGGFNFSQILPDPSKPSKRSFIEDLLFNKVTLADAGFIKQYGDCLGDIAARDLICAQKFNGLTVLPPLLTDEMIAQYTSALLAGTITSGWTFCAGAALQIPFAMQMAYRFNGIGVTQNVLYENQKLIANQFNSAIGKIQDSLSFTASALGKLQDVVNQNAQALNTLVKQLSSNFGAISSVLNDILSRLDKVEAEVQIDRLITGRLQSLQTYVTQQLIRAAEIRASANLAATKMSECVCGQSKRVDFCGKGYHLMSFPQSAPHGVVFLHVTYVPAQEKNFTTAPAICHDGKAHFPREGVFVSNGTHWFVTQRNFYEPQIITTDNTFVSGNCDVVIGIVNNTVYDPLQPELDSGGGGSDIDPYKEFGSSYQLLNFLPLDFFPDLNALVDTATALYEEELTGREHCSPHHTAIRQALVCWDELTKLIAWMSSNITSEQVRTIIVNHVNDTWGLKVRQSLWFHLSCLTFGQHTVQEFLVSFGVWIRTPAPYRPPNAPILSTLPEHTVIC

SEQ ID NO: 11215 - protein, 1301 aa, Artificial Sequence; identical to SEQ ID NO: 11195
  SARS-CoV-2/Australia/NSW10/2020__EPI_ISL_413596 spike protein (1-1147)(G889C_L1034C) WhcAg construct

SEQ ID NO: 11216 - protein, 1301 aa, Artificial Sequence
  SARS-CoV-2/Switzerland/1000477797/2020__EPI_ISL_413023 spike protein (1-1147)(G889C_L1034C) WhcAg construct
MFVFLVLLPLVSSQCVNLTTRTQLPPAYTNSFTRGVYYPDKVFRSSVLHSTQDLFLPFFSNVTWFHAIHVSGTNGTKRFDNPVLPFNDGVYFASTEKSNIIRGWIFGTTLDSKTQSLLIVNNATNVVIKVCEFQFCNDPFLGVYYHKNNKSWMESEFRVYSSANNCTFEYVSQPFLMDLEGKQGNFKNLREFVFKNIDGYFNIYSKHTPINLVRDLPQGFSALEPLVDLPIGINITRFQTLLALHRSYLTPGDSSSGWTAGAAAYYVGYLQPRTFLLKYNENGTITDAVDCALDPLSETKCTLKSFTVEKGIYQTSNFRVQPTESIVRFPNITNLCPFGEVFNATRFASVYAWNRKRISNCVADYSVLYNSASFSTFKCYGVSPTKLNDLCFTNVYADSFVIRGDEVRQIAPGQTGKIADYNYKLPDDFTGCVIAWNSNNLDSKVGGNYNYLYRLFRKSNLKPFERDISTEIYQAGSTPCNGVEGFNCYFPLQSYGFQPTNGVGYQPYRVVVLSFELLHAPATVCGPKKSTNLVKNKCVNFNFNGLTGTGVLTESNKKFLPFQQFGRDIADTTDAVRDPQTLEILDITPCSFGGVSVITPGTNTSNQVAVLYQGVNCTEVPVAIHADQLTPTWRVYSTGSNVFQTRAGCLIGAEHVNNSYECDIPIGAGICASYQTQTNSPRRARSVASQSIIAYTMSLGAENSVAYSNNSIAIPTNFTISVTTEILPVSMTKTSVDCTMYICGDSTECSNLLLQYGSFCTQLNRALTGIAVEQDKNTQEVFAQVKQIYKTPPIKDFGGFNFSQILPDPSKPSKRSFIEDLLFNKVTLADAGFIKQYGDCLGDIAARDLICAQKFNGLTVLPPLLTDEMIAQYTSALLAGTITSGWTFCAGAALQIPFAMQMAYRFNGIGVTQNVLYENQKLIANQFNSAIGKIQDSLSSTASALGKLQDVVNQNAQALNTLVKQLSSNFGAISSVLNDILSRLDKVEAEVQIDRLITGRLQSLQTYVTQQLIRAAEIRASANLAATKMSECVCGQSKRVDFCGKGYHLMSFPQSAPHGVVFLHVTYVPAQEKNFTTAPAICHDGKAHFPREGVFVSNGTHWFVTQRNFYEPQIITTDNTFVSGNCDVVIGIVNNTVYDPLQPELDSGGGGSDIDPYKEFGSSYQLLNFLPLDFFPDLNALVDTATALYEEELTGREHCSPHHTAIRQALVCWDELTKLIAWMSSNITSEQVRTIIVNHVNDTWGLKVRQSLWFHLSCLTFGQHTVQEFLVSFGVWIRTPAPYRPPNAPILSTLPEHTVIC

SEQ ID NO: 11217 - protein, 1301 aa, Artificial Sequence
  SARS-CoV-2/Belgium/BA-02291/2020__EPI_ISL_415159 spike protein (1-1147)(G889C_L1034C) WhcAg construct
MFVFLVLLPLVSSQCVNLTTRTQLPPAYTNSFTRGVYYPDKVFRSSVLHSTQDLFLPFFSNVTWFHAIHVSGTNGTKRFDNPVLPFNDGVYFASTEKSNIIRGWIFGTTLDSKTQSLLIVNNATNVVIKVCEFQFCNDPFLGVYYHKNNKSWMESEFRVYSSANNCTFEYVSQPFLMDLEGKQGNFKNLREFVFKNIDGYFKIYSKHTPINLVRDLPQGFSALEPLVDLPIGINITRFQTLLALHRSYLTPGDSSSGWTAGAAAYYVGYLQPRTFLLKYNENGTITDAVDCALDPLSETKCTLKSFTVEKGIYQTSNFRVQPTESIVRFPNITNLCPFGEVFNATRFASVYAWNRKRISNCVADYSVLYNSASFSTFKCYGVSPTKLNDLCFTNVYADSFVIRGDEVRQIAPGQTGKIADYNYKLPDDFTGCVIAWNSNNLDSKVGGNYNYLYRLFRRSNLKPFERDISTEIYQAGSTPCNGVEGFNCYFPLQSYGFQPTNGVGYQPYRVVVLSFELLPAPATVCGPKKSTNLVKNKCVNFNFNGLTGTGVLTESNKKFLPFQQFGRDIADTTDAVRDPQTLEILDITPCSFGGVSVITPGTNTSNQVAVLYQGVNCTEVPVAIHADQLTPTWRVYSTGSNVFQTRAGCLIGAEHVNNSYECDIPIGAGICASYQTQTNSPRRARSVASQSIIAYTMSLGAENSVAYSNNSIAIPTNFTISVTTEILPVSMTKTSVDCTMYICGDSTECSNLLLQYGSFCTQLNRALTGIAVEQDKNTQEVFAQVKQIYKTPPIKDFGGFNFSQILPDPSKPSKRSFIEDLLFNKVTLADAGFIKQYGDCLGDIAARDLICAQKFNGLTVLPPLLTDEMIAQYTSALLAGTITSGWTFCAGAALQIPFAMQMAYRFNGIGVTQNVLYENQKLIANQFNSAIGKIQDSLSSAAPALGKLQDVVNQNAQALNTLVKQLSSNFGAISSVLNDILSRLDKVEAEVQIDRLITGRLQSLQTYVTQQLIRAAEIRASANLAATKMSECVCGQSKRVDFCGKGYHLMSFPQSAPHGVVFLHVTYVPAQEKNFTTAPAICHDGKAHFPREGVFVSNGTHWFVTQRNFYEPQIITTDNTFVSGNCDVVIGIVNNTVYDPLQPELDSGGGGSDIDPYKEFGSSYQLLNFLPLDFFPDLNALVDTATALYEEELTGREHCSPHHTAIRQALVCWDELTKLIAWMSSNITSEQVRTIIVNHVNDTWGLKVRQSLWFHLSCLTFGQHTVQEFLVSFGVWIRTPAPYRPPNAPILSTLPEHTVIC

SEQ ID NO: 11218 - protein, 1301 aa, Artificial Sequence
  SARS-CoV-2/USA/WA8-UW5/2020__EPI_ISL_413486 spike protein (1-1147)(G889C_L1034C) WhcAg construct
MFVFLVLLPLVSSQCVNLTTRTQLPPAYTNSFTRGVYYPDKVFRSSVLHSTQDLFLPFFSNVTWFHAIHVSGTNGTKRFDNPVLPFNDGVYFASTEKSNIIRGWIFGTTLDSKTQSLLIVNNATNVVIKVCEFQFCNDPFLGVYYHKNNKSWMESEFRVYSSANNCTFEYVSQPFLMDLEGKQGNFKNLREFVFKNIDGYFKIYSKHTPINLVRDLPQGFSALEPLVDLPIGINITRFQTLLALHRSYLTPGDSSSGWTAGAAAYYVGYLQPRTFLLKYNENGTITDAVDCALDPLSETKCTLKSFTVEKGIYQTSNFRVQPTESIVRFPNITNLCPFGEVFNATRFASVYAWNRKRISNCVADYSVLYNSASFSTFKCYGVSPTKLNDLCFTNVYADSFVIRGDEVRQIAPGQTGKIADYNYKLPDDFTGCVIAWNSNNLDSKVGGNYNYLYRLFRKSNLKPFERDISTEIYQAGSTPCNGVEGFNCYFPLQSYGFQPTNGVGYQPYRVVVLSFELLHAPATVCGPKKSTNLVKNKCVNFNFNGLTGTGVLTESNKKFLPFQQFGRDIADTTDAVRDPQTLEILDITPCSFGGVSVITPGTNTSNQVAVLYQDVNCTEVPVAIHADQLTPTWRVYSTGSNVFQTRAGCLIGAEYVNNSYECDIPIGAGICASYQTQTNSPRRARSVASQSIIAYTMSLGAENSVAYSNNSIAIPTNFTISVTTEILPVSMTKTSVDCTMYICGDSTECSNLLLQYGSFCTQLNRALTGIAVEQDKNTQEVFAQVKQIYKTPPIKDFGGFNFSQILPDPSKPSKRSFIEDLLFNKVTLADAGFIKQYGDCLGDIAARDLICAQKFNGLTVLPPLLTDEMIAQYTSALLAGTITSGWTFCAGAALQIPFAMQMAYRFNGIGVTQNVLYENQKLIANQFNSAIGKIQDSLSSTASALGKLQDVVNQNAQALNTLVKQLSSNFGAISSVLNDILSRLDKVEAEVQIDRLITGRLQSLQTYVTQQLIRAAEIRASANLAATKMSECVCGQSKRVDFCGKGYHLMSFPQSAPHGVVFLHVTYVPAQEKNFTTAPAICHDGKAHFPREGVFVSNGTHWFVTQRNFYEPQIITTDNTFVSGNCDVVIGIVNNTVYDPLQPELDSGGGGSDIDPYKEFGSSYQLLNFLPLDFFPDLNALVDTATALYEEELTGREHCSPHHTAIRQALVCWDELTKLIAWMSSNITSEQVRTIIVNHVNDTWGLKVRQSLWFHLSCLTFGQHTVQEFLVSFGVWIRTPAPYRPPNAPILSTLPEHTVIC

SEQ ID NO: 11219 - protein, 1301 aa, Artificial Sequence
  SARS-CoV-2/England/20102000506/2020__EPI_ISL_415147 spike protein (1-1147)(G889C_L1034C) WhcAg construct
MFVFLVLLPLVSSQCVNLTTRTQLPPAYTNSFTRGVYYPDKVFRSSVLHSTQDLFLPFFSNVTWFHAIHVSGTNGTKRFDNPVLPFNDGVYFASTEKSNIIRGWIFGTTLDSKTQSLLIVNNATNVVIKVCEFQFCNDPFLGVYYHKNNKSWMESEFRVYSSANNCTFEYVSQPFLMDLEGKQGNFKNLREFVFKNIDGYFKIYSKHTPINLVRDLPQGFSALEPLVDLPIGINITRFQTLLALHRSYLTPGDSSSGWTAGAAAYYVGYLQPRTFLLKYNENGTITDAVDCALDPLSETKCTLKSFTVEKGIYQTSNFRVQPTESIVRFPNITNLCPFGEVFNATRFASVYAWNRKRISNCVADYSVLYNSASFSTFKCYGVSPTKLNDLCFTNVYADSFVIRGDEVRQIAPGQTGKIADYNYKLPDDFTGCVIAWNSNNLDSKVGGNYNYLYRLFRKSNLKPFERDISTEIYQAGSTPCNGVEGFNCYFPLQSYGFQPTNGVGYQPYRVVVLSFELLHAPATVCGPKKSTNLVKNKCVNFNFNGLTGTGVLTESNKKFLPFQQFGRDIADTTDAVRDPQTLEILDITPCSFGGVSVITPGTNTSNQVAVLYQGVNCTEVPVAIHADQLTPTWRVYSTGSNVFQTRAGCLIGAEHVNNSYECDIPIGAGICASYQTQTNSPRRARSVASQSIIAYTMSLGAENSVAYSNNSIAIPTNFTISVTTEILPVSMTKTSVDCTMYICGDSTECSNLLLQYGSFCTQLNRALTGIAVEQDKNTQEVFAQVKQIYKTPPIKDFGGFNFSQILPDPSKPSKRSFIEDLLFNKVTLADAGFIKQYGYCLGDIAARDLICAQKFNGLTVLPPLLTDEMIAQYTSALLAGTITSGWTFCAGAALQIPFAMQMAYRFNGIGVTQNVLYENQKLIANQFNSAIGKIQDSLSSTASALGKLQDVVNQNAQALNTLVKQLSSNFGAISSVLNDILSRLDKVEAEVQIDRLITGRLQSLQTYVTQQLIRAAEIRASANLAATKMSECVCGQSKRVDFCGKGYHLMSFPQSAPHGVVFLHVTYVPAQEKNFTTAPAICHDGKAHFPREGVFVSNGTHWFVTQRNFYEPQIITTDNTFVSGNCDVVIGIVNNTVYDPLQPELDSGGGGSDIDPYKEFGSSYQLLNFLPLDFFPDLNALVDTATALYEEELTGREHCSPHHTAIRQALVCWDELTKLIAWMSSNITSEQVRTIIVNHVNDTWGLKVRQSLWFHLSCLTFGQHTVQEFLVSFGVWIRTPAPYRPPNAPILSTLPEHTVIC

SEQ ID NO: 11220 - protein, 1301 aa, Artificial Sequence
  SARS-CoV-2/Belgium/VAG-03013/2020__EPI_ISL_415155 spike protein (1-1147)(G889C_L1034C) WhcAg construct
MFVFLVLLPLVSSQCVNLTTRTQLPPAYTNSFTRGVYYPDKVFRSSVLHSTQDLFLPFFSNVTWFHAIHVSGTNGTKRFDNPVLPFNDGVYFASTEKSNIIRGWIFGTTLDSKTQSLLIVNNATNVVIKVCEFQFCNDPFLGVYYHKNNKSWMESEFRVYSSANNCTFEYVSQPFLMDLEGKQGNFKNLREFVFKNIDGYFKIYSKHTPINLVRDLPQGFSALEPLVDLPIGINITRFQTLLALHRSYLTPGDSSSGWTAGAAAYYVGYLQPRTFLLKYNENGTITDAVDCALDPLSETKCTLKSFTVEKGIYQTSNFRVQPTESIVRFPNITNLCPFGEVFNATRFASVYAWNRKRISNCVADYSVLYNSASFSTFKCYGVSPTKLNDLCFTNVYADSFVIRGDEVRQIAPGQTGKIADYNYKLPDDFTGCVIAWNSNNLDSKVGGNYNYLYRLFRKSNLKPFERDISTEIYQAGSTPCNGVEGFNCYFPLQSYGFQPTNGVGYQPYRVVVLSFELLHAPATVCGPKKSTNLVKNKCVNFNFNGLTGTGVLTESNKKFLPFQQFGRDIADTTDAVRDPQTLEILDITPCSFGGVSVITPGTNTSNQVAVLYQGVNCTEVPVAIHADQLTPTWRVYSTGSNVFQTRAGCLIGAEHVNNSYECDIPIGAGICASYQTQTNSPRRARSVASQSIIAYTMSLGAENSVAYSNNSIAIPTNFTISVTTEILPVSMTKTSVDCTMYICGDSTECSNLLLQYGSFCTQLNRALTGIAVEQDKNTQEVFAQVKQIYKTPPIKDFGGFNFSQILPDPSKPSKRSFIEDLLFNKVTLADAGFIKQYGDCLGDIAARDLICAQKFNGLTVLPPLLTDEMIAQYTSALLAGTITSGWTFCAGAALQIPFAMQMAYRFNGIGVTQNVLYENQKLIANQFNSAIGKIQDSLSSTATALGKLQDVVNQNAQALNTLVKQLSSNFGAISSVLNDILSRLDKVEAEVQIDRLITGRLQSLQTYVTQQLIRAAEIRASANLAATKMSECVCGQSKRVDFCGKGYHLMSFPQSAPHGVVFLHVTYVPAQEKNFTTAPAICHDGKAHFPREGVFVSNGTHWFVTQRNFYEPQIITTDNTFVSGNCDVVIGIVNNTVYDPLQPELDSGGGGSDIDPYKEFGSSYQLLNFLPLDFFPDLNALVDTATALYEEELTGREHCSPHHTAIRQALVCWDELTKLIAWMSSNITSEQVRTIIVNHVNDTWGLKVRQSLWFHLSCLTFGQHTVQEFLVSFGVWIRTPAPYRPPNAPILSTLPEHTVIC

SEQ ID NO: 11221 - protein, 1301 aa, Artificial Sequence
  SARS-CoV-2/Belgium/BC-03016/2020__EPI_ISL_415157 spike protein (1-1147)(G889C_L1034C) WhcAg construct
MFVFLVLLPLVSSQCVNLTTRTQLPPAYTNSFTRGVYYPDKVFRSSVLHSTQDLFLPFFSNVTWFHAIHVSGTNGTKRFDNPVLPFNDGVYFASTEKSNIIRGWIFGTTLDSKTQSLLIVNNATNVVIKVCEFQFCNDPFLGVYYHKNNKSWMESEFRVYSSANNCTFEYVSQPFLMDLEGKQGNFKNLREFVFKNIDGYFKIYSKHTPINLVRDLPQGFSALEPLVDLPIGINITRFQTLLALHRSYLTPGDSSSGWTAGAAAYYVGYLQPRTFLLKYNENGTITDAVDCALDPLSETKCTLKSFTVEKGIYQTSNFRVQPTESIVRFPNITNLCPFGEVFNATRFASVYAWNRKRISNCVADYSVLYNSASFSTFKCYGVSPTKLNDLCFTNVYADSFVIRGDEVRQIAPGQTGKIADYNYKLPDDFTGCVIAWNSNNLDSKVGGNYNYLYRLFRKSNLKPFERDISTEIYQAGSTPCNGVEGFNCYFPLQSYGFQPTNGVGYQPYRVVVLSFELLHAPATVCGPKKSTNLVKNKCVNFNFNGLTGTGVLTESNKKFLPFQQFGRDIADTTDAVRDPQTLEILDITPCSFGGVSVITPGTNTSNQVAVLYQGVNCTEVPVAIHADQLTPTWRVYSTGSNVFQTRAGCLIGAEHVNNSYECDIPIGAGICASYQTQTNSPRRARSVASQSIIAYTMSLGAENSVAYSNNSIAIPTNFTISVTTEILPVSMTKTSVDCTMYICGDSTECSNLLLQYGSFCTQLNRALTGIAVEQDKNTQEVFAQVKQIYKTPPIKDFGGFNFSQILPDPSKPSKRSFIEDLLFNKVTLADAGFIKQYGDCLGDIAARDLICAQKFNGLTVLPPLLTDEMIAQYTSALLAGTITSGWTFCAGAALQIPFAMQMAYRFNGIGVTQNVLYENQKLIANQFNSAIGKIQDSLSSTAPALGKLQDVVNQNAQALNTLVKQLSSNFGAISSVLNDILSRLDKVEAEVQIDRLITGRLQSLQTYVTQQLIRAAEIRASANLAATKMSECVCGQSKRVDFCGKGYHLMSFPQSAPHGVVFLHVTYVPAQEKNFTTAPAICHDGKAHFPREGVFVSNGTHWFVTQRNFYEPQIITTDNTFVSGNCDVVIGIVNNTVYDPLQPELDSGGGGSDIDPYKEFGSSYQLLNFLPLDFFPDLNALVDTATALYEEELTGREHCSPHHTAIRQALVCWDELTKLIAWMSSNITSEQVRTIIVNHVNDTWGLKVRQSLWFHLSCLTFGQHTVQEFLVSFGVWIRTPAPYRPPNAPILSTLPEHTVIC

SEQ ID NO: 11222 - protein, 1301 aa, Artificial Sequence
  SARS-CoV-2/Germany/BavPat3/2020__EPI_ISL_414521 spike protein (1-1147)(G889C_L1034C) WhcAg construct
MFVFLVLLPLVSSQCVNLTTRTQLPPAYTNSFTRGVYYPDKVFRSSVLHSTQDLFLPFFSNVTWFHAIHVSGTNGTKRFDNPVLPFNDGVYFASTEKSNIIRGWIFGTTLDSKTQSLLIVNNATNVVIKVCEFQFCNDPFLGVYYHKNNKSWMESEFRVYSSANNCTFEYVSQPFLMDLEGKQGNFKNLREFVFKNIDGYFKIYSKHTPINLVRDLPQGFSALEPLVDLPIGINITRFQTLLALHRSYLTPGDSSSGWTAGAAAYYVGYLQPRTFLLKYNENGTITDAVDCALDPLSETKCTLKSFTVEKGIYQTSNFRVQPTESIVRFPNITNLCPFGEVFNATRFASVYAWNRKRISNCVADYSVLYNSASFSTFKCYGVSPTKLNDLCFTNVYADSFVIRGDEVRQIAPGQTGKIADYNYKLPDDFTGCVIAWNSNNLDSKVGGNYNYLYRLFRKSNLKPFERDISTEIYQAGSTPCNGVEGFNCYFPLQSYGFQPTNGVGYQPYRVVVLSFELLHAPATVCGPKKSTNLVKNKCVNFNFNGLTGTGVLTESNKKFLPFQQFGRDIADTTDAVRDPQTLEILDITPCSFGGVSVITPGTNTSNQVAVLYQDVNCTEVPVAIHADQLTPTWRVYSTGSNVFQTRAGCLIGAEHVNNSYECDIPIGAGICASYQTQTNSPRRARSVASQSIIAYTMSLGAENSVAYSNNSIAIPTNFTISVTTEILPVSMTKTSVDCTMYICGDSTECSNLLLQYGSFCTQLNRALTGIAVEQDKNTQQVFAQVKQIYKTPPIKDFGGFNFSQILPDPSKPSKRSFIEDLLFNKVTLADAGFIKQYGDCLGDIAARDLICAQKFNGLTVLPPLLTDEMIAQYTSALLAGTITSGWTFCAGAALQIPFAMQMAYRFNGIGVTQNVLYENQKLIANQFNSAIGKIQDSLSSTASALGKLQDVVNQNAQALNTLVKQLSSNFGAISSVLNDILSRLDKVEAEVQIDRLITGRLQSLQTYVTQQLIRAAEIRASANLAATKMSECVCGQSKRVDFCGKGYHLMSFPQSAPHGVVFLHVTYVPAQEKNFTTAPAICHDGKAHFPREGVFVSNGTHWFVTQRNFYEPQIITTDNTFVSGNCDVVIGIVNNTVYDPLQPELDSGGGGSDIDPYKEFGSSYQLLNFLPLDFFPDLNALVDTATALYEEELTGREHCSPHHTAIRQALVCWDELTKLIAWMSSNITSEQVRTIIVNHVNDTWGLKVRQSLWFHLSCLTFGQHTVQEFLVSFGVWIRTPAPYRPPNAPILSTLPEHTVIC

SEQ ID NO: 11223 - protein, 1301 aa, Artificial Sequence
  SARS-CoV-2/France/HF1805/2020__EPI_ISL_414628 spike protein (1-1147)(G889C_L1034C) WhcAg construct
MFVFLVLLPLVSSQCVNLTTRTQLPPAYTNSFTRGVYYPDKVFRSSVLHSTQDLFLPFFSNVTWFHAIHVSGTNGTKRFDNPVLPFNDGVYFASTEKSNIIRGWIFGTTLDSKTQSLLIVNNATNVVIKVCEFQFCNDPFLGVYYHKNNKSWMESEFRVYSSANNCTFEYVSQPFLMDLEGKQGNFKNLREFVFKNIDGYFKIYSKHTPINLVRDLPQGFSALEPLVDLPIGINITRFQTLLALHRSYLTPGDSSSGWTAGAAAYYVGYLQPRTFLLKYNENGTITDAVDCALDPLSETKCTLKSFTVEKGIYQTSNFRVQPTESIVRFPNITNLCPFGEVFNATRFASVYAWNRKRISNCVADYSVLYNSASFSTFKCYGVSPTKLNDLCFTNVYADSFVIRGDEVRQIAPGQTGKIADYNYKLPDDFTGCVIAWNSNNLDSKVGGNYNYLYRLFRKSNLKPFERDISTEIYQAGSTPCNGVEGFNCYFPLQSYGFQPTNGVGYQPYRVVVLSFELLHAPATVCGPKKSTNLVKNKCVNFNFNGLTGTGVLTESNKKFLPFQQFGRDIADTTDAVRDPQTLEILDITPCSFGGVSVITPGTNTSNQVAVLYQGVNCTEVPVAIHADQLTPTWRVYSTGSNVFQTRAGCLIGAEHVNNSYECDIPIGAGICASYQTQTNSPRRARSVASQSIIAYTMSLGAENSVAYSNNSIAIPTNFTISVTTEILPVSMTKTSVDCTMYICGDSTECSNLLLQYGSFCTQLNRALTGIAVEQDKNTQEVFAQVKQIYKTPPIKDFGGFNFSQILPDPSKPSKRSFIEDLLFNKVTLADAGFIKQYGDCLGDIAARDLICAQKFNGLTVLPPLLTDEMIAQYTSALLAGTITSGWTFCAGAALQIPFAMQMAYRFNGIGVTQNVLYENQKLIANQFNSAIGKIQDSLSSTASALGKLQDVVNQNAQALNTLVKQLSSNFGAISSVLNDILSRLDKVEAEVQIDRLITGRLQSLQTYVTQQLIRAAEIRASANLAATKMSECVCGQSKRVDFCGKGYHLMSFPQSAPHGVVFLHVTYVPAQEKNFTTAPAICHDGKAHFPREGVFVSNGTHWFVTQRNFYEPQIITTDNTFVSGNCDVVIGVVNNTVYDPLQPELDSGGGGSDIDPYKEFGSSYQLLNFLPLDFFPDLNALVDTATALYEEELTGREHCSPHHTAIRQALVCWDELTKLIAWMSSNITSEQVRTIIVNHVNDTWGLKVRQSLWFHLSCLTFGQHTVQEFLVSFGVWIRTPAPYRPPNAPILSTLPEHTVIC

SEQ ID NO: 11224 - protein, 1301 aa, Artificial Sequence
  SARS-CoV-2/Netherlands/ZuidHolland_9/2020__EPI_ISL_414445 spike protein (1-1147)(G889C_L1034C) WhcAg construct
MFVFLVLLPLVSSQCVNLTTRTQLPPAYTNSFTRGVYYPDKVFRSSVLHSTQDLFLPFFSNVTWFHAIHVSGTNGTKRFDNPVLPFNDGVYFASTEKSNIIRGWIFGTTLDSKTQSLLIVNNATNVVIKVCEFQFCNDPFLGVYYHKNNKSWMESEFRVYSSANNCTFEYVSQPFLMDLEGKQGNFKNLREFVFKNIDGYFKIYSKHTPINLVRDLPQGFSALEPLVDLPIGINITRFQTLLALHRSYLTPGDSSSGWTAGAAAYYVGYLQPRTFLLKYNENGTITDAVDCALDPLSETKCTLKSFTVEKGIYQTSNFRVQPTESIVRFPNITNLCPFGEVFNATRFASVYAWNRKRISNCVADYSVLYNSASFSTFKCYGVSPTKLNDLCFTNVYADSFVIRGDEVRQIAPGQTGKIADYNYKLPDDFTGCVIAWNSNNLDSKVGGNYNYLYRLFRKSNLKPFERDISTEIYQAGSTPCNGVEGFNCYFPLQSYGFQPTNGVGYQPYRVVVLSFELLHAPATVCGPKKSTNLVKNKCVNFNFNGLTGTGVLTESNKKFLPFQQFGRDIADTTDAVRDPQTLEILDITPCSFGGVSVITPGTNTSNQVAVLYQGVNCTEVPVAIHADQLTPTWRVYSTGSNVFQTRAGCLIGAEHVNNSYECDIPIGAGICASYQTQTNSPRRARSVASQSIIAYTMSLGAENSVAYSNNSIAIPTNFTISVTTEILPVSMTKTSVDCTMYICGDSTECSNLLLQYGSFCTQLNRALTGIAVEQDKNTQEVFAQVKQIYKTPPIKDFGGFNFSQILPDPSKPSKRSFIEDLLFNKVTLADAGFIKQYGDCLGDIAARDLICVQKFNGLTVLPPLLTDEMIAQYTSALLAGTITSGWTFCAGAALQIPFAMQMAYRFNGIGVTQNVLYENQKLIANQFNSAIGKIQDSLSSTASALGKLQDVVNQNAQALNTLVKQLSSNFGAISSVLNDILSRLDKVEAEVQIDRLITGRLQSLQTYVTQQLIRAAEIRASANLAATKMSECVCGQSKRVDFCGKGYHLMSFPQSAPHGVVFLHVTYVPAQEKNFTTAPAICHDGKAHFPREGVFVSNGTHWFVTQRNFYEPQIITTDNTFVSGNCDVVIGIVNNTVYDPLQPELDSGGGGSDIDPYKEFGSSYQLLNFLPLDFFPDLNALVDTATALYEEELTGREHCSPHHTAIRQALVCWDELTKLIAWMSSNITSEQVRTIIVNHVNDTWGLKVRQSLWFHLSCLTFGQHTVQEFLVSFGVWIRTPAPYRPPNAPILSTLPEHTVIC

SEQ ID NO: 11225 - protein, 1301 aa, Artificial Sequence
  SARS-CoV-2/Finland/FIN03032020A/2020__EPI_ISL_413602 spike protein (1-1147)(G889C_L1034C) WhcAg construct
MFVFLVLLPLVSSQCVNLTTRTQLPPAYTNSFTRGVYYPDKVFRSSVLHSTQDLFLPFFSNVTWFHAIHVSGTNGTKRFDNPVLPFNDGVYFASTEKSNIIRGWIFGTTLDSKTQSLLIVNNATNVVIKVCEFQFCNDPFLGVYYHKNNKSWMESEFRVYSSANNCTFEYVSQPFLMDLEGKQGNFKNLREFVFKNIDGYFKIYSKHTPINLVRDLPQGFSALEPLVDLPIGINITRFQTLLALHRSYLTPGDSSSGWTAGAAAYYVGYLQPRTFLLKYNENGTITDAVDCALDPLSETKCTLKSFTVEKGIYQTSNFRVQPTESIVRFPNITNLCPFGEVFNATRFASVYAWNRKRISNCVADYSVLYNSASFSTFKCYGVSPTKLNDLCFTNVYADSFVIRGDEVRQIAPGQTGKIADYNYKLPDDFTGCVISWNSNNLDSKVGGNYNYLYRLFRKSNLKPFERDISTEIYQAGSTPCNGVEGFNCYFPLQSYGFQPTNGVGYQPYRVVVLSFELLHAPATVCGPKKSTNLVKNKCVNFNFNGLTGTGVLTESNKKFLPFQQFGRDIADTTDAVRDPQTLEILDITPCSFGGVSVITPGTNTSNQVAVLYQGVNCTEVPVAIHADQLTPTWRVYSTGSNVFQTRAGCLIGAEHVNNSYECDIPIGAGICASYQTQTNSPRRARSVASQSIIAYTMSLGAENSVAYSNNSIAIPTNFTISVTTEILPVSMTKTSVDCTMYICGDSTECSNLLLQYGSFCTQLNRALTGIAVEQDKNTQEVFAQVKQIYKTPPIKDFGGFNFSQILPDPSKPSKRSFIEDLLFNKVTLADAGFIKQYGDCLGDIAARDLICAQKFNGLTVLPPLLTDEMIAQYTSALLAGTITSGWTFCAGAALQIPFAMQMAYRFNGIGVTQNVLYENQKLIANQFNSAIGKIQDSLSSTASALGKLQDVVNQNAQALNTLVKQLSSNFGAISSVLNDILSRLDKVEAEVQIDRLITGRLQSLQTYVTQQLIRAAEIRASANLAATKMSECVCGQSKRVDFCGKGYHLMSFPQSAPHGVVFLHVTYVPAQEKNFTTAPAICHDGKAHFPREGVFVSNGTHWFVTQRNFYEPQIITTDNTFVSGNCDVVIGIVNNTVYDPLQPELDSGGGGSDIDPYKEFGSSYQLLNFLPLDFFPDLNALVDTATALYEEELTGREHCSPHHTAIRQALVCWDELTKLIAWMSSNITSEQVRTIIVNHVNDTWGLKVRQSLWFHLSCLTFGQHTVQEFLVSFGVWIRTPAPYRPPNAPILSTLPEHTVIC

SEQ ID NO: 11226 - protein, 1301 aa, Artificial Sequence
  SARS-CoV-2/France/GE1977/2020__EPI_ISL_414632 spike protein (1-1147)(G889C_L1034C) WhcAg construct
MFVFLVLLPLVSSQCVNLTTRTQLPPAYTNSFTRGVYYPDKVFRSSVLHSTQDLFLPFFSNVTWFHAIHVSGTNGTKRFDNPVLPFNDGVYFASTEKSNIIRGWIFGTTLDSKTQSLLIVNNATNVVIKVCEFQFCNDPFLGVYYHKNNKSWMESEFRVYSSANNCTFEYVSQPFLMDLEGKQGNFKNLREFVFKNIDGYFKIYSKHTPINLVRDLPQGFSALEPLVDLPIGINITRFQTLLALHRSYLTPGDSSSGWTAGAAAYYVGYLQPRTFLLKYNENGTITDAVDCALDPLSETKCTLKSFTVEKGIYQTSNFRVQPTESIVRFPNITNLCPFGEVFNATRFASVYAWNRKRISNCVADYSVLYNSASFSTFKCYGVSPTKLNDLCFTNVYADSFVIRGDEVRQIAPGQTGKIADYNYKLPDDFTGCVIAWNSNNLDSKVGGNYNYLYRLFRKSNLKPFERDISTEIYQAGSTPCNGVEGFNCYFPLQSYGFQPTNGVGYQPYRVVVLSFELLHAPATVCGPKKSTNLVKNKCVNFNFNGLTGTGVLTESNKKFLPFQQFGRDIADTTDAVRDPQTLEILDITPCSFGGVSVITPGTNTSNQVAVLYQGVNCTEVPVAIHADQLTPTWRVYSTGSNVFQTRAGCLIGAEHVNNSYECDIPIGAGICASYQTQTNSPRRARSVASQSIIAYTMSLGAENSVAYSNNSIAIPTNFTISVTTEILPVSMTKTSVDCTMYICGDSTECSNLLLQYGSFCTQLNRALTGIAVEQDKNTQEVFAQVKQIYKTPPIKDFGGFNFSQILPDPSKPSKRSFIEDLLFNKVTLADAGFIKQYGDCLGDIAARDLICAQKFNGLTVLPPLLTDEMIAQYTSALLAGTITSGWTFCAGAALQIPFAMQMAYRFNGIGVTQNVLYENQKLIANQFNSAIGKIQDSLFSTASALGKLQDVVNQNAQALNTLVKQLSSNFGAISSVLNDILSRLDKVEAEVQIDRLITGRLQSLQTYVTQQLIRAAEIRASANLAATKMSECVCGQSKRVDFCGKGYHLMSFPQSAPHGVVFLHVTYVPAQEKNFTTAPAICHDGKAHFPREGVFVSNGTHWFVTQRNFYEPQIITTDNTFVSGNCDVVIGIVNNTVYDPLQPELDSGGGGSDIDPYKEFGSSYQLLNFLPLDFFPDLNALVDTATALYEEELTGREHCSPHHTAIRQALVCWDELTKLIAWMSSNITSEQVRTIIVNHVNDTWGLKVRQSLWFHLSCLTFGQHTVQEFLVSFGVWIRTPAPYRPPNAPILSTLPEHTVIC

SEQ ID NO: 11227 - protein, 1301 aa, Artificial Sequence
  SARS-CoV-2/Finland/FIN-313/2020__EPI_ISL_414641 spike protein (1-1147)(G889C_L1034C) WhcAg construct
MFVFLVLLPLVSSQCVNLTTRTQLPPAYTNSFTRGVYYPDKVFRSSVLHSTQDLFLPFFSNVTWFHAIHVSGTNGTKRFDNPVLPFNDGVYFASTEKSNIIRGWIFGTTLDSKTQSLLIVNNATNVVIKVCEFQFCNDPFLGVYYHKNNKSWMESEFRVYSSANNCTFEYVSQPFLMDLEGKQGNFKNLREFVFKNIDGYFKIYSKHTPINLVRDLPQGFSALEPLVDLPIGINITRFKTLLALHRSYLTPGDSSSGWTAGAAAYYVGYLQPRTFLLKYNENGTITDAVDCALDPLSETKCTLKSFTVEKGIYQTSNFRVQPTESIVRFPNITNLCPFGEVFNATRFASVYAWNRKRISNCVADYSVLYNSASFSTFKCYGVSPTKLNDLCFTNVYADSFVIRGDEVRQIAPGQTGKIADYNYKLPDDFTGCVIAWNSNNLDSKVGGNYNYLYRLFRKSNLKPFERDISTEIYQAGSTPCNGVEGFNCYFPLQSYGFQPTNGVGYQPYRVVVLSFELLHAPATVCGPKKSTNLVKNKCVNFNFNGLTGTGVLTESNKKFLPFQQFGRDIADTTDAVRDPQTLEILDITPCSFGGVSVITPGTNTSNQVAVLYQGVNCTEVPVAIHADQLTPTWRVYSTGSNVFQTRAGCLIGAEHVNNSYECDIPIGAGICASYQTQTNSPRRARSVASQSIIAYTMSLGAENSVAYSNNSIAIPTNFTISVTTEILPVSMTKTSVDCTMYICGDSTECSNLLLQYGSFCTQLNRALTGIAVEQDKNTQEVFAQVKQIYKTPPIKDFGGFNFSQILPDPSKPSKRSFIEDLLFNKVTLADAGFIKQYGDCLGDIAARDLICAQKFNGLTVLPPLLTDEMIAQYTSALLAGTITSGWTFCAGAALQIPFAMQMAYRFNGIGVTQNVLYENQKLIANQFNSAIGKIQDSLSSTASALGKLQDVVNQNAQALNTLVKQLSSNFGAISSVLNDILSRLDKVEAEVQIDRLITGRLQSLQTYVTQQLIRAAEIRASANLAATKMSECVCGQSKRVDFCGKGYHLMSFPQSAPHGVVFLHVTYVPAQEKNFTTAPAICHDGKAHFPREGVFVSNGTHWFVTQRNFYEPQIITTDNTFVSGNCDVVIGIVNNTVYDPLQPELDSGGGGSDIDPYKEFGSSYQLLNFLPLDFFPDLNALVDTATALYEEELTGREHCSPHHTAIRQALVCWDELTKLIAWMSSNITSEQVRTIIVNHVNDTWGLKVRQSLWFHLSCLTFGQHTVQEFLVSFGVWIRTPAPYRPPNAPILSTLPEHTVIC

SEQ ID NO: 11228 - protein, 1301 aa, Artificial Sequence
  SARS-CoV-2/Netherlands/ZuidHolland_2/2020__EPI_ISL_414556 spike protein (1-1147)(G889C_L1034C) WhcAg construct
MFVFLVLLPLVSSQCVNLTTRTQLPPAYTNSFTRGVYYPDKVFRSSVLHSTQDLFLPFFSNVTWFHAIHVSGTNGTKRFDNPVLPFNDGVYFASTEKSNIIRGWIFGTTLDSKTQSLLIVNNATNVVIKVCEFQFCNDPFLGVYYHKNNKSWMESEFRVYSSANNCTFEYVSQPFLMDLEGKQGNFKNLREFVFKNIDGYFKIYSKHTPINLVRDLPQGFSALEPLVDLPIGINITRFQTLLALHRSYLTPGDSSSGWTAGAAAYYVGYLQPRTFLLKYNENGTITDAVDCALDPLSETKCTLKSFTVEKGIYQTSNFRVQPTESIVRFPNITNLCPFGEVFNATRFASVYAWNRKRISNCVADYSVLYNSASFSTFKCYGVSPTKLNDLCFTNVYADSFVIRGDEVRQIAPGQTGKIADYNYKLPDDFTGCVIAWNSNNLDSKVGGNYNYLYRLFRKSNLKPFERDISTEIYQAGSTPCNGVEGFNCYFPLQSYGFQPTNGVGYQPYRVVVLSFELLHAPATVCGPKKSTNLVKNKCVNFNFNGLTGTGVLTESNKKFLPFQQFGRDIADTTDAVRDPQTLEILDITPCSFGGVSVITPGTNTSNQVAVLYQGVNCTEVPVAIHADQLTPTWRVYSTGSNVFQTRAGCLIGAEHVNNSYECDIPIGAGICASYQTQTNSPRRARSVASQSIIAYTMSLGAENSVAYSNNSIAIPTNFTISVTTEILPVSMTKTSVDCTMYICGDSTECSNLLLQYGSFCTQLNRALTGIALEQDKNTQEVFAQVKQIYKTPPIKDFGGFNFSQILPDPSKPSKRSFIEDLLFNKVTLADAGFIKQYGDCLGDIAARDLICAQKFNGLTVLPPLLTDEMIAQYTSALLAGTITSGWTFCAGAALQIPFAMQMAYRFNGIGVTQNVLYENQKLIANQFNSAIGKIQDSLSSTASALGKLQDVVNQNAQALNTLVKQLSSNFGAISSVLNDILSRLDKVEAEVQIDRLITGRLQSLQTYVTQQLIRAAEIRASANLAATKMSECVCGQSKRVDFCGKGYHLMSFPQSAPHGVVFLHVTYVPAQEKNFTTAPAICHDGKAHFPREGVFVSNGTHWFVTQRNFYEPQIITTDNTFVSGNCDVVIGIVNNTVYDPLQPELDSGGGGSDIDPYKEFGSSYQLLNFLPLDFFPDLNALVDTATALYEEELTGREHCSPHHTAIRQALVCWDELTKLIAWMSSNITSEQVRTIIVNHVNDTWGLKVRQSLWFHLSCLTFGQHTVQEFLVSFGVWIRTPAPYRPPNAPILSTLPEHTVIC

SEQ ID NO: 11229 - protein, 1301 aa, Artificial Sequence
  SARS-CoV-2/USA/WA-UW31/2020__EPI_ISL_414618 spike protein (1-1147)(G889C_L1034C) WhcAg construct
MFVFLVLLPLVSSQCVNLTTRTQLPPAYTNSFTRGVYYPDKVFRSSVLHSTQDLFLPFFSNVTWFHAIHVSGTNGTKRFDNPVLPFNDGVYFASTEKSNIIRGWIFGTTLDSKTQSLLIVNNATNVVIKVCEFQFCNDPFLGVYYHKNNKSWMESEFRVYSSANNCTFEYVSQPFLMDLEGKQGNFKNLREFVFKNIDGYFKIYSKHTPINLVRDLPQGFSALEPLVDLPIGINITRFQTLLALHRSYLTPGDSSSGWTAGAAAYYVGYLQPRTFLLKYNENGTITDAVDCALDPLSETKCTLKSFTVEKGIYQTSNFRVQPTESIVRFPNITNLCPFGEVFNATRFASVYAWNRKRISNCVADYSVLYNSASFSTFKCYGVSPTKLNDLCFTNVYADSFVIRGDEVRQIAPGQTGKIADYNYKLPDDFTGCVIAWNSNNLDSKVGGNYNYLYRLFRKSNLKPFERDISTEIYQAGSTPCNGAEGFNCYFPLQSYGFQPTNGVGYQPYRVVVLSFELLHAPATVCGPKKSTNLVKNKCVNFNFNGLTGTGVLTESNKKFLPFQQFGRDIADTTDAVRDPQTLEILDITPCSFGGVSVITPGTNTSNQVAVLYQDVNCTEVPVAIHADQLTPTWRVYSTGSNVFQTRAGCLIGAEHVNNSYECDIPIGAGICASYQTQTNSPRRARSVASQSIIAYTMSLGAENSVAYSNNSIAIPTNFTISVTTEILPVSMTKTSVDCTMYICGDSTECSNLLLQYGSFCTQLNRALTGIAVEQDKNTQEVFAQVKQIYKTPPIKDFGGFNFSQILPDPSKPSKRSFIEDLLFNKVTLADAGFIKQYGDCLGDIAARDLICAQKFNGLTVLPPLLTDEMIAQYTSALLAGTITSGWTFCAGAALQIPFAMQMAYRFNGIGVTQNVLYENQKLIANQFNSAIGKIQDSLSSTASALGKLQDVVNQNAQALNTLVKQLSSNFGAISSVLNDILSRLDKVEAEVQIDRLITGRLQSLQTYVTQQLIRAAEIRASANLAATKMSECVCGQSKRVDFCGKGYHLMSFPQSAPHGVVFLHVTYVPAQEKNFTTAPAICHDGKAHFPREGVFVSNGTHWFVTQRNFYEPQIITTDNTFVSGNCDVVIGIVNNTVYDPLQPELDSGGGGSDIDPYKEFGSSYQLLNFLPLDFFPDLNALVDTATALYEEELTGREHCSPHHTAIRQALVCWDELTKLIAWMSSNITSEQVRTIIVNHVNDTWGLKVRQSLWFHLSCLTFGQHTVQEFLVSFGVWIRTPAPYRPPNAPILSTLPEHTVIC

SEQ ID NO: 11230 - protein, 1301 aa, Artificial Sequence
  SARS-CoV-2/South Korea/SNU01/2020__EPI_ISL_411929 spike protein (1-1147)(G889C_L1034C) WhcAg construct
MFVFLVLLPLVSSQCVNLTTRTQLPPAYTNSFTRGVYYPDKVFRSSVLHSTQDLFLPFFSNVTWFHAIHVSGTNGTKRFDNPVLPFNDGVYFASTEKSNIIRGWIFGTTLDSKTQSLLIVNNATNVVIKVCEFQFCNDPFLGVYYHKNNKSWMESEFRVYSSANNCTFEYVSQPFLMDLEGKQGNFKNLREFVFKNIDGYFKIYSKHTPINLVRDLPQGFWALEPLVDLPIGINITRFQTLLALHRSYLTPGDSSSGWTAGAAAYYVGYLQPRTFLLKYNENGTITDAVDCALDPLSETKCTLKSFTVEKGIYQTSNFRVQPTESIVRFPNITNLCPFGEVFNATRFASVYAWNRKRISNCVADYSVLYNSASFSTFKCYGVSPTKLNDLCFTNVYADSFVIRGDEVRQIAPGQTGKIADYNYKLPDDFTGCVIAWNSNNLDSKVGGNYNYLYRLFRKSNLKPFERDISTEIYQAGSTPCNGVEGFNCYFPLQSYGFQPTNGVGYQPYRVVVLSFELLHAPATVCGPKKSTNLVKNKCVNFNFNGLTGTGVLTESNKKFLPFQQFGRDIADTTDAVRDPQTLEILDITPCSFGGVSVITPGTNTSNQVAVLYQDVNCTEVPVAIHADQLTPTWRVYSTGSNVFQTRAGCLIGAEHVNNSYECDIPIGAGICASYQTQTNSPRRARSVASQSIIAYTMSLGAENSVAYSNNSIAIPTNFTISVTTEILPVSMTKTSVDCTMYICGDSTECSNLLLQYGSFCTQLNRALTGIAVEQDKNTQEVFAQVKQIYKTPPIKDFGGFNFSQILPDPSKPSKRSFIEDLLFNKVTLADAGFIKQYGDCLGDIAARDLICAQKFNGLTVLPPLLTDEMIAQYTSALLAGTITSGWTFCAGAALQIPFAMQMAYRFNGIGVTQNVLYENQKLIANQFNSAIGKIQDSLSSTASALGKLQDVVNQNAQALNTLVKQLSSNFGAISSVLNDILSRLDKVEAEVQIDRLITGRLQSLQTYVTQQLIRAAEIRASANLAATKMSECVCGQSKRVDFCGKGYHLMSFPQSAPHGVVFLHVTYVPAQEKNFTTAPAICHDGKAHFPREGVFVSNGTHWFVTQRNFYEPQIITTDNTFVSGNCDVVIGIVNNTVYDPLQPELDSGGGGSDIDPYKEFGSSYQLLNFLPLDFFPDLNALVDTATALYEEELTGREHCSPHHTAIRQALVCWDELTKLIAWMSSNITSEQVRTIIVNHVNDTWGLKVRQSLWFHLSCLTFGQHTVQEFLVSFGVWIRTPAPYRPPNAPILSTLPEHTVIC

SEQ ID NO: 11231 - protein, 1301 aa, Artificial Sequence
  SARS-CoV-2/China/WF0004/2020__EPI_ISL_413694 spike protein (1-1147)(G889C_L1034C) WhcAg construct
MFVFLVLLPLVSSQCVNLTTRTQLPPAYTNSFTRGVYYPDKVFRSSVLHSTQDLFLPFFSNVTWFHAIHVSGTNGTKRFDNPVLPFNDGVYFASTEKSNIIRGWIFGTTLDSKTQSLLIVNNATNVVIKVCEFQFCNDPFLGVYYHKNNKSWTESEFRVYSSANNCTFEYVSQPFLMDLEGKQGNFKNLREFVFKNIDGYFKIYSKHTPINLVRDLPQGFSALEPLVDLPIGINITRFQTLLALHRSYLTPGDSSSGWTAGAAAYYVGYLQPRTFLLKYNENGTITDAVDCALDPLSETKCTLKSFTVEKGIYQTSNFRVQPTESIVRFPNITNLCPFGEVFNATRFASVYAWNRKRISNCVADYSVLYNSASFSTFKCYGVSPTKLNDLCFTNVYADSFVIRGDEVRQIAPGQTGKIADYNYKLPDDFTGCVIAWNSNNLDSKVGGNYNYLYRLFRKSNLKPFERDISTEIYQAGSTPCNGVEGFNCYFPLQSYGFQPTNGVGYQPYRVVVLSFELLHAPATVCGPKKSTNLVKNKCVNFNFNGLTGTGVLTESNKKFLPFQQFGRDIADTTDAVRDPQTLEILDITPCSFGGVSVITPGTNTSNQVAVLYQDVNCTEVPVAIHADQLTPTWRVYSTGSNVFQTRAGCLIGAEHVNNSYECDIPIGAGICASYQTQTNSPRRARSVASQSIIAYTMSLGAENSVAYSNNSIAIPTNFTISVTTEILPVSMTKTSVDCTMYICGDSTECSNLLLQYGSFCTQLNRALTGIAVEQDKNTQEVFAQVKQIYKTPPIKDFGGFNFSQILPDPSKPSKRSFIEDLLFNKVTLADAGFIKQYGDCLGDIAARDLICAQKFNGLTVLPPLLTDEMIAQYTSALLAGTITSGWTFCAGAALQIPFAMQMAYRFNGIGVTQNVLYENQKLIANQFNSAIGKIQDSLSSTASALGKLQDVVNQNAQALNTLVKQLSSNFGAISSVLNDILSRLDKVEAEVQIDRLITGRLQSLQTYVTQQLIRAAEIRASANLAATKMSECVCGQSKRFDFCGKGYHLMSFPQSAPHGVVFLHVTYVPAQEKNFTTAPAICHDGKAHFPREGVFVSNGTHWFVTQRNFYEPQIITTDNTFVSGNCDVVIGIVNNTVYDPLQPELDSGGGGSDIDPYKEFGSSYQLLNFLPLDFFPDLNALVDTATALYEEELTGREHCSPHHTAIRQALVCWDELTKLIAWMSSNITSEQVRTIIVNHVNDTWGLKVRQSLWFHLSCLTFGQHTVQEFLVSFGVWIRTPAPYRPPNAPILSTLPEHTVIC

SEQ ID NO: 11232 - protein, 1301 aa, Artificial Sequence
  SARS-CoV-2/China/WF0028/2020__EPI_ISL_413791 spike protein (1-1147)(G889C_L1034C) WhcAg construct
MFVFLVLLPLVSSQCVNLTTRTQLPPAYTNSFTRGVYYPDKVFRSSVLHSTQDLFLPFFSNVTWFHAIHVSGTNGTKRFDNPVLPFNDGVYFASTEKSNIIRGWIFGTTLDSKTQSLLIVNNATNVVIKVCEFQFCNDPFLGVYYHKNNKSWMESEFRVYSSANNCTFEYVSQPFLMDLEGKQGNFKNLREFVFKNIDGYFKIYSKHTPINLVRDLPQGFSALEPLVDLPIGINITRFQTLLALHRSYLTPGDSSSGWTAGAAAYYVGYLQPRTFLLKYNENGTITDAVDCALDPLSETKCTLKSFTVEKGIYQTSNFRVQPTESIVRFPNITNLCPFGEVFNATRFASVYAWNRKRISNCVADYSVLYNSASFSTFKCYGVSPTKLNDLCFTNVYADSFVIRGDEVRQIAPGQTGKIADYNYKLPDDFTGCVIAWNSNNLDSKVGGNYNYLYRLFRKSNLKPFERDISTEIYQAGSTPCNGVEGFNCYFPLQSYGFQPTNGVGYQPYRVVVLSFELLHAPATVCGPKKSTNLVKNKCVNFNFNGLTGTGVLTESNKKFLPFQQFGRDIADTTDAVRDPQTLEILDITPCSFGGVSVITPGTNTSNQVAVLYQDVNCTEVPVAIHADQLTPTWRVYSTGSNVFQTRAGCLIGAEHVNNSYECDIPIGAGICASYQTQTNSPRRARSVASQSIIAYTMSLGAENSVAYSNNSIAIPTNFTISVTTEILPVSMTKTSVDCTMYICGDSTECSNLLLQYGSFCTQLNRALTGIAVEQDKNTQEVFAQVKQIYKTPPIKDFGGFNFSQILPDPSKPSKRSFIEDLLFNKVTLADAGFIKQYGDCLGDIAARDLICAQKFNGLTVLPPLLTDEMIAQYTSALLAGTITSGWTFCAGAALQIPFAMQMAYRFNGIGVTQNVLYENQKLIANQFNSAIGKIQDSLSSTASALGKLQDVVNQNAQALNTLVKQLSSNFGAISSVLNDILSRLDKVEAEVQIDRLITGRLQSLQTYVTQQLIRAAEIRASANLAATKMSECVCGQSKRVDFCGKGYHLMSFPQSAPHGVVFLHVTYVPAQEKNFTTAPAICHDGKAHFPREGVFVSNGTHWFVTQRNFYEPQIITTDNTFVSGNCDVVIGIVNNTVYDPLQPELESGGGGSDIDPYKEFGSSYQLLNFLPLDFFPDLNALVDTATALYEEELTGREHCSPHHTAIRQALVCWDELTKLIAWMSSNITSEQVRTIIVNHVNDTWGLKVRQSLWFHLSCLTFGQHTVQEFLVSFGVWIRTPAPYRPPNAPILSTLPEHTVIC

SEQ ID NO: 11233 - protein, 1301 aa, Artificial Sequence
  SARS-CoV-2/2019-nCoV/USA-CruiseA-18/2020__MT159716.1 spike protein (1-1147)(G889C_L1034C) WhcAg construct
MFVFLVLLPLVSSQCVNLTTRTQLPPAYTNSFTRGVYYPDKVFRSSVLHSTQDLFLPFFSNVTWFHAIHVSGTNGTKRFDNPVLPFNDGVYFASTEKSNIIRGWIFGTTLDSKTQSLLIVNNATNVVIKVCEFQFCNDPFLGVYYHKNNKSWMESELRVYSSANNCTFEYVSQPFLMDLEGKQGNFKNLREFVFKNIDGYFKIYSKHTPINLVRDLPQGFSALEPLVDLPIGINITRFQTLLALHRSYLTPGDSSSGWTAGAAAYYVGYLQPRTFLLKYNENGTITDAVDCALDPLSETKCTLKSFTVEKGIYQTSNFRVQPTESIVRFPNITNLCPFGEVFNATRFASVYAWNRKRISNCVADYSVLYNSASFSTFKCYGVSPTKLNDLCFTNVYADSFVIRGDEVRQIAPGQTGKIADYNYKLPDDFTGCVIAWNSNNLDSKVGGNYNYLYRLFRKSNLKPFERDISTEIYQAGSTPCNGVEGFNCYFPLQSYGFQPTNGVGYQPYRVVVLSFELLHAPATVCGPKKSTNLVKNKCVNFNFNGLTGTGVLTESNKKFLPFQQFGRDIADTTDAVRDPQTLEILDITPCSFGGVSVITPGTNTSNQVAVLYQDVNCTEVPVAIHADQLTPTWRVYSTGSNVFQTRAGCLIGAEHVNNSYECDIPIGAGICASYQTQTNSPRRARSVASQSIIAYTMSLGAENSVAYSNNSIAIPTNFTISVTTEILPVSMTKTSVDCTMYICGDSTECSNLLLQYGSFCTQLNRALTGIAVEQDKNTQEVFAQVKQIYKTPPIKDFGGFNFSQILPDPSKPSKRSFIEDLLFNKVTLADAGFIKQYGDCLGDIAARDLICAQKFNGLTVLPPLLTDEMIAQYTSALLAGTITSGWTFCAGAALQIPFAMQMAYRFNGIGVTQNVLYENQKLIANQFNSAIGKIQDSLSSTASALGKLQDVVNQNAQALNTLVKQLSSNFGAISSVLNDILSRLDKVEAEVQIDRLITGRLQSLQTYVTQQLIRAAEIRASANLAATKMSECVCGQSKRVDFCGKGYHLMSFPQSAPHGVVFLHVTYVPAQEKNFTTAPAICHDGKAHFPREGVFVSNGTHWFVTQRNFYEPQIITTDNTFVSGNCDVVIGIVNNTVYDPLQPELDSGGGGSDIDPYKEFGSSYQLLNFLPLDFFPDLNALVDTATALYEEELTGREHCSPHHTAIRQALVCWDELTKLIAWMSSNITSEQVRTIIVNHVNDTWGLKVRQSLWFHLSCLTFGQHTVQEFLVSFGVWIRTPAPYRPPNAPILSTLPEHTVIC

SEQ ID NO: 11234 - protein, 1301 aa, Artificial Sequence
  SARS-CoV-2/SARS-CoV-2/Yunnan-01/human/2020/CHN__MT049951.1 spike protein (1-1147)(G889C_L1034C) WhcAg construct
MFVFLVLLPLVSSQCVNLTTRTQLPPANTNSFTRGVYYPDKVFRSSVLHSTQDLFLPFFSNVTWFHAIHVSGTNGTKRFDNPVLPFNDGVYFASTEKSNIIRGWIFGTTLDSKTQSLLIVNNATNVVIKVCEFQFCNDPFLGVYYHKNNKSWMESEFRVYSSANNCTFEYVSQPFLMDLEGKQGNFKNLREFVFKNIDGYFKIYSKHTPINLVRDLPQGFSALEPLVDLPIGINITRFQTLLALHRSYLTPGDSSSGWTAGAAAYYVGYLQPRTFLLKYNENGTITDAVDCALDPLSETKCTLKSFTVEKGIYQTSNFRVQPTESIVRFPNITNLCPFGEVFNATRFASVYAWNRKRISNCVADYSVLYNSASFSTFKCYGVSPTKLNDLCFTNVYADSFVIRGDEVRQIAPGQTGKIADYNYKLPDDFTGCVIAWNSNNLDSKVGGNYNYLYRLFRKSNLKPFERDISTEIYQAGSTPCNGVEGFNCYFPLQSYGFQPTNGVGYQPYRVVVLSFELLHAPATVCGPKKSTNLVKNKCVNFNFNGLTGTGVLTESNKKFLPFQQFGRDIADTTDAVRDPQTLEILDITPCSFGGVSVITPGTNTSNQVAVLYQDVNCTEVPVAIHADQLTPTWRVYSTGSNVFQTRAGCLIGAEHVNNSYECDIPIGAGICASYQTQTNSPRRARSVASQSIIAYTMSLGAENSVAYSNNSIAIPTNFTISVTTEILPVSMTKTSVDCTMYICGDSTECSNLLLQYGSFCTQLNRALTGIAVEQDKNTQEVFAQVKQIYKTPPIKDFGGFNFSQILPDPSKPSKRSFIEDLLFNKVTLADAGFIKQYGDCLGDIAARDLICAQKFNGLTVLPPLLTDEMIAQYTSALLAGTITSGWTFCAGAALQIPFAMQMAYRFNGIGVTQNVLYENQKLIANQFNSAIGKIQDSLSSTASALGKLQDVVNQNAQALNTLVKQLSSNFGAISSVLNDILSRLDKVEAEVQIDRLITGRLQSLQTYVTQQLIRAAEIRASANLAATKMSECVCGQSKRVDFCGKGYHLMSFPQSAPHGVVFLHVTYVPAQEKNFTTAPAICHDGKAHFPREGVFVSNGTHWFVTQRNFYEPQIITTDNTFVSGNCDVVIGIVNNTVYDPLQPELDSGGGGSDIDPYKEFGSSYQLLNFLPLDFFPDLNALVDTATALYEEELTGREHCSPHHTAIRQALVCWDELTKLIAWMSSNITSEQVRTIIVNHVNDTWGLKVRQSLWFHLSCLTFGQHTVQEFLVSFGVWIRTPAPYRPPNAPILSTLPEHTVIC

SEQ ID NO: 11235 - protein, 1301 aa, Artificial Sequence
  SARS-CoV-2/USA/WA-UW292/2020__EPI_ISL_418077 spike protein (1-1147)(G889C_L1034C) WhcAg construct
MFVFLVLLPLVSSQCVNLTTRTQLPPAYTNSFTRGVYYPDKVFRSSVLHSTQDLFLPFFSNVTWFHAIHVSGTNGTKRFDNPVLPFNDGVYFASTEKSNIIRGWIFGTTLDSKTQSLLIVNNATNVVIKVCEFQFCNDPFLGVYYHKNNKSWMESEFRVYSSANNCTFEYVSQPFLMDLEGKQGNFKNLREFVFKNIDGYFKIYSKHTPINLVRDLPQGFSALEPLVDLPIGINITRFQTLLALHRSYLTPGDSSSGWTAGAAAYYVGYLQPRTFLLKYNENGTITDAVDCALDPLSETKCTLKSFTVEKGIYQTSNFRVQPTESIVRFPNITNLCPFGEVFNATRFASVYAWNRKRISNCVADYSVLYNSASFSTFKCYGVSPTKLNDLCFTNVYADSFVIRGDEVRQIAPGQTGKIADYNYKLPDDFTGCVIAWNSNNLDSKVGGNYNYLYRLFRKSNLKPFERDISTEIYQASSTPCNGVEGFNCYFPLQSYGFQPTNGVGYQPYRVVVLSFELLHAPATVCGPKKSTNLVKNKCVNFNFNGLTGTGVLTESNKKFLPFQQFGRDIADTTDAVRDPQTLEILDITPCSFGGVSVITPGTNTSNQVAVLYQDVNCTEVPVAIHADQLTPTWRVYSTGSNVFQTRAGCLIGAEHVNNSYECDIPIGAGICASYQTQTNSPRRARSVASQSIIAYTMSLGAENSVAYSNNSIAIPTNFTISVTTEILPVSMTKTSVDCTMYICGDSTECSNLLLQYGSFCTQLNRALTGIAVEQDKNTQEVFAQVKQIYKTPPIKDFGGFNFSQILPDPSKPSKRSFIEDLLFNKVTLADAGFIKQYGDCLGDIAARDLICAQKFNGLTVLPPLLTDEMIAQYTSALLAGTITSGWTFCAGAALQIPFAMQMAYRFNGIGVTQNVLYENQKLIANQFNSAIGKIQDSLSSTASALGKLQDVVNQNAQALNTLVKQLSSNFGAISSVLNDILSRLDKVEAEVQIDRLITGRLQSLQTYVTQQLIRAAEIRASANLAATKMSECVCGQSKRVDFCGKGYHLMSFPQSAPHGVVFLHVTYVPAQEKNFTTAPAICHDGKAHFPREGVFVSNGTHWFVTQRNFYEPQIITTDNTFVSGNCDVVIGIVNNTVYDPLQPELDSGGGGSDIDPYKEFGSSYQLLNFLPLDFFPDLNALVDTATALYEEELTGREHCSPHHTAIRQALVCWDELTKLIAWMSSNITSEQVRTIIVNHVNDTWGLKVRQSLWFHLSCLTFGQHTVQEFLVSFGVWIRTPAPYRPPNAPILSTLPEHTVIC

SEQ ID NO: 11236 - protein, 1301 aa, Artificial Sequence
  SARS-CoV-2/Iceland/192/2020__EPI_ISL_417819 spike protein (1-1147)(G889C_L1034C) WhcAg construct
MFVFFVLLPLVSSQCVNLTTRTQLPPAYTNSFTRGVYYPDKVFRSSVLHSTQDLFLPFFSNVTWFHAIHVSGTNGTKRFDNPVLPFNDGVYFASTEKSNIIRGWIFGTTLDSKTQSLLIVNNATNVVIKVCEFQFCNDPFLGVYYHKNNKSWMESEFRVYSSANNCTFEYVSQPFLMDLEGKQGNFKNLREFVFKNIDGYFKIYSKHTPINLVRDLPQGFSALEPLVDLPIGINITRFQTLLALHRSYLTPGDSSSGWTAGAAAYYVGYLQPRTFLLKYNENGTITDAVDCALDPLSETKCTLKSFTVEKGIYQTSNFRVQPTESIVRFPNITNLCPFGEVFNATRFASVYAWNRKRISNCVADYSVLYNSASFSTFKCYGVSPTKLNDLCFTNVYADSFVIRGDEVRQIAPGQTGKIADYNYKLPDDFTGCVIAWNSNNLDSKVGGNYNYLYRLFRKSNLKPFERDISTEIYQAGSTPCNGVEGFNCYFPLQSYGFQPTNGVGYQPYRVVVLSFELLHAPATVCGPKKSTNLVKNKCVNFNFNGLTGTGVLTESNKKFLPFQQFGRDIADTTDAVRDPQTLEILDITPCSFGGVSVITPGTNTSNQVAVLYQGVNCTEVPVAIHADQLTPTWRVYSTGSNVFQTRAGCLIGAEHVNNSYECDIPIGAGICASYQTQTNSPRRARSVASQSIIAYTMSLGAENSVAYSNNSIAIPTNFTISVTTEILPVSMTKTSVDCTMYICGDSTECSNLLLQYGSFCTQLNRALTGIAVEQDKNTQEVFAQVKQIYKTPPIKDFGGFNFSQILPDPSKPSKRSFIEDLLFNKVTLADAGFIKQYGDCLGDIAARDLICAQKFNGLTVLPPLLTDEMIAQYTSALLAGTITSGWTFCAGAALQIPFAMQMAYRFNGIGVTQNVLYENQKLIANQFNSAIGKIQDSLSSTASALGKLQDVVNQNAQALNTLVKQLSSNFGAISSVLNDILSRLDKVEAEVQIDRLITGRLQSLQTYVTQQLIRAAEIRASANLAATKMSECVCGQSKRVDFCGKGYHLMSFPQSAPHGVVFLHVTYVPAQEKNFTTAPAICHDGKAHFPREGVFVSNGTHWFVTQRNFYEPQIITTDNTFVSGNCDVVIGIVNNTVYDPLQPELDSGGGGSDIDPYKEFGSSYQLLNFLPLDFFPDLNALVDTATALYEEELTGREHCSPHHTAIRQALVCWDELTKLIAWMSSNITSEQVRTIIVNHVNDTWGLKVRQSLWFHLSCLTFGQHTVQEFLVSFGVWIRTPAPYRPPNAPILSTLPEHTVIC

SEQ ID NO: 11237 - protein, 1301 aa, Artificial Sequence
  SARS-CoV-2/Belgium/ULG-6939/2020__EPI_ISL_417020 spike protein (1-1147)(G889C_L1034C) WhcAg construct
MFVFLVLLPLVSSQCVNLTTRTQLPPAYTNSFTRGVYYPDKVFRSSVLHSTQDLFLPFFSNVTWFHAIHVSGTNGTKRFDNPVLPFNDGVYFASTEKSNIIRGWIFGTTLDSKTQSLLIVNNATNVVIKVCEFQFCNDPFLGVYYHKNNKSWMESEFRVYSSANNCTFEYVSQPFLMDLEGKQGNFKNLREFVFKNIDGYFKIYSKHTPINLVRDLPQGFSALEPLVDLPIGINITRFQTLLALHRSYLTPGDSSSGWTAGAAAYYVGYLQPRTFLLKYNENGTITDAVDCALDPLSETKCTLKSFTVEKGIYQTSNFRVQPTESIVRFPNITNLCPFGEVFNATRFASVYAWNRKRISNCVADYSVLYNSASFSTFKCYGVSPTKLNDLCFTNVYADSFVIRGDEVRQIAPGQTGKIADYNYKLPDDFTGCVIAWNSNNLDSKVGGNYNYLYRLFRKSNLKPFERDISTEIYQAGSTPCNGVEGFNCYFPLQSYGFQPTNGVGYQPYRVVVLSFELLHAPATVCGPKKSTNLVKNKCVNFNFNGLTGTGVLTESNKKFLPFQQFGRDIADTTDAVRDPQTLEILDITPCSFGGVSVITPGTNTSNQVAVLYQGVNCTEVPVAIHADQLTPTWRVYSTGSNVFQTRAGCLIGAEHVNNSYECDIPIGAGICASYQTQTNSPRRARSVASQSIIAYTMSLGAENSVVYSNNSIAIPTNFTISVTTEILPVSMTKTSVDCTMYICGDSTECSNLLLQYGSFCTQLNRALTGIAVEQDKNTQEVFAQVKQIYKTPPIKDFGGFNFSQILPDPSKPSKRSFIEDLLFNKVTLADAGFIKQYGDCLGDIAARDLICAQKFNGLTVLPPLLTDEMIAQYTSALLAGTITSGWTFCAGAALQIPFAMQMAYRFNGIGVTQNVLYENQKLIANQFNSAIGKIQDSLSSTASALGKLQDVVNQNAQALNTLVKQLSSNFGAISSVLNDILSRLDKVEAEVQIDRLITGRLQSLQTYVTQQLIRAAEIRASANLAATKMSECVCGQSKRVDFCGKGYHLMSFPQSAPHGVVFLHVTYVPAQEKNFTTAPAICHDGKAHFPREGVFVSNGTHWFVTQRNFYEPQIITTDNTFVSGNCDVVIGIVNNTVYDPLQPELDSGGGGSDIDPYKEFGSSYQLLNFLPLDFFPDLNALVDTATALYEEELTGREHCSPHHTAIRQALVCWDELTKLIAWMSSNITSEQVRTIIVNHVNDTWGLKVRQSLWFHLSCLTFGQHTVQEFLVSFGVWIRTPAPYRPPNAPILSTLPEHTVIC

SEQ ID NO: 11238 - protein, 1301 aa, Artificial Sequence
  SARS-CoV-2/France/HF2496/2020__EPI_ISL_418231 spike protein (1-1147)(G889C_L1034C) WhcAg construct
MFVFLVLLPLVSSQCVNLTTRTQLPPAYTNSFTRGVYYPDKVFRSSVLHSTQDLFLPFFSNVTWFHAIHVSGTNGTKRFDNPVLPFNDGVYFASTEKSNIIRGWIFGTTLDSKTQSLLIVNNATNVVIKVCEFQFCNDPFLGVYYHKNNKSWMESEFRVYSSANNCTFEYVSQPFLMDLEGKQGNFKNLREFVFKNIDGYFKIYSKHTPINLVRDLPQGFSALEPLVDLPIGINITRFQTLLALHRSYLTPGDSSSGWTAGAAAYYVGYLQPRTFLLKYNENGTITDAVDCALDPLSETKCTLKSFTVEKGIYQTSNFRVQPTESIVRFPNITNLCPFGEVFNATRFASVYAWNRKRISNCVADYSVLYNSASFSTFKCYGVSPTKLNDLCFTNVYADSFVIRGDEVRQIAPGQTGKIADYNYKLPDDFTGCVIAWNSNNLDSKVGGNYNYLYRLFRKSNLKPFERDISTEIYQAGSTPCNGVEGFNCYFPLQSYGFQPTNGVGYQPYRVVVLSFELLHAPATVCGPKKSTNLVKNKCVNFNFNGLTGTGVLTESNKKFLPFQQFGRDIADTTDAVRDPQTLEILDITPCSFGGVSVITPGTNTSNQVAVLYQGVNCTEVPVAIHADQLTPTWRVYSTGSNVFQTRAGCLIGAEHVNNSYECDIPIGAGICASYQTQTNSPRRARSVASQSIIAYTMSLGAENSVAYSNNSIAIPTNFTISVTTEILPVSMTKTSVDCTMYICGDSTECSNLLLQYGSFCTQLNRALTGIAVEQDKNTQEVFAQVKQIYKTPPIKDFGGFNFSQILPDPSKPSKRSFIEDLLFNKVTLADAGFIKQYGDCLGDIVARDLICAQKFNGLTVLPPLLTDEMIAQYTSALLAGTITSGWTFCAGAALQIPFAMQMAYRFNGIGVTQNVLYENQKLIANQFNSAIGKIQDSLSSTASALGKLQDVVNQNAQALNTLVKQLSSNFGAISSVLNDILSRLDKVEAEVQIDRLITGRLQSLQTYVTQQLIRAAEIRASANLAATKMSECVCGQSKRVDFCGKGYHLMSFPQSAPHGVVFLHVTYVPAQEKNFTTAPAICHDGKAHFPREGVFVSNGTHWFVTQRNFYEPQIITTDNTFVSGNCDVVIGIVNNTVYDPLQPELDSGGGGSDIDPYKEFGSSYQLLNFLPLDFFPDLNALVDTATALYEEELTGREHCSPHHTAIRQALVCWDELTKLIAWMSSNITSEQVRTIIVNHVNDTWGLKVRQSLWFHLSCLTFGQHTVQEFLVSFGVWIRTPAPYRPPNAPILSTLPEHTVIC

SEQ ID NO: 11239 - protein, 1301 aa, Artificial Sequence
  SARS-CoV-2/USA/WA-UW291/2020__EPI_ISL_418076 spike protein (1-1147)(G889C_L1034C) WhcAg construct
MFVFLVLLPLVSSQCVNLTTRTQLPPAYTNSFTRGVYYPDKVFRSSVLHSTQDLFLPFFSNVTWFHAIHVSGTNGTKRFDNPVLPFNDGVYFASTEKSNIIRGWIFGTTLDSKTQSLLIVNNATNVVIKVCEFQFCNDPFLGVYYHKNNKSWMESEFRVYSSANNCTFEYVSQPFLMDLEGKQGNFKNLREFVFKNIDGYFKIYSKHTPINLVRDLPQGFSALEPLVDLPIGINITRFQTLLALHRSYLTPGDSSSGWTAGAAAYYVGYLQPRTFLLKYNENGTITDAVDCALDPLSETKCTLKSFTVEKGIYQTSNFRVQPTESIVRFPNITNLCPFGEVFNATRFASVYAWNRKRISNCVADYSVLYNSASFSTFKCYGVSPTKLNDLCFTNVYADSFVIRGDEVRQIAPGQTGKIADYNYKLPDDFTGCVIAWNSNNLDSKVGGNYNYLYRLFRKSNLKPFERDISTEIYQAGSTPCNGVEGFNCYFPLQSYGFQPTNGVGYQPYRVVVLSFELLHAPATVCGPKKSTNLVKNKCVNFNFNGLTGTGVLTESNKKFLPFQQFGRDIADTTDAVRDPQTLEILDITPCSFGGVSVITPGTNTSNQVAVLYQGVNCTEVPVAIHADQLTPTWRVYSTGSNVFQTRAGCLIGAEHVNNSYECDIPIGAGICASYQTQTNSPRRARSVASQSIIAYTMSLGAENSVAYSNNSIAIPTNFTISVTTEILPVSMTKTSVDCTMYICGDSTECSNLLLQYGSFCTQLNRALTGIAVEQDKNTQEVFAQVKQIYKTPPIKDFGGFNFSQILPDPSKPSKRSFIEDLLFNKVTLADAGFIKQYGDCLGDIAARDLICAQKFNGLTVLPPLLTDEMIAQYTSALLAGTITSGWTFCAGAALQIPFAMQMAYRFNGIGVTQNVLYENQKLIANQFNSAIGKIQYSLSSTASALGKLQDVVNQNAQALNTLVKQLSSNFGAISSVLNDILSRLDKVEAEVQIDRLITGRLQSLQTYVTQQLIRAAEIRASANLAATKMSECVCGQSKRVDFCGKGYHLMSFPQSAPHGVVFLHVTYVPAQEKNFTTAPAICHDGKAHFPREGVFVSNGTHWFVTQRNFYEPQIITTDNTFVSGNCDVVIGIVNNTVYDPLQPELDSGGGGSDIDPYKEFGSSYQLLNFLPLDFFPDLNALVDTATALYEEELTGREHCSPHHTAIRQALVCWDELTKLIAWMSSNITSEQVRTIIVNHVNDTWGLKVRQSLWFHLSCLTFGQHTVQEFLVSFGVWIRTPAPYRPPNAPILSTLPEHTVIC

SEQ ID NO: 11240 - protein, 1301 aa, Artificial Sequence; identical to SEQ ID NO: 11203
  SARS-CoV-2/Portugal/PT0034/2020__EPI_ISL_418019 spike protein (1-1147)(G889C_L1034C) WhcAg construct

SEQ ID NO: 11241 - protein, 1301 aa, Artificial Sequence; identical to SEQ ID NO: 11195
  SARS-CoV-2/Iceland/202/2020__EPI_ISL_417750 spike protein (1-1147)(G889C_L1034C) WhcAg construct

SEQ ID NO: 11242 - protein, 1301 aa, Artificial Sequence
  SARS-CoV-2/USA/WA-UW261/2020__EPI_ISL_418046 spike protein (1-1147)(G889C_L1034C) WhcAg construct
MFVFLVLLPLVSSQCVNLTTRTQLPPAYTNSFTRGVYYPDKVFRSSVLHSTQDLFLPFFSNVTWFHAIHVSGTNGTKRFDNPVLPFNDGVYFASTEKSNIIRGWIFGTTLDSKTQSLLIVNNATNVVIKVCEFQFCNDPFLGVYYHKNNKSWMESEFRVYSSANNCTFEYVSQPFLMDLEGKQGNFKNLREFVFKNIDGYFKIYSKHTPINLVRDLPQGFSALEPLVDLPIGINITRFQTLLALHRSYLTPGDSSSGWTAGAAAYYVGYLQPRTFLLKYNENGTITDAVDCALDPLSETKCTLKSFTVEKGIYQTSNFRVQPTESIVRFPNITNLCPFGEVFNATRFTSVYAWNRKRISNCVADYSVLYNSASFSTFKCYGVSPTKLNDLCFTNVYADSFVIRGDEVRQIAPGQTGKIADYNYKLPDDFTGCVIAWNSNNLDSKVGGNYNYLYRLFRKSNLKPFERDISTEIYQAGSTPCNGVEGFNCYFPLQSYGFQPTNGVGYQPYRVVVLSFELLHAPATVCGPKKSTNLVKNKCVNFNFNGLTGTGVLTESNKKFLPFQQFGRDIADTTDAVRDPQTLEILDITPCSFGGVSVITPGTNTSNQVAVLYQDVNCTEVPVAIHADQLTPTWRVYSTGSNVFQTRAGCLIGAEHVNNSYECDIPIGAGICASYQTQTNSPRRARSVASQSIIAYTMSLGAENSVAYSNNSIAIPTNFTISVTTEILPVSMTKTSVDCTMYICGDSTECSNLLLQYGSFCTQLNRALTGIAVEQDKNTQEVFAQVKQIYKTPPIKDFGGFNFSQILPDPSKPSKRSFIEDLLFNKVTLADAGFIKQYGDCLGDIAARDLICAQKFNGLTVLPPLLTDEMIAQYTSALLAGTITSGWTFCAGAALQIPFAMQMAYRFNGIGVTQNVLYENQKLIANQFNSAIGKIQDSLSSTASALGKLQDVVNQNAQALNTLVKQLSSNFGAISSVLNDILSRLDKVEAEVQIDRLITGRLQSLQTYVTQQLIRAAEIRASANLAATKMSECVCGQSKRVDFCGKGYHLMSFPQSAPHGVVFLHVTYVPAQEKNFTTAPAICHDGKAHFPREGVFVSNGTHWFVTQRNFYEPQIITTDNTFVSGNCDVVIGIVNNTVYDPLQPELDSGGGGSDIDPYKEFGSSYQLLNFLPLDFFPDLNALVDTATALYEEELTGREHCSPHHTAIRQALVCWDELTKLIAWMSSNITSEQVRTIIVNHVNDTWGLKVRQSLWFHLSCLTFGQHTVQEFLVSFGVWIRTPAPYRPPNAPILSTLPEHTVIC

SEQ ID NO: 11243 - protein, 1301 aa, Artificial Sequence
  SARS-CoV-2/Portugal/PT0035/2020__EPI_ISL_418020 spike protein (1-1147)(G889C_L1034C) WhcAg construct
MFVFLVLLPLVSSQCVNLTTRTQLPPAYTNSFTRGVYYPDKVFRSSVLHSTQDLFLPFFSNVTWFHAIHVSGTNGTKRFDNPVLPFNDGVYFASTEKSNIIRGWIFGTTLDSKTQSLLIVNNATNVVIKVCEFQFCNDPFLGVYYHKNNKSWMESEFRVYSSANNCTFEYVSQPFLMDLEGKQGNFKNLREFVFKNIDGYFKIYSKHTPINLVRDLPQGFSALEPLVDLPIGINITRFQTLLALHRSYLTPGDSSSGWTAGAAAYYVGYLQPRTFLLKYNENGTITDAVDCALDPLSETKCTLKSFTVEKGIYQTSNFRVQPTESIVRFPNITNLCPFGEVFNATRFASVYAWNRKRISNCVADYSVLYNSASFSTFKCYGVSPTKLNDLCFTNVYADSFVIRGDEVRQIAPGQTGKIADYNYKLPDDFTGCVIAWNSNNLDSKVGGNYNYLYRLFRKSNLKPFERDISTEIYQAGSTPCNGVEGFNCYFPLQSYGFQPTNGVGYQPYRVVVLSFELLHAPATVCGPKKSTNLVKNKCVNFNFNGLTGTGVLTESNKKFLPFQQFGRDIADTTDAVRDPQTLEILDITPCSFGGVSVITPGTNTSNQVAVLYQDVNCTEVPVAIHADQLTPTWRVYSTGSNVFQTRAGCLIGAEHVNNSYECDIPIGAGICASYQTQTNSPRRARSVASQSIIAYTMSLGAENSVAYSNNSIAIPTNFTISVTTEILPVSMTKTSVDCTMYICGDSTECSNLLLQYGSFCTQLNRALTGIAVEQDKNTQEVFAQVKQIYKTPPIKDFGGFNFSQILPDPSKPSKRSFIEDLLFNKVTLADAGFIKQYGDCLGDISARDLICAQKFNGLTVLPPLLTDEMIAQYTSALLAGTITSGWTFCAGAALQIPFAMQMAYRFNGIGVTQNVLYENQKLIANQFNSAIGKIQDSLSSTASALGKLQDVVNQNAQALNTLVKQLSSNFGAISSVLNDILSRLDKVEAEVQIDRLITGRLQSLQTYVTQQLIRAAEIRASANLAATKMSECVCGQSKRVDFCGKGYHLMSFPQSAPHGVVFLHVTYVPAQEKNFTTAPAICHDGKAHFPREGVFVSNGTHWFVTQRNFYEPQIITTDNTFVSGNCDVVIGIVNNTVYDPLQPELDSGGGGSDIDPYKEFGSSYQLLNFLPLDFFPDLNALVDTATALYEEELTGREHCSPHHTAIRQALVCWDELTKLIAWMSSNITSEQVRTIIVNHVNDTWGLKVRQSLWFHLSCLTFGQHTVQEFLVSFGVWIRTPAPYRPPNAPILSTLPEHTVIC

SEQ ID NO: 11244 - protein, 1301 aa, Artificial Sequence
  SARS-CoV-2/USA/NY-NYUMC7/2020__EPI_ISL_418192 spike protein (1-1147)(G889C_L1034C) WhcAg construct
MFVFLVLLPLVSSQCVNLTTRTQLPPAYTNSFTRGVYYPDKVFRSSVLHSTQDLFLPFFSNVTWFHAIHVSGTNGTKRFDNPVLPFNDGVYFASTEKSNIIRGWIFGTTLDSKTQSLLIVNNATNVVIKVCEFQFCNDPFLGVYHHKNNKSWMESEFRVYSSANNCTFEYVSQPFLMDLEGKQGNFKNLREFVFKNIDGYFKIYSKHTPINLVRDLPQGFSALEPLVDLPIGINITRFQTLLALHRSYLTPGDSSSGWTAGAAAYYVGYLQPRTFLLKYNENGTITDAVDCALDPLSETKCTLKSFTVEKGIYQTSNFRVQPTESIVRFPNITNLCPFGEVFNATRFASVYAWNRKRISNCVADYSVLYNSASFSTFKCYGVSPTKLNDLCFTNVYADSFVIRGDEVRQIAPGQTGKIADYNYKLPDDFTGCVIAWNSNNLDSKVGGNYNYLYRLFRKSNLKPFERDISTEIYQAGSTPCNGVEGFNCYFPLQSYGFQPTNGVGYQPYRVVVLSFELLHAPATVCGPKKSTNLVKNKCVNFNFNGLTGTGVLTESNKKFLPFQQFGRDIADTTDAVRDPQTLEILDITPCSFGGVSVITPGTNTSNQVAVLYQGVNCTEVPVAIHADQLTPTWRVYSTGSNVFQTRAGCLIGAEHVNNSYECDIPIGAGICASYQTQTNSPRRARSVASQSIIAYTMSLGAENSVAYSNNSIAIPTNFTISVTTEILPVSMTKTSVDCTMYICGDSTECSNLLLQYGSFCTQLNRALTGIAVEQDKNTQEVFAQVKQIYKTPPIKDFGGFNFSQILPDPSKPSKRSFIEDLLFNKVTLADAGFIKQYGDCLGDIAARDLICAQKFNGLTVLPPLLTDEMIAQYTSALLAGTITSGWTFCAGAALQIPFAMQMAYRFNGIGVTQNVLYENQKLIANQFNSAIGKIQDSLSSTASALGKLQDVVNQNAQALNTLVKQLSSNFGAISSVLNDILSRLDKVEAEVQIDRLITGRLQSLQTYVTQQLIRAAEIRASANLAATKMSECVCGQSKRVDFCGKGYHLMSFPQSAPHGVVFLHVTYVPAQEKNFTTAPAICHDGKAHFPREGVFVSNGTHWFVTQRNFYEPQIITTDNTFVSGNCDVVIGIVNNTVYDPLQPELDSGGGGSDIDPYKEFGSSYQLLNFLPLDFFPDLNALVDTATALYEEELTGREHCSPHHTAIRQALVCWDELTKLIAWMSSNITSEQVRTIIVNHVNDTWGLKVRQSLWFHLSCLTFGQHTVQEFLVSFGVWIRTPAPYRPPNAPILSTLPEHTVIC

SEQ ID NO: 11245 - protein, 1301 aa, Artificial Sequence
  SARS-CoV-2/Iceland/189/2020__EPI_ISL_417709 spike protein (1-1147)(G889C_L1034C) WhcAg construct
MFVFLVLLPLVSSQCVNLTTRTQLPPAYTNSFTRGVYYPDKVFRSSVLHSTQDLFLPFFSNVTWFHAIHVSGTNGTKRFDNPVLPFNDGVYFASTEKSNIIRGWIFGTTLDSKTQSLLIVNNATNVVIKVCEFQFCNDPFLGVYYHKNNKSWMESEFRVYSSANNCTFEYVSQPFLMDLEGKQGNFKNLREFVFKNIDGYFKIYSKHTPINLVRDLPQGFSALEPLVDLPIGINITRFQTLLALHRSYLTPGDSSSGWTAGAAAYYVGYLQPRTFLLKYNENGTITDAVDCALDPLSETKCTLKSFTVEKGIYQTSNFRVQPTESIVRFPNITNLCPFGEVFNATRFASVYAWNRKRISNCVADYSVLYNSASFSTFKCYGVSPTKLNDLCFTNVYADSFVIRGDEVRQIAPGQTGKIADYNYKLPDDFTGCVIAWNSNNLDSKVGGNYNYLYRLFRKSNLKPFERDISTEIYQAGSTPCNGVEGFNCYFPLQSYGFQPTNGVGYQPYRVVVLSFELLHAPATVCGPKKSTNLVKNKCVNFNFNGLTGTGVLTESNKKFLPFQQFGRDIADTTDAVRDPQTLEILDITPCSFGGVSVITPGTNTSNQVAVLYQGVNCTEVPVAIHADQLTPTWRVYSTGSNVFQTRAGCLIGAEHVNNSYECDIPIGAGICASYQTQTNSPRRARSVASQSIIAYTMSLGAENSVAYSNNSIAIPTNFTISVTTEILPVSMTKTSVDCTMYICGDSTECSNLLLQYGSFCTQLNRALTGIAVEQDKNTQEVFAQVKQIYKTPPIKDFGGFNFSQILPDPSKPSKRSFIEDLLFNKVTLADAGFTKQYGDCLGDIAARDLICAQKFNGLTVLPPLLTDEMIAQYTSALLAGTITSGWTFCAGAALQIPFAMQMAYRFNGIGVTQNVLYENQKLIANQFNSAIGKIQDSLSSTASALGKLQDVVNQNAQALNTLVKQLSSNFGAISSVLNDILSRLDKVEAEVQIDRLITGRLQSLQTYVTQQLIRAAEIRASANLAATKMSECVCGQSKRVDFCGKGYHLMSFPQSAPHGVVFLHVTYVPAQEKNFTTAPAICHDGKAHFPREGVFVSNGTHWFVTQRNFYEPQIITTDNTFVSGNCDVVIGIVNNTVYDPLQPELDSGGGGSDIDPYKEFGSSYQLLNFLPLDFFPDLNALVDTATALYEEELTGREHCSPHHTAIRQALVCWDELTKLIAWMSSNITSEQVRTIIVNHVNDTWGLKVRQSLWFHLSCLTFGQHTVQEFLVSFGVWIRTPAPYRPPNAPILSTLPEHTVIC

SEQ ID NO: 11246 - protein, 1301 aa, Artificial Sequence
  SARS-CoV-2/Australia/NSW56/2020__EPI_ISL_417408 spike protein (1-1147)(G889C_L1034C) WhcAg construct
MFVFLVLLPLVSSQCVNLTTRTQLPPAYTNSFTRGVYYPDKVFRSSVLHSTQDLFLPFFSNVTWFHAIHVSGTNGTKRFDNPVLPFNDGVYFASTEKSNIIRGWIFGTTLDSKTQSLLIVNNATNVVIKVCEFQFCNDPFLGVYYHKNNKSWMESEFRVYSSANNCTFEYVSQPFLMDLEGKQGNFKNLREFVFKNIDGYFKIYSKHTPINLVRDLPQGFSALEPLVDLPIGINITRFQTLLALHRSYLTPGDSSSGWTAGAAAYYVGYLQPRTFLLKYNENGTITDAVDCALDPLSETKCTLKSFTVEKGIYQTSNFRVQPTESIVRFPNITNLCPFGEVFNATRFASVYAWNRKRISNCVADYSVLYNSASFSTFKCYGVSPTKLNDLCFTNVYADSFVIRGDEVRQIAPGQTGKIADYNYKLPDDFTGCVIAWNSNNLDSKVGGNYNYLYRLFRKSNLKPFERDISTEIYQAGSTPCNGVEGFNCYFPLQSYGFQPTNGVGYQPYRVVVLSFELLHAPATVCGPKKSTNLVKNKCVNFNFNGLTGTGVLTESNKKFLPFQQFGRDIADTTDAVRDPQTLEILDITPCSFGGVSVITPGTNTSNQVAVLYQDVNCTEVPVAIHADQLTPTWRVYSTGSNVFQTRAGCLIGAEHVNNSYECDIPIGAGICASYQTQTNSPRRARSVASQSIIAYTMSLGAENSVAYSNNSIAIPTNFTISVTTEILPVSMTKTSVDCTMYICGDSTECSNLLLQYGSFCTQLNRALTGIAVEQDKNTQEVFAQVKQIYKTPPIKDFGGFNFSQILPDSSKPSKRSFIEDLLFNKVTLADAGFIKQYGDCLGDIAARDLICAQKFNGLTVLPPLLTDEMIAQYTSALLAGTITSGWTFCAGAALQIPFAMQMAYRFNGIGVTQNVLYENQKLIANQFNSAIGKIQDSLSSTASALGKLQDVVNQNAQALNTLVKQLSSNFGAISSVLNDILSRLDKVEAEVQIDRLITGRLQSLQTYVTQQLIRAAEIRASANLAATKMSECVCGQSKRVDFCGKGYHLMSFPQSAPHGVVFLHVTYVPAQEKNFTTAPAICHDGKAHFPREGVFVSNGTHWFVTQRNFYEPQIITTDNTFVSGNCDVVIGIVNNTVYDPLQPELDSGGGGSDIDPYKEFGSSYQLLNFLPLDFFPDLNALVDTATALYEEELTGREHCSPHHTAIRQALVCWDELTKLIAWMSSNITSEQVRTIIVNHVNDTWGLKVRQSLWFHLSCLTFGQHTVQEFLVSFGVWIRTPAPYRPPNAPILSTLPEHTVIC

SEQ ID NO: 11247 - protein, 1301 aa, Artificial Sequence
  SARS-CoV-2/Iceland/280/2020__EPI_ISL_417608 spike protein (1-1147)(G889C_L1034C) WhcAg construct
MFVFLVLLPLVSSQCVNLTTRTQLPPAYTNSFTRGVYYPDKVFRSSVLHSTQDLFLPFFSNVTWFHAIHVSGTNGTKRFDNPVLPFNDGVYFASTEKSNIIRGWIFGTTLDSKTQSLLIVNNATNVVIKVCEFQFCNDPFLGVYYHKNNKSWMESEFRVYSSANNCTFEYVSQPFLMDLEGKQGNFKNLREFVFKNIDGYFKIYSKHTPINLVRDLPQGFSALEPLVDLPIGINITRFQTLLALHRSYLTPGDSSSGWTAGAAAYYVGYLQPRTFLLKYNENGTITDAVDCALDPLSETKCTLKSFTVEKGIYQTSNFRVQPTESIVRFPNITNLCPFGEVFNATRFASVYAWNRKRISNCVADYSVLYNSASFSTFKCYGVSPTKLNDLCFTNVYADSFVIRGDEVRQIAPGQTGKIADYNYKLPDDFTGCVIAWNSNNLDSKVGGNYNYLYRLFRKSNLKPFERDISTEIYQAGSTPCNGVEGFNCYFPLQSYGFQPTNGVGYQPYRVVVLSFELLHAPATVCGPKKSTNLVKNKCVNFNFNGLTGTGVLTESNKKFLPFQQFGRDIADTTDAVRDPQTLEILDITPCSFGGVSVITPGTNTSNQVAVLYQGVNCTEVPVAIHADQLTPTWRVYSTGSNVFQTRAGCLIGAEHVNNSYECDIPIGAGICASYHTQTNSPRRARSVASQSIIAYTMSLGAENSVAYSNNSIAIPTNFTISVTTEILPVSMTKTSVDCTMYICGDSTECSNLLLQYGSFCTQLNRALTGIAVEQDKNTQEVFAQVKQIYKTPPIKDFGGFNFSQILPDPSKPSKRSFIEDLLFNKVTLADAGFIKQYGDCLGDIAARDLICAQKFNGLTVLPPLLTDEMIAQYTSALLAGTITSGWTFCAGAALQIPFAMQMAYRFNGIGVTQNVLYENQKLIANQFNSAIGKIQDSLSSTASALGKLQDVVNQNAQALNTLVKQLSSNFGAISSVLNDILSRLDKVEAEVQIDRLITGRLQSLQTYVTQQLIRAAEIRASANLAATKMSECVCGQSKRVDFCGKGYHLMSFPQSAPHGVVFLHVTYVPAQEKNFTTAPAICHDGKAHFPREGVFVSNGTHWFVTQRNFYEPQIITTDNTFVSGNCDVVIGIVNNTVYDPLQPELDSGGGGSDIDPYKEFGSSYQLLNFLPLDFFPDLNALVDTATALYEEELTGREHCSPHHTAIRQALVCWDELTKLIAWMSSNITSEQVRTIIVNHVNDTWGLKVRQSLWFHLSCLTFGQHTVQEFLVSFGVWIRTPAPYRPPNAPILSTLPEHTVIC

SEQ ID NO: 11248 - protein, 1301 aa, Artificial Sequence; identical to SEQ ID NO: 11203
  SARS-CoV-2/Iceland/247/2020__EPI_ISL_417575 spike protein (1-1147)(G889C_L1034C) WhcAg construct

SEQ ID NO: 11249 - protein, 1301 aa, Artificial Sequence
  SARS-CoV-2/Iceland/238/2020__EPI_ISL_417566 spike protein (1-1147)(G889C_L1034C) WhcAg construct
MFVFLVLLPLVSSQCVNLTTRTQLPPAYTNSFTRGVYYPDKVFRSSVLHSTQDLFLPFFSNVTWFHAIHVSGTNGTKRFDNPVLPFNDGVYFASTEKSNIIRGWIFGTTLDSKTQSLLIVNNATNVVIKVCEFQFCNDPFLGVYYHKNNKSWMESEFRVYSSANNCTFEYVSQPFLMDLEGKQGNFKNLREFVFKNIDGYFKIYSKHTPINLVRDLPQGFSALEPLVDLPIGINITRFQTLLALHRSYLTPGDSSSGWTAGAAAYYVGYLQPRTFLLKYNENGTITDAVDCALDPLSETKCTLKSFTVEKGIYQTSNFRVQPTESIVRFPNITNLCPFGEVFNATRFASVYAWNRKRISNCVADYSVLYNSASFSTFKCYGVSPTKLNDLCFTNVYADSFVIRGDEVRQIAPGQTGKIADYNYKLPDDFTGCVIAWNSNNLDSKVGGNYNYLYRLFRKSNLKPFERDISTEIYQAGSTPCNGVEGFNCYFPLQSYGFQPTNGVGYQPYRVVVLSFELLHAPATVCGPKKSTNLVKNKCVNFNFNGLTGTGVLTESNKKFLPFQQFGRDIADTTDAVRDPQTLEILDITPCSFGGVSVITPGTNTSNQVAVLYQGVNCTEVPVAIHADQLTPTWRVYSTGSNVFQTRAGCLIGAEHVNNSYECDIPIGAGICASYQTQTNSPRRARSVASQSIIAYTMSLGAENSVAYSNNSIAIPTNFTISVTTEILPVSMTKTSVDCTMYICGDSTECSNLLLQYGSFCTQLNRALTGIAVEQDKNTQEVFAQVKQIYKTPPIKDFGGFNFSQILPDPSKPSKRSFIEDLLFNKVTLADVGFIKQYGDCLGDIAARDLICAQKFNGLTVLPPLLTDEMIAQYTSALLAGTITSGWTFCAGAALQIPFAMQMAYRFNGIGVTQNVLYENQKLIANQFNSAIGKIQDSLSSTASALGKLQDVVNQNAQALNTLVKQLSSNFGAISSVLNDILSRLDKVEAEVQIDRLITGRLQSLQTYVTQQLIRAAEIRASANLAATKMSECVCGQSKRVDFCGKGYHLMSFPQSAPHGVVFLHVTYVPAQEKNFTTAPAICHDGKAHFPREGVFVSNGTHWFVTQRNFYEPQIITTDNTFVSGNCDVVIGIVNNTVYDPLQPELDSGGGGSDIDPYKEFGSSYQLLNFLPLDFFPDLNALVDTATALYEEELTGREHCSPHHTAIRQALVCWDELTKLIAWMSSNITSEQVRTIIVNHVNDTWGLKVRQSLWFHLSCLTFGQHTVQEFLVSFGVWIRTPAPYRPPNAPILSTLPEHTVIC

SEQ ID NO: 11250 - protein, 1301 aa, Artificial Sequence
  SARS-CoV-2/Greece/16/2020__EPI_ISL_418265 spike protein (1-1147)(G889C_L1034C) WhcAg construct
MFVFLVLLPLVSSQCVNLTTRTQLPPAYTNSFTRGVYYPDKVFRSSVLHSTQDLFLPFFSNVTWFHAIHVSGTNGTKRFDNPVLPFNDGVYFASTEKSNIIRGWIFGTTLDSKTQSLLIVNNATNVVIKVCEFQFCNDPFLGVYYHKNNKSWMESEFRVYSSANNCTFEYVSQPFLMDLEGKQGNFKNLREFVFKNVDGYFKIYSKHTPINLVRDLPQGFSALEPLVDLPIGINITRFQTLLALHRSYLTPGDSSSGWTAGAAAYYVGYLQPRTFLLKYNENGTITDAVDCALDPLSETKCTLKSFTVEKGIYQTSNFRVQPTESIVRFPNITNLCPFGEVFNATRFASVYAWNRKRISNCVADYSVLYNSASFSTFKCYGVSPTKLNDLCFTNVYADSFVIRGDEVRQIAPGQTGKIADYNYKLPDDFTGCVIAWNSNNLDSKVGGNYNYLYRLFRKSNLKPFERDISTEIYQAGSTPCNGVEGFNCYFPLQSYGFQPTNGVGYQPYRVVVLSFELLHAPATVCGPKKSTNLVKNKCVNFNFNGLTGTGVLTESNKKFLPFQQFGRDIADTTDAVRDPQTLEILDITPCSFGGVSVITPGTNTSNQVAVLYQDVNCTEVPVAIHADQLTPTWRVYSTGSNVFQTRAGCLIGAEHVNNSYECDIPIGAGICASYQTQTNSPRRARSVASQSIIAYTMSLGAENSVAYSNNSIAIPTNFTISVTTEILPVSMTKTSVDCTMYICGDSTECSNLLLQYGSFCTQLNRALTGIAVEQDKNTQEVFAQVKQIYKTPPIKDFGGFNFSQILPDPSKPSKRSFIEDLLFNKVTLADAGFIKQYGDCLGDIAARDLICAQKFNGLTVLPPLLTDEMIAQYTSALLAGTITSGWTFCAGAALQIPFAMQMAYRFNGIGVTQNVLYENQKLIANQFNSAIGKIQDSLSSTASALGKLQDVVNQNAQALNTLVKQLSSNFGAISSVLNDILSRLDKVEAEVQIDRLITGRLQSLQTYVTQQLIRAAEIRASANLAATKMSECVCGQSKRVDFCGKGYHLMSFPQSAPHGVVFLHVTYVPAQEKNFTTAPAICHDGKAHFPREGVFVSNGTHWFVTQRNFYEPQIITTDNTFVSGNCDVVIGIVNNTVYDPLQPELDSGGGGSDIDPYKEFGSSYQLLNFLPLDFFPDLNALVDTATALYEEELTGREHCSPHHTAIRQALVCWDELTKLIAWMSSNITSEQVRTIIVNHVNDTWGLKVRQSLWFHLSCLTFGQHTVQEFLVSFGVWIRTPAPYRPPNAPILSTLPEHTVIC

SEQ ID NO: 11251 - protein, 1301 aa, Artificial Sequence
  SARS-CoV-2/Iceland/319/2020__EPI_ISL_417648 spike protein (1-1147)(G889C_L1034C) WhcAg construct
MFVFLVLLPLVSSQCVNLTTRTQLPPAYTNSFTRGVYYPDKVFRSSVLHSTQDLFLPFFSNVTWFHAIHVSGTNGTKRFDNPVLPFNDGVYFASTEKSNIIRGWIFGTTLDSKTQSLLIVNNATNVVIKVCEFQFCNDPFLGVYYHKNNKSWMESEFRVYSSANNCTFEYVSQPFLIDLEGKQGNFKNLREFVFKNIDGYFKIYSKHTPINLVRDLPQGFSALEPLVDLPIGINITRFQTLLALHRSYLTPGDSSSGWTAGAAAYYVGYLQPRTFLLKYNENGTITDAVDCALDPLSETKCTLKSFTVEKGIYQTSNFRVQPTESIVRFPNITNLCPFGEVFNATRFASVYAWNRKRISNCVADYSVLYNSASFSTFKCYGVSPTKLNDLCFTNVYADSFVIRGDEVRQIAPGQTGKIADYNYKLPDDFTGCVIAWNSNNLDSKVGGNYNYLYRLFRKSNLKPFERDISTEIYQAGSTPCNGVEGFNCYFPLQSYGFQPTNGVGYQPYRVVVLSFELLHAPATVCGPKKSTNLVKNKCVNFNFNGLTGTGVLTESNKKFLPFQQFGRDIADTTDAVRDPQTLEILDITPCSFGGVSVITPGTNTSNQVAVLYQGVNCTEVPVAIHADQLTPTWRVYSTGSNVFQTRAGCLIGAEHVNNSYECDIPIGAGICASYQTQTNSPRRARSVASQSIIAYTMSLGAENSVAYSNNSIAIPTNFTISVTTEILPVSMTKTSVDCTMYICGDSTECSNLLLQYGSFCTQLNRALTGIAVEQDKNTQEVFAQVKQIYKTPPIKDFGGFNFSQILPDPSKPSKRSFIEDLLFNKVTLADAGFIKQYGDCLGDIAARDLICAQKFNGLTVLPPLLTDEMIAQYTSALLAGTITSGWTFCAGAALQIPFAMQMAYRFNGIGVTQNVLYENQKLIANQFNSAIGKIQDSLSSTASALGKLQDVVNQNAQALNTLVKQLSSNFGAISSVLNDILSRLDKVEAEVQIDRLITGRLQSLQTYVTQQLIRAAEIRASANLAATKMSECVCGQSKRVDFCGKGYHLMSFPQSAPHGVVFLHVTYVPAQEKNFTTAPAICHDGKAHFPREGVFVSNGTHWFVTQRNFYEPQIITTDNTFVSGNCDVVIGIVNNTVYDPLQPELDSGGGGSDIDPYKEFGSSYQLLNFLPLDFFPDLNALVDTATALYEEELTGREHCSPHHTAIRQALVCWDELTKLIAWMSSNITSEQVRTIIVNHVNDTWGLKVRQSLWFHLSCLTFGQHTVQEFLVSFGVWIRTPAPYRPPNAPILSTLPEHTVIC

SEQ ID NO: 11252 - protein, 1301 aa, Artificial Sequence
  SARS-CoV-2/Congo/94/2020__EPI_ISL_417947 spike protein (1-1147)(G889C_L1034C) WhcAg construct
MFVFLVLLPLVSSQCVNLTTRTQLPPAYTNSFTRGVYYPDKVFRSSVLHSTQDLFLPFFSNVTWFHAIHVSGTNGTKRFDNPVLPFNDGVYFASTEKSNIIRGWIFGTTLDSKTQSLLIVNNATNVVIKVCEFQFCNDPFLGVYYHKNNKSWMESEFRVYSSANNCTFEYVSQPFLMDLEGKQGNFKNLREFVFKNIDGYFKIYSKHTPINLVRDLPQGFSALEPLVDLPIGINITRFQTLLALHRSYLTPGDSSSGWTAGAAAYYVGYLQPRTFLLKYNENGTITDAVDCALDPLSETKCTLKSFTVEKGIYQTSNFRVQPTESIVRFPNITNLCPFGEVFNATRFASVYAWNRKRISNCVADYSVLYNSASFSTFKCYGVSPTKLNDLCFTNVYADSFVIRGDEVRQIAPGQTGKIADYNYKLPDDFTGCVIAWNSNNLDSKVGGNYNYLYRLFRKSNLKPFERDISTEIYQAGSTPCNGVEGFNCYFPLQSYGFQPTNGVGYQPYRVVVLSFELLHAPATVCGPKKSTNLVKNKCVNFNFNGLTGTGVLTESNKKFLPFQQFGRDIADTTDAVRDPQTLEILDITPCSFGGVSVITPGTNTSNQVAVLYQGVNCTEVPVAIHADQLTPTWRVYSTGSNVFQTRAGCLIGAEHVNNSYECDIPIGAGICASYQTQTNSPRRARSVASQSIIAYTMSLGAENSVAYSNNSIAIPTNFTISVTTEILPVSMTKTSVDCTMYICGDSTECSNLLLQYGSFCTQLNRALTGIAVEQDKNTQEVFAQVKQIYKTPPIKDFGGFNFSQILPDPSKPSKRSFIEDILFNKVTLADAGFIKQYGDCLGDIAARDLICAQKFNGLTVLPPLLTDEMIAQYTSALLAGTITSGWTFCAGAALQIPFAMQMAYRFNGIGVTQNVLYENQKLIANQFNSAIGKIQDSLSSTASALGKLQDVVNQNAQALNTLVKQLSSNFGAISSVLNDILSRLDKVEAEVQIDRLITGRLQSLQTYVTQQLIRAAEIRASANLAATKMSECVCGQSKRVDFCGKGYHLMSFPQSAPHGVVFLHVTYVPAQEKNFTTAPAICHDGKAHFPREGVFVSNGTHWFVTQRNFYEPQIITTDNTFVSGNCDVVIGIVNNTVYDPLQPELDSGGGGSDIDPYKEFGSSYQLLNFLPLDFFPDLNALVDTATALYEEELTGREHCSPHHTAIRQALVCWDELTKLIAWMSSNITSEQVRTIIVNHVNDTWGLKVRQSLWFHLSCLTFGQHTVQEFLVSFGVWIRTPAPYRPPNAPILSTLPEHTVIC

SEQ ID NO: 11253 - protein, 1301 aa, Artificial Sequence
  SARS-CoV-2/Congo/158/2020__EPI_ISL_417950 spike protein (1-1147)(G889C_L1034C) WhcAg construct
MFVFLVLLPLVSSQCVNLTTRTQLPPAYTNSFTRGVYYPDKVFRSSVLHSTQDLFLPFFSNVTWFHAIHVSGTNGTKRFDNPVLPFNDGVYFASTEKSNIIRGWIFGTTLDSKTQSLLIVNNATNVVIKVCEFQFCNDPFLGVYYHKNNKSWMESEFRVYSSANNCTFEYVSQPFLMDLEGKQGNFKNLREFVFKNIDGYFKIYSKHTPINLVRDLPQGFSALEPLVDLPIGINITRFQTLLALHRSYLTPGDSSSGWTAGAAAYYVGYLQPRTFLLKYNENGTITDAVDCALDPLSETKCTLKSFTVEKGIYQTSNFRVQPTESIVRFPNITNLCPFGEVFNATRFASVYAWNRKRISNCVADYSVLYNSASFSTFKCYGVSPTKLNDLCFTNVYADSFVIRGDEVRQIAPGQTGKIADYNYKLPDDFTGCVIAWNSNNLDSKVGGNYNYLYRLFRKSNLKPFERDISTEIYQAGSTPCNGVEGFNCYFPLQSYGFQPTNGVGYQPYRVVVLSFELLHAPATVCGPKKSTNLVKNKCVNFNFNGLTGTGVLTESNKKFLPFQQFGRDIADTTDAVRDPQTLEILDITPCSFGGVSVITPGTNTSNQVAVLYQDVNCTEVPVAIHADQLTPTWRVYSTGSNVFQTRAGCLIGAEHVNNSYECDIPIGAGICASYQTQTNSPRRARSVASQSIIAYTMSLGAENSVAYSNNSIAIPTNFTISVTTEILPVSMTKTSVDCTMYICGDSTECSNLLLQYGSFCTQLNRALTGIAVEQDKNTQEVFAQVKQIYKTPPIKDFGGFNFSQILPDPSKPSKRSFIEDLLFNKVTLADAGFIKQYGDCLGDIAARDLICAQKFNGLTVLPPLLTDEMIAQYTSALLAGTITSGWTFCAGAALQIPFAMQMAYRFNGIGVTQNVLYENQKLIANQFNSAIGKIQDSLSSTASALGKLQDVVNQNAQALNTLVKQLSSNFGAISSVLNDILSRLDKVEAEVQIDRLITGRLQSLQTYVTQQLIRAAEIRASANLAATKMSECVCGQSKRVDFCGKGYHLMSFPQSAPHGVVFLHVTYVPAQEKNFTTAPAICHDGKAHFPREGVFVSNGTHWFVTQRNFYEPQIITTDNTFLSGNCDVVIGIVNNTVYDPLQPELDSGGGGSDIDPYKEFGSSYQLLNFLPLDFFPDLNALVDTATALYEEELTGREHCSPHHTAIRQALVCWDELTKLIAWMSSNITSEQVRTIIVNHVNDTWGLKVRQSLWFHLSCLTFGQHTVQEFLVSFGVWIRTPAPYRPPNAPILSTLPEHTVIC

SEQ ID NO: 11254 - protein, 1301 aa, Artificial Sequence
  SARS-CoV-2/USA/UT-00034/2020__EPI_ISL_417977 spike protein (1-1147)(G889C_L1034C) WhcAg construct
MFVFLVLLPLVSSQCVNLTTRTQLPPAYTNSFTRGVYYPDKVFRSSVLHSTQDLFLPFFSNVTWFHAIHVSGTNGTKRFDNPVLPFNDGVYFASTEKSNIIRGWIFGTTLDSKTQSLLIVNNATNVVIKVCEFQFCNDPFLGVYYYKNNKSWMESEFRVYSSANNCTFEYVSQPFLMDLEGKQGNFKNLREFVFKNIDGYFKIYSKHTPINLVRDLPQGFSALEPLVDLPIGINITRFQTLLALHRSYLTPGDSSSGWTAGAAAYYVGYLQPRTFLLKYNENGTITDAVDCALDPLSETKCTLKSFTVEKGIYQTSNFRVQPTESIVRFPNITNLCPFGEVFNATRFASVYAWNRKRISNCVADYSVLYNSASFSTFKCYGVSPTKLNDLCFTNVYADSFVIRGDEVRQIAPGQTGKIADYNYKLPDDFTGCVIAWNSNNLDSKVGGNYNYLYRLFRKSNLKPFERDISTEIYQAGSTPCNGVEGFNCYFPLQSYGFQPTNGVGYQPYRVVVLSFELLHAPATVCGPKKSTNLVKNKCVNFNFNGLTGTGVLTESNKKFLPFQQFGRDIADTTDAVRDPQTLEILDITPCSFGGVSVITPGTNTSNQVAVLYQGVNCTEVPVAIHADQLTPTWRVYSTGSNVFQTRAGCLIGAEHVNNSYECDIPIGAGICASYQTQTNSPRRARSVASQSIIAYTMSLGAENSVAYSNNSIAIPTNFTISVTTEILPVSMTKTSVDCTMYICGDSTECSNLLLQYGSFCTQLNRALTGIAVEQDKNTQEVFAQVKQIYKTPPIKDFGGFNFSQILPDPSKPSKRSFIEDLLFNKVTLADAGFIKQYGDCLGDIAARDLICAQKFNGLTVLPPLLTDEMIAQYTSALLAGTITSGWTFCAGAALQIPFAMQMAYRFNGIGVTQNVLYENQKLIANQFNSAIGKIQDSLSSTASALGKLQDVVNQNAQALNTLVKQLSSNFGAISSVLNDILSRLDKVEAEVQIDRLITGRLQSLQTYVTQQLIRAAEIRASANLAATKMSECVCGQSKRVDFCGKGYHLMSFPQSAPHGVVFLHVTYVPAQEKNFTTAPAICHDGKAHFPREGVFVSNGTHWFVTQRNFYEPQIITTDNTFVSGNCDVVIGIVNNTVYDPLQPELDSGGGGSDIDPYKEFGSSYQLLNFLPLDFFPDLNALVDTATALYEEELTGREHCSPHHTAIRQALVCWDELTKLIAWMSSNITSEQVRTIIVNHVNDTWGLKVRQSLWFHLSCLTFGQHTVQEFLVSFGVWIRTPAPYRPPNAPILSTLPEHTVIC

SEQ ID NO: 11255 - protein, 1301 aa, Artificial Sequence
  SARS-CoV-2/USA/UT-00033/2020__EPI_ISL_417976 spike protein (1-1147)(G889C_L1034C) WhcAg construct
MFVFLVLLPLVSSQCVNLTTRTQLPPAYTNSFTRGVYYPDKVFRSSVLHSTQDLFLPFFSNVTWFHAIHVSGTNGTKRFDNPVLPFNDGVYFASTEKSNIIRGWIFGTTLDSKTQSLLIVNNATNVVIKVCEFQFCNDPFLGVYYHKNNKSWMESEFRVYSSANNCTFEYVSQPFLMDLEGKQGNFKNLREFVFKNIDGYFKIYSKHTPINLVRDLPQGFSALEPLVDLPIGINITRFQTLLALHRSYLTPGDSSSGLTAGAAAYYVGYLQPRTFLLKYNENGTITDAVDCALDPLSETKCTLKSFTVEKGIYQTSNFRVQPTESIVRFPNITNLCPFGEVFNATRFASVYAWNRKRISNCVADYSVLYNSASFSTFKCYGVSPTKLNDLCFTNVYADSFVIRGDEVRQIAPGQTGKIADYNYKLPDDFTGCVIAWNSNNLDSKVGGNYNYLYRLFRKSNLKPFERDISTEIYQAGSTPCNGVEGFNCYFPLQSYGFQPTNGVGYQPYRVVVLSFELLHAPATVCGPKKSTNLVKNKCVNFNFNGLTGTGVLTESNKKFLPFQQFGRDIADTTDAVRDPQTLEILDITPCSFGGVSVITPGTNTSNQVAVLYQGVNCTEVPVAIHADQLTPTWRVYSTGSNVFQTRAGCLIGAEHVNNSYECDIPIGAGICASYQTQTNSPRRARSVASQSIIAYTMSLGAENSVAYSNNSIAIPTNFTISVTTEILPVSMTKTSVDCTMYICGDSTECSNLLLQYGSFCTQLNRALTGIAVEQDKNTQEVFAQVKQIYKTPPIKDFGGFNFSQILPDPSKPSKRSFIEDLLFNKVTLADAGFIKQYGDCLGDIAARDLICAQKFNGLTVLPPLLTDEMIAQYTSALLAGTITSGWTFCAGAALQIPFAMQMAYRFNGIGVTQNVLYENQKLIANQFNSAIGKIQDSLSSTASALGKLQDVVNQNAQALNTLVKQLSSNFGAISSVLNDILSRLDKVEAEVQIDRLITGRLQSLQTYVTQQLIRAAEIRASANLAATKMSECVCGQSKRVDFCGKGYHLMSFPQSAPHGVVFLHVTYVPAQEKNFTTAPAICHDGKAHFPREGVFVSNGTHWFVTQRNFYEPQIITTDNTFVSGNCDVVIGIVNNTVYDPLQPELDSGGGGSDIDPYKEFGSSYQLLNFLPLDFFPDLNALVDTATALYEEELTGREHCSPHHTAIRQALVCWDELTKLIAWMSSNITSEQVRTIIVNHVNDTWGLKVRQSLWFHLSCLTFGQHTVQEFLVSFGVWIRTPAPYRPPNAPILSTLPEHTVIC

SEQ ID NO: 11256 - protein, 1301 aa, Artificial Sequence
  SARS-CoV-2/USA/WI-13/2020__EPI_ISL_417516 spike protein (1-1147)(G889C_L1034C) WhcAg construct
MFVFLVLLPLVSSQCVNLTTRTQLPPAYTNSFTRGVYYPDKVFRSSVLHSTQDLFLPFFSNVTWFHAIHVSGTNGTKRFDNPVLPFNDGVYFASTEKSNIIRGWIFGTTLDSKTQSLLIVNNATNVVIKVCEFQFCNDPFLGVYYHKNNKSWMESEFRVYSSANNCTFEYVSQPFLMDLEGKQGNFKNLREFVFKNIDGYFKIYSKHTPINLVRDLPQGFSALEPLVDLPIGINITRFQTLLALHRSYLTPGDSSSGWTAGAAAYYVGYLQPRTFLLKYNENGTITDAVDCALDPLSETKCTLKSFTVEKGIYQTSNFRVLPTESIVRFPNITNLCPFGEVFNATRFASVYAWNRKRISNCVADYSVLYNSASFSTFKCYGVSPTKLNDLCFTNVYADSFVIRGDEVRQIAPGQTGKIADYNYKLPDDFTGCVIAWNSNNLDSKVGGNYNYLYRLFRKSNLKPFERDISTEIYQAGSTPCNGVEGFNCYFPLQSYGFQPTNGVGYQPYRVVVLSFELLHAPATVCGPKKSTNLVKNKCVNFNFNGLTGTGVLTESNKKFLPFQQFGRDIADTTDAVRDPQTLEILDITPCSFGGVSVITPGTNTSNQVAVLYQGVNCTEVPVAIHADQLTPTWRVYSTGSNVFQTRAGCLIGAEHVNNSYECDIPIGAGICASYQTQTNSPRRARSVASQSIIAYTMSLGAENSVAYSNNSIAIPTNFTISVTTEILPVSMTKTSVDCTMYICGDSTECSNLLLQYGSFCTQLNRALTGIAVEQDKNTQEVFAQVKQIYKTPPIKDFGGFNFSQILPDPSKPSKRSFIEDLLFNKVTLADAGFIKQYGDCLGDIAARDLICAQKFNGLTVLPPLLTDEMIAQYTSALLAGTITSGWTFCAGAALQIPFAMQMAYRFNGIGVTQNVLYENQKLIANQFNSAIGKIQDSLSSTASALGKLQDVVNQNAQALNTLVKQLSSNFGAISSVLNDILSRLDKVEAEVQIDRLITGRLQSLQTYVTQQLIRAAEIRASANLAATKMSECVCGQSKRVDFCGKGYHLMSFPQSAPHGVVFLHVTYVPAQEKNFTTAPAICHDGKAHFPREGVFVSNGTHWFVTQRNFYEPQIITTDNTFVSGNCDVVIGIVNNTVYDPLQPELDSGGGGSDIDPYKEFGSSYQLLNFLPLDFFPDLNALVDTATALYEEELTGREHCSPHHTAIRQALVCWDELTKLIAWMSSNITSEQVRTIIVNHVNDTWGLKVRQSLWFHLSCLTFGQHTVQEFLVSFGVWIRTPAPYRPPNAPILSTLPEHTVIC

SEQ ID NO: 11257 - protein, 1300 aa, Artificial Sequence
  SARS-CoV-2/India/1-27/2020__EPI_ISL_413522 spike protein (1-1146)(G888C_L1033C) WhcAg construct
MFVFLVLLPLVSSQCVNLTTRTQLPPAYTNSFTRGVYYPDKVFRSSVLHSTQDLFLPFFSNVTWFHAIHVSGTNGTKRFDNPVLPFNDGVYFASTEKSNIIRGWIFGTTLDSKTQSLLIVNNATNVVIKVCEFQFCNDPFLGVYHKNNKSWMESEFRVYSSANNCTFEYVSQPFLMDLEGKQGNFKNLREFVFKNIDGYFKIYSKHTPINLVRDLPQGFSALEPLVDLPIGINITRFQTLLALHRSYLTPGDSSSGWTAGAAAYYVGYLQPRTFLLKYNENGTITDAVDCALDPLSETKCTLKSFTVEKGIYQTSNFRVQPTESIVRFPNITNLCPFGEVFNATRFASVYAWNRKRISNCVADYSVLYNSASFSTFKCYGVSPTKLNDLCFTNVYADSFVIRGDEVIQIAPGQTGKIADYNYKLPDDFTGCVIAWNSNNLDSKVGGNYNYLYRLFRKSNLKPFERDISTEIYQAGSTPCNGVEGFNCYFPLQSYGFQPTNGVGYQPYRVVVLSFELLHAPATVCGPKKSTNLVKNKCVNFNFNGLTGTGVLTESNKKFLPFQQFGRDIADTTDAVRDPQTLEILDITPCSFGGVSVITPGTNTSNQVAVLYQDVNCTEVPVAIHADQLTPTWRVYSTGSNVFQTRAGCLIGAEHVNNSYECDIPIGAGICASYQTQTNSPRRARSVASQSIIAYTMSLGAENSVAYSNNSIAIPTNFTISVTTEILPVSMTKTSVDCTMYICGDSTECSNLLLQYGSFCTQLNRALTGIAVEQDKNTQEVFAQVKQIYKTPPIKDFGGFNFSQILPDPSKPSKRSFIEDLLFNKVTLADAGFIKQYGDCLGDIAARDLICAQKFNGLTVLPPLLTDEMIAQYTSALLAGTITSGWTFCAGAALQIPFAMQMAYRFNGIGVTQNVLYENQKLIANQFNSAIGKIQDSLSSTASALGKLQDVVNQNAQALNTLVKQLSSNFGAISSVLNDILSRLDKVEAEVQIDRLITGRLQSLQTYVTQQLIRAAEIRASANLAATKMSECVCGQSKRVDFCGKGYHLMSFPQSAPHGVVFLHVTYVPAQEKNFTTAPAICHDGKAHFPREGVFVSNGTHWFVTQRNFYEPQIITTDNTFVSGNCDVVIGIVNNTVYDPLQPELDSGGGGSDIDPYKEFGSSYQLLNFLPLDFFPDLNALVDTATALYEEELTGREHCSPHHTAIRQALVCWDELTKLIAWMSSNITSEQVRTIIVNHVNDTWGLKVRQSLWFHLSCLTFGQHTVQEFLVSFGVWIRTPAPYRPPNAPILSTLPEHTVIC

SEQ ID NO: 11258 - protein, 1295 aa, Artificial Sequence
  SARS-CoV-2/pangolin/Guangxi/P4L/2017__EPI_ISL_410538 spike protein (1-1141)(G883C_L1028C) WhcAg construct
MFVFLFVLPLVSSQCVNLTTRTGIPPGYTNSSTRGVYYPDKVFRSSILHLTQDLFLPFFSNVTWFNTINYQGGFKKFDNPVLPFNDGVYFASTEKSNIIRGWIFGTTLDARTQSLLIVNNATNVVIKVCEFQFCTDPFLGVYYHNNNKTWVENEFRVYSSANNCTFEYISQPFLMDLEGKQGNFKNLREFVFKNVDGYFKIYSKHTPIDLVRDLPRGFAALEPLVDLPIGINITRFQTLLALHRSYLTPGNLESGWTTGAAAYYVGYLQQRTFLLSYNQNGTITDAVDCSLDPLSETKCTLKSLTVEKGIYQTSNFRVQPTISIVRFPNITNLCPFGEVFNASKFASVYAWNRKRISNCVADYSVLYNSTSFSTFKCYGVSPTKLNDLCFTNVYADSFVVKGDEVRQIAPGQTGVIADYNYKLPDDFTGCVIAWNSVKQDALTGGNYGYLYRLFRKSKLKPFERDISTEIYQAGSTPCNGQVGLNCYYPLERYGFHPTTGVNYQPFRVVVLSFELLNGPATVCGPKLSTTLVKDKCVNFNFNGLTGTGVLTTSKKQFLPFQQFGRDISDTTDAVRDPQTLEILDITPCSFGGVSVITPGTNTSNQVAVLYQDVNCTEVPMAIHAEQLTPAWRVYSAGANVFQTRAGCLVGAEHVNNSYECDIPVGAGICASYHSMSSLRSVNQRSIIAYTMSLGAENSVAYSNNSIAIPTNFTISVTTEILPVSMTKTSVDCTMYICGDSIECSNLLLQYGSFCTQLNRALTGIAVEQDKNTQEVFAQVKQIYKTPPIKDFGGFNFSQILPDPSKPSKRSFIEDLLFNKVTLADAGFIKQYGDCLGDIAARDLICAQKFNGLTVLPPLLTDEMIAQYTSALLAGTITSGWTFCAGAALQIPFAMQMAYRFNGIGVTQNVLYENQKLIANQFNSAIGKIQDSLSSTASALGKLQDVVNQNAQALNTLVKQLSSNFGAISSVLNDILSRLDKVEAEVQIDRLITGRLQSLQTYVTQQLIRAAEIRASANLAATKMSECVCGQSKRVDFCGKGYHLMSFPQSAPHGVVFLHVTYVPAQEKNFTTAPAICHEGKAHFPREGVFVSNGTHWFITQRNFYEPQIITTDNTFVSGSCDVVIGIVNNTVYDPLQPELDSGGGGSDIDPYKEFGSSYQLLNFLPLDFFPDLNALVDTATALYEEELTGREHCSPHHTAIRQALVCWDELTKLIAWMSSNITSEQVRTIIVNHVNDTWGLKVRQSLWFHLSCLTFGQHTVQEFLVSFGVWIRTPAPYRPPNAPILSTLPEHTVIC

SEQ ID NO: 11259 - protein, 1295 aa, Artificial Sequence
  SARS-CoV-2/pangolin/Guangxi/P5L/2017__EPI_ISL_410540 spike protein (1-1141)(G883C_L1028C) WhcAg construct
MFVFLFVLPLVSSQCVNLTTRTGIPPGYTNSSTRGVYYPDKVFRSSILHLTQDLFLPFFSNVTWFNTINYQGGFKKFDNPVLPFNDGVYFASTEKSNIIRGWIFGTTLDARTQSLLIVNNATNVVIKVCEFQFCTDPFLGVYYHNNNKTWVENEFRVYSSANNCTFEYISQPFLMDLEGKQGNFKNLREFVFKNVDGYFKIYSKHTPIDLVRDLPRGFAALEPLVDLPIGINITRFQTLLALHRSYLTPGKLESGWTTGAAAYYVGYLQQRTFLLSYNQNGTITDAVDCSLDPLSETKCTLKSLTVEKGIYQTSNFRVQPTISIVRFPNITNLCPFGEVFNASKFASVYAWNRKRISNCVADYSVLYNSTSFSTFKCYGVSPTKLNDLCFTNVYADSFVVKGDEVRQIAPGQTGVIADYNYKLPDDFTGCVIAWNSVKQDALTGGNYGYLYRLFRKSKLKPFERDISTEIYQAGSTPCNGQVGLNCYYPLERYGFHPTTGVNYQPFRVVVLSFELLNGPATVCGPKLSTTLVKDKCVNFNFNGLTGTGVLTTSKKQFLPFQQFGRDISDTTDAVRDPQTLEILDITPCSFGGVSVITPGTNTSNQVAVLYQDVNCTEVPMAIHAEQLTPAWRVYSAGANVFQTRAGCLVGAEHVNNSYECDIPVGAGICASYHSMSSFRSVNQRSIIAYTMSLGAENSVAYSNNSIAIPTNFTISVTTEILPVSMTKTSVDCTMYICGDSIECSNLLLQYGSFCTQLNRALTGIAVEQDKNTQEVFAQVKQIYKTPPIKDFGGFNFSQILPDPSKPSKRSFIEDLLFNKVTLADAGFIKQYGDCLGDIAARDLICAQKFNGLTVLPPLLTDEMIAQYTSALLAGTITSGWTFCAGAALQIPFAMQMAYRFNGIGVTQNVLYENQKLIANQFNSAIGKIQDSLSSTASALGKLQDVVNQNAQALNTLVKQLSSNFGAISSVLNDILSRLDKVEAEVQIDRLITGRLQSLQTYVTQQLIRAAEIRASANLAATKMSECVCGQSKRVDFCGKGYHLMSFPQSAPHGVVFLHVTYVPAQEKNFTTAPAICHEGKAHFPREGVFVSNGTHWFITQRNFYEPQIITTDNTFVSGSCDVVIGIVNNTVYDPLQPELDSGGGGSDIDPYKEFGSSYQLLNFLPLDFFPDLNALVDTATALYEEELTGREHCSPHHTAIRQALVCWDELTKLIAWMSSNITSEQVRTIIVNHVNDTWGLKVRQSLWFHLSCLTFGQHTVQEFLVSFGVWIRTPAPYRPPNAPILSTLPEHTVIC

SEQ ID NO: 11260 - protein, 1295 aa, Artificial Sequence
  SARS-CoV-2/pangolin/Guangxi/P5E/2017__EPI_ISL_410541 spike protein (1-1141)(G883C_L1028C) WhcAg construct
MFVFLFVLPLVSSQCVNLTTRTGIPPGYTNSSTRGVYYPDKVFRSSILHLTQDLFLPFFSNVTWFNTITYQGGSKKFDNPVLPFNDGVYFASTEKSNIIRGWIFGTTLDARTQSLLIVNNATNVVIKVCEFQFCTDPFLGVYYHNNNKTWVENEFRVYSSANNCTFEYISQPFLMDLEGKQGNFKNLREFVFKNVDGYFKIYSKHTPIDLVRDLPRGFAALEPLVDLPIGINITRFQTLLALHRSYLTPGKLESGWTTGAAAYYVGYLQQRTFLLSYNQNGTITDAVDCSLDPLSETKCTLKSLTVEKGIYQTSNFRVQPTISIVRFPNITNLCPFGEVFNASKFASVYAWNRKRISNCVADYSVLYNSTSFSTFKCYGVSPTKLNDLCFTNVYADSFVVKGDEVRQIAPGQTGVIADYNYKLPDDFTGCVIAWNSVKQDALTGDNYGYLYRLFRKSKLKPFERDISTEIYQAGSTPCNGQVGLNCYYPLERYGFHPTTGVNYQPFRVVVLSFELLNGPATVCGPKLSTTLVKDKCVNFNFNGLTGTGVLTTSKKQFLPFQQFGRDISDTTDAVRDPQTLEILDITPCSFGGVSVITPGTNTSNQVAVLYQDVNCTEVPMAIHAEQLTPAWRVYSAGANVFQTRAGCLVGAEHVNNSYECDIPVGAGICASYHSMSSFRSVNQRSIIAYTMSLGAENSVAYSNNSIAIPTNFTISVTTEILPVSMTKTSVDCTMYICGDSIECSNLLLQYGSFCTQLNRALTGIAVEQDKNTQEVFAQVKQIYKTPPIKDFGGFNFSQILPDPSKPSKRSFIEDLLFNKVTLADAGFIKQYGDCLGDIAARDLICAQKFNGLTVLPPLLTDEMIAQYTSALLAGTITSGWTFCAGAALQIPFAMQMAYRFNGIGVTQNVLYENQKLIANQFNSAIGKIQDSLSSTASALGKLQDVVNQNAQALNTLVKQLSSNFGAISSVLNDILSRLDKVEAEVQIDRLITGRLQSLQTYVTQQLIRAAEIRASANLAATKMSECVCGQSKRVDFCGKGYHLMSFPQSAPHGVVFLHVTYVPAQEKNFTTAPAICHEGKAHFPREGVFVSNGTHWFITQRNFYEPQIITTDNTFVSGSCDVVIGIVNNTVYDPLQPELDSGGGGSDIDPYKEFGSSYQLLNFLPLDFFPDLNALVDTATALYEEELTGREHCSPHHTAIRQALVCWDELTKLIAWMSSNITSEQVRTIIVNHVNDTWGLKVRQSLWFHLSCLTFGQHTVQEFLVSFGVWIRTPAPYRPPNAPILSTLPEHTVIC

SEQ ID NO: 11261 - protein, 1293 aa, Artificial Sequence
  SARS-CoV-2/pangolin/Guangxi/P1E/2017__EPI_ISL_410539 spike protein (1-1139)(G881C_L1026C) WhcAg construct
MFVFLFVLPLVSSQCVNLTTRTGIQPGYTNSSTRGVYYPDKVFRSSILHLTQDLFLPFFSNVTWFNTINYQGGFKKFDNPVLPFNDGVYFASTEKSNIIRGWIFGTTLDARTQSLLIVNNATNVVIKVCEFQFCTDPFLGVYYHNNNKTWVENEFRVYSSANNCTFEYISQPFLMDLEGKQGNFKNLREFVFKNVDGYFKIYSKHTPIDLVRDLPRGFAALEPLVDLPIGINITRFQTLLALHRSYLTPGKLESGWTTGAAAYYVGYLQQRTFLLSYNQNGTITDAVDCSLDPLSETKCTLKSLTVEKGIYQTSNFRVQPTISIVRFPNITNLCPFGEVFNASKFASVYAWNRKRISNCVADYSVLYNSTSFSTFKCYGVSPTKLNDLCFTNVYADSFVVKGDEVRQIAPGQTGVIADYNYKLPDDFTGCVIAWNSVKQDALTGGNYLYRLFRKSKLKPFERDISTEIYQAGSTPCNGQVGLNCYYPLERYGFHPTTGVNYQPFRVVVLSFELLNGPATVCGPKLSTTLVKDKCVNFNFNGLTGTGVLTTSKKQFLPFQQFGRDISDTTDAVRDPQTLEILDITPCSFGGVSVITPGTNTSNQVAVLYQDVNCTEVPMAIHAEQLTPAWRVYSAGANVFQTRAGCLVGAEHVNNSYECDIPVGAGICASYHSMSSLRSVNQRSIIAYTMSLGAENSVAYSNNSIAIPTNFTISVTTEILPVSMTKTSVDCTMYICGDSIECSNLLLQYGSFCTQLNRALTGIAVEQDKNTQEVFAQVKQIYKTPPIKDFGGFNFSQILPDPSKPSKRSFIEDLLFNKVTLADAGFIKQYGDCLGDIAARDLICAQKFNGLTVLPPLLTDEMIAQYTSALLAGTITSGWTFCAGAALQIPFAMQMAYRFNGIGVTQNVLYENQKLIANQFNSAIGKIQDSLSSTASALGKLQDVVNQNAQALNTLVKQLSSNFGAISSVLNDILSRLDKVEAEVQIDRLITGRLQSLQTYVTQQLIRAAEIRASANLAATKMSECVCGQSKRVDFCGKGYHLMSFPQSAPHGVVFLHVTYVPAQEKNFTTAPAICHEGKAHFPREGVFVSNGTHWFITQRNFYEPQIITTDNTFVSGSCDVVIGIVNNTVYDPLQPELDSGGGGSDIDPYKEFGSSYQLLNFLPLDFFPDLNALVDTATALYEEELTGREHCSPHHTAIRQALVCWDELTKLIAWMSSNITSEQVRTIIVNHVNDTWGLKVRQSLWFHLSCLTFGQHTVQEFLVSFGVWIRTPAPYRPPNAPILSTLPEHTVIC

SEQ ID NO: 11262 - protein, 1301 aa, Artificial Sequence
  SARS-CoV-2/Wuhan/WIV05/2019__EPI_ISL_402128 spike protein (1-1147)(I909C_Y1047C) WhcAg construct
MFVFLVLLPLVSSQCVNLTTRTQLPPAYTNSFTRGVYYPDKVFRSSVLHSTQDLFLPFFSNVTWFHAIHVSGTNGTKRFDNPVLPFNDGVYFASTEKSNIIRGWIFGTTLDSKTQSLLIVNNATNVVIKVCEFQFCNDPFLGVYYHKNNKSWMESEFRVYSSANNCTFEYVSQPFLMDLEGKQGNFKNLREFVFKNIDGYFKIYSKHTPINLVRDLPQGFSALEPLVDLPIGINITRFQTLLALHRSYLTPGDSSSGWTAGAAAYYVGYLQPRTFLLKYNENGTITDAVDCALDPLSETKCTLKSFTVEKGIYQTSNFRVQPTESIVRFPNITNLCPFGEVFNATRFASVYAWNRKRISNCVADYSVLYNSASFSTFKCYGVSPTKLNDLCFTNVYADSFVIRGDEVRQIAPGQTGKIADYNYKLPDDFTGCVIAWNSNNLDSKVGGNYNYLYRLFRKSNLKPFERDISTEIYQAGSTPCNGVEGFNCYFPLQSYGFQPTNGVGYQPYRVVVLSFELLHAPATVCGPKKSTNLVKNKCVNFNFNGLTGTGVLTESNKKFLPFQQFGRDIADTTDAVRDPQTLEILDITPCSFGGVSVITPGTNTSNQVAVLYQDVNCTEVPVAIHADQLTPTWRVYSTGSNVFQTRAGCLIGAEHVNNSYECDIPIGAGICASYQTQTNSPRRARSVASQSIIAYTMSLGAENSVAYSNNSIAIPTNFTISVTTEILPVSMTKTSVDCTMYICGDSTECSNLLLQYGSFCTQLNRALTGIAVEQDKNTQEVFAQVKQIYKTPPIKDFGGFNFSQILPDPSKPSKRSFIEDLLFNKVTLADAGFIKQYGDCLGDIAARDLICAQKFNGLTVLPPLLTDEMIAQYTSALLAGTITSGWTFGAGAALQIPFAMQMAYRFNGCGVTQNVLYENQKLIANQFNSAIGKIQDSLSSTASALGKLQDVVNQNAQALNTLVKQLSSNFGAISSVLNDILSRLDKVEAEVQIDRLITGRLQSLQTYVTQQLIRAAEIRASANLAATKMSECVLGQSKRVDFCGKGCHLMSFPQSAPHGVVFLHVTYVPAQEKNFTTAPAICHDGKAHFPREGVFVSNGTHWFVTQRNFYEPQIITTDNTFVSGNCDVVIGIVNNTVYDPLQPELDSGGGGSDIDPYKEFGSSYQLLNFLPLDFFPDLNALVDTATALYEEELTGREHCSPHHTAIRQALVCWDELTKLIAWMSSNITSEQVRTIIVNHVNDTWGLKVRQSLWFHLSCLTFGQHTVQEFLVSFGVWIRTPAPYRPPNAPILSTLPEHTVIC

SEQ ID NO: 11263 - protein, 1297 aa, Artificial Sequence
  SARS-CoV-2/bat/Yunnan/RaTG13/2013__EPI_ISL_402131 spike protein (1-1143)(I905C_Y1043C) WhcAg construct
MFVFLVLLPLVSSQCVNLTTRTQLPPAYTNSSTRGVYYPDKVFRSSVLHLTQDLFLPFFSNVTWFHAIHVSGTNGIKRFDNPVLPFNDGVYFASTEKSNIIRGWIFGTTLDSKTQSLLIVNNATNVVIKVCEFQFCNDPFLGVYYHKNNKSWMESEFRVYSSANNCTFEYVSQPFLMDLEGKQGNFKNLREFVFKNIDGYFKIYSKHTPINLVRDLPPGFSALEPLVDLPIGINITRFQTLLALHRSYLTPGDSSSGWTAGAAAYYVGYLQPRTFLLKYNENGTITDAVDCALDPLSETKCTLKSFTVEKGIYQTSNFRVQPTDSIVRFPNITNLCPFGEVFNATTFASVYAWNRKRISNCVADYSVLYNSTSFSTFKCYGVSPTKLNDLCFTNVYADSFVITGDEVRQIAPGQTGKIADYNYKLPDDFTGCVIAWNSKHIDAKEGGNFNYLYRLFRKANLKPFERDISTEIYQAGSKPCNGQTGLNCYYPLYRYGFYPTDGVGHQPYRVVVLSFELLNAPATVCGPKKSTNLVKNKCVNFNFNGLTGTGVLTESNKKFLPFQQFGRDIADTTDAVRDPQTLEILDITPCSFGGVSVITPGTNASNQVAVLYQDVNCTEVPVAIHADQLTPTWRVYSTGSNVFQTRAGCLIGAEHVNNSYECDIPIGAGICASYQTQTNSRSVASQSIIAYTMSLGAENSVAYSNNSIAIPTNFTISVTTEILPVSMTKTSVDCTMYICGDSTECSNLLLQYGSFCTQLNRALTGIAVEQDKNTQEVFAQVKQIYKTPPIKDFGGFNFSQILPDPSKPSKRSFIEDLLFNKVTLADAGFIKQYGDCLGDIAARDLICAQKFNGLTVLPPLLTDEMIAQYTSALLAGTITSGWTFGAGAALQIPFAMQMAYRFNGCGVTQNVLYENQKLIANQFNSAIGKIQDSLSSTASALGKLQDVVNQNAQALNTLVKQLSSNFGAISSVLNDILSRLDKVEAEVQIDRLITGRLQSLQTYVTQQLIRAAEIRASANLAATKMSECVLGQSKRVDFCGKGCHLMSFPQSAPHGVVFLHVTYVPAQEKNFTTAPAICHDGKAHFPREGVFVSNGTHWFVTQRNFYEPQIITTDNTFVSGSCDVVIGIVNNTVYDPLQPELDSGGGGSDIDPYKEFGSSYQLLNFLPLDFFPDLNALVDTATALYEEELTGREHCSPHHTAIRQALVCWDELTKLIAWMSSNITSEQVRTIIVNHVNDTWGLKVRQSLWFHLSCLTFGQHTVQEFLVSFGVWIRTPAPYRPPNAPILSTLPEHTVIC

SEQ ID NO: 11264 - protein, 1301 aa, Artificial Sequence
  SARS-CoV-2/Wuhan/HBCDC-HB-01/2019__EPI_ISL_402132 spike protein (1-1147)(I909C_Y1047C) WhcAg construct
MFVFLVLLPLVSSQCVNLTTRTQLPPAYTNSITRGVYYPDKVFRSSVLHSTQDLFLPFFSNVTWFHAIHVSGTNGTKRFDNPVLPFNDGVYFASTEKSNIIRGWIFGTTLDSKTQSLLIVNNATNVVIKVCEFQFCNDPFLGVYYHKNNKSWMESEFRVYSSANNCTFEYVSQPFLMDLEGKQGNFKNLREFVFKNIDGYFKIYSKHTPINLVRDLPQGFSALEPLVDLPIGINITRFQTLLALHRSYLTPGDSSSGWTAGAAAYYVGYLQPRTFLLKYNENGTITDAVDCALDPLSETKCTLKSFTVEKGIYQTSNFRVQPTESIVRFPNITNLCPFGEVFNATRFASVYAWNRKRISNCVADYSVLYNSASFSTFKCYGVSPTKLNDLCFTNVYADSFVIRGDEVRQIAPGQTGKIADYNYKLPDDFTGCVIAWNSNNLDSKVGGNYNYLYRLFRKSNLKPFERDISTEIYQAGSTPCNGVEGFNCYFPLQSYGFQPTNGVGYQPYRVVVLSFELLHAPATVCGPKKSTNLVKNKCVNFNFNGLTGTGVLTESNKKFLPFQQFGRDIADTTDAVRDPQTLEILDITPCSFGGVSVITPGTNTSNQVAVLYQDVNCTEVPVAIHADQLTPTWRVYSTGSNVFQTRAGCLIGAEHVNNSYECDIPIGAGICASYQTQTNSPRRARSVASQSIIAYTMSLGAENSVAYSNNSIAIPTNFTISVTTEILPVSMTKTSVDCTMYICGDSTECSNLLLQYGSFCTQLNRALTGIAVEQDKNTQEVFAQVKQIYKTPPIKDFGGFNFSQILPDPSKPSKRSFIEDLLFNKVTLADAGFIKQYGDCLGDIAARDLICAQKFNGLTVLPPLLTDEMIAQYTSALLAGTITSGWTFGAGAALQIPFAMQMAYRFNGCGVTQNVLYENQKLIANQFNSAIGKIQDSLSSTASALGKLQDVVNQNAQALNTLVKQLSSNFGAISSVLNDILSRLDKVEAEVQIDRLITGRLQSLQTYVTQQLIRAAEIRASANLAATKMSECVLGQSKRVDFCGKGCHLMSFPQSAPHGVVFLHVTYVPAQEKNFTTAPAICHDGKAHFPREGVFVSNGTHWFVTQRNFYEPQIITTDNTFVSGNCDVVIGIVNNTVYDPLQPELDSGGGGSDIDPYKEFGSSYQLLNFLPLDFFPDLNALVDTATALYEEELTGREHCSPHHTAIRQALVCWDELTKLIAWMSSNITSEQVRTIIVNHVNDTWGLKVRQSLWFHLSCLTFGQHTVQEFLVSFGVWIRTPAPYRPPNAPILSTLPEHTVIC

SEQ ID NO: 11265 - protein, 1301 aa, Artificial Sequence
  SARS-CoV-2/Guangdong/20SF028/2020__EPI_ISL_403936 spike protein (1-1147)(I909C_Y1047C) WhcAg construct
MFVFLVLLPLVSSQCVNLTTRTQLPPAYTNSFTRGVYYPDKVFRSSVLYSTQDLFLPFFSNVTWFHAIHVSGTNGTKRFDNPVLPFNDGVYFASTEKSNIIRGWIFGTTLDSKTQSLLIVNNATNVVIKVCEFQFCNDPFLGVYYHKNNKSWMESEFRVYSSANNCTFEYVSQPFLMDLEGKQGNFKNLREFVFKNIDGYFKIYSKHTPINLVRDLPQGFSALEPLVDLPIGINITRFQTLLALHRSYLTPGDSSSGWTAGAAAYYVGYLQPRTFLLKYNENGTITDAVDCALDPLSETKCTLKSFTVEKGIYQTSNFRVQPTESIVRFPNITNLCPFGEVFNATRFASVYAWNRKRISNCVADYSVLYNSASFSTFKCYGVSPTKLNDLCFTNVYADSFVIRGDEVRQIAPGQTGKIADYNYKLPDDFTGCVIAWNSNNLDSKVGGNYNYLYRLFRKSNLKPFERDISTEIYQAGSTPCNGVEGFNCYFPLQSYGFQPTNGVGYQPYRVVVLSFELLHAPATVCGPKKSTNLVKNKCVNFNFNGLTGTGVLTESNKKFLPFQQFGRDIADTTDAVRDPQTLEILDITPCSFGGVSVITPGTNTSNQVAVLYQDVNCTEVPVAIHADQLTPTWRVYSTGSNVFQTRAGCLIGAEHVNNSYECDIPIGAGICASYQTQTNSPRRARSVASQSIIAYTMSLGAENSVAYSNNSIAIPTNFTISVTTEILPVSMTKTSVDCTMYICGDSTECSNLLLQYGSFCTQLNRALTGIAVEQDKNTQEVFAQVKQIYKTPPIKDFGGFNFSQILPDPSKPSKRSFIEDLLFNKVTLADAGFIKQYGDCLGDIAARDLICAQKFNGLTVLPPLLTDEMIAQYTSALLAGTITSGWTFGAGAALQIPFAMQMAYRFNGCGVTQNVLYENQKLIANQFNSAIGKIQDSLSSTASALGKLQDVVNQNAQALNTLVKQLSSNFGAISSVLNDILSRLDKVEAEVQIDRLITGRLQSLQTYVTQQLIRAAEIRASANLAATKMSECVLGQSKRVDFCGKGCHLMSFPQSAPHGVVFLHVTYVPAQEKNFTTAPAICHDGKAHFPREGVFVSNGTHWFVTQRNFYEPQIITTDNTFVSGNCDVVIGIVNNTVYDPLQPELDSGGGGSDIDPYKEFGSSYQLLNFLPLDFFPDLNALVDTATALYEEELTGREHCSPHHTAIRQALVCWDELTKLIAWMSSNITSEQVRTIIVNHVNDTWGLKVRQSLWFHLSCLTFGQHTVQEFLVSFGVWIRTPAPYRPPNAPILSTLPEHTVIC

SEQ ID NO: 11266 - protein, 1301 aa, Artificial Sequence
  SARS-CoV-2/Shenzhen/SZTH-001/2020__EPI_ISL_406592 spike protein (1-1147)(I909C_Y1047C) WhcAg construct
MFVFLVLLPLVSSQCVNLTTRTQLPPAYTNSFTRGVYYPDKVFRSSVLHSTQDLFLPFFSNVTWFHAIHVSGTNGTKRFDNPVLPFNDGVYFASTEKSNIIRGWIFGTTLDSKTQSLLIVNNATNVVIKVCEFQFCNDPFLGVYYHKNNKSWMESEFRVYSSANNCTFEYVSQPFLMDLEGKQGNFKNLREFVFKNIDGYFKIYSKHTPINLVRDLPQGFSALEPLVDLPIGINITRFQTLLALHRSYLTPGDSSSGWTAGAAAYYVGYLQPRTFLLKYNENGTITDAVDCALDPLSETKCTLKSFTVEKGIYQTSNFRVQPTESIVRFPNITNLCPFGEVFNATRFASVYAWNRKRISNCVADYSVLYNSASFSTFKCYGVSPTKLNDLCFTNVYADSFVIRGDEVRQIAPGQTGKIADYNYKLPDDFTGCVIAWNSNNLDSKVGGNYNYLYRLFRKSNLKPFERDISTEIYQAGSTPCNGVEGFNCYFPLQSYGFQPTNGVGYQPYRVVVLSFELLHAPATVCGPKKSTNLVKNKCVNFNFNGLTGTGVLTESNKKFLPFQQFGRDIADTTDAVRDPQTLEILDITPCSFGGVSVITPGTNTSNQVAVLYQDVNCTEVPVAIHADQLTPTWRVYSTGSNVFQTRAGCLIGAEHVNNSYECDIPIGAGICASYQTQTNSPRRARSVASQSIIAYTMSLGAENSVAYSNNSIAIPTNFTISVTTEILPVSMTKTSVDCTMYICGDSTECSNLLLQYGSFCTQLNRALTGIAVEQDKNTQEVFAQVKQIYKTPPIKDFGGFNFSQILPDPSKPSKRSFIEDLLFNKVTLADAGFIKQYGDCLGDIAARDLICAQKFNGLTVLPPLLTDEMIAQYTSALLAGTITSGWTFGAGAALQIPFAMQMAYRFNGCGVTQNVLYENQKLIANQFNSAIGKIQDSLSSTASALGKLQDVVNQNAQALNTLVKQLSSNFGAISSVLNDILSRLDKVEAEVQIDRLITGRLQSLQTYVTQQLIRAAEIRASANLAATKMSECVLGQSKRVDFCGKGCHLMSFPQSAPHGVVFLHVTYVPAQEKNFTTAPAICHDGKAHFPREGVFVSNGTHWFVTQRNFYEPQIITTDNTFVSGNCDVLIGIVNNTVYDPLQPELDSGGGGSDIDPYKEFGSSYQLLNFLPLDFFPDLNALVDTATALYEEELTGREHCSPHHTAIRQALVCWDELTKLIAWMSSNITSEQVRTIIVNHVNDTWGLKVRQSLWFHLSCLTFGQHTVQEFLVSFGVWIRTPAPYRPPNAPILSTLPEHTVIC

SEQ ID NO: 11267 - protein, 1301 aa, Artificial Sequence
  SARS-CoV-2/Shenzhen/SZTH-004/2020__EPI_ISL_406595 spike protein (1-1147)(I909C_Y1047C) WhcAg construct
MFVFLVLLPLVSSQCVNLTTRTQLPPAYTNSFTRGVYYPDKVFRSSVLHSTQDLFLPFFSNVTWFHAIHVSGTNGTKRFDNPVLPFNDGVYFASTEKSNIIRGWIFGTTLDSKTQSLLIVNNATNVVIKVCEFQFCNDPFLGVYYHKNNKSWMESEFRVYSSANNCTFEYVSQPFLMDLEGKQGNFKNLREFVFKNIDGYFKIYSKHTPINLVRDLPQGFSALEPLVDLPIGINITRFQTLLALHRSYLTPGDSSSGWTAGAAAYYVGYLQPRTFLLKYNENGTITDAVDCALDPLSETKCTLKSFTVEKGIYQTSNFRVQPTESIVRFPNITNLCPFGEVFNATRFASVYAWDRKRISNCVAYYSVLYNSASFSTFKCYGVSPTKLNDLCFTNVYADSFVIRGDEVRQIAPGQTGKIADYNYKLPDDFTGCVIAWNSNNLDSKVGGNYNYLYRLFRKSNLKPFERDISTEIYQAGSTPCNGVEGFNCYFPLQSYGFQPTNGVGYQPYRVVVLSFELLHAPATVCGPKKSTNLVKNKCVNFNFNGLTGTGVLTESNKKFLPFQQFGRDIADTTDAVRDPQTLEILDITPCSFGGVSVITPGTNTSNQVAVLYQDVNCTEVPVAIHADQLTPTWRVYSTGSNVFQTRAGCLIGAEHVNNSYECDIPIGAGICASYQTQTNSPRRARSVASQSIIAYTMSLGAENSVAYSNNSIAIPTNFTISVTTEILPVSMTKTSVDCTMYICGDSTECSNLLLQYGSFCTQLNRALTGIAVEQDKNTQEVFAQVKQIYKTPPIKDFGGFNFSQILPDPSKPSKRSFIEDLLFNKVTLADAGFIKQYGDCLGDIAARDLICAQKFNGLTVLPPLLTDEMIAQYTSALLAGTITSGWTFGAGAALQIPFAMQMAYRFNGCGVTQNVLYENQKLIANQFNSAIGKIQDSLSSTASALGKLQDVVNQNAQALNTLVKQLSSNFGAISSVLNDILSRLDKVEAEVQIDRLITGRLQSLQTYVTQQLIRAAEIRASANLAATKMSECVLGQSKRVDFCGKGCHLMSFPQSAPHGVVFLHVTYVPAQEKNFTTAPAICHDGKAHFPREGVFVSNGTHWFVTQRNFYEPQIITTDNTFVSGNCDVVIGIVNNTVYDPLQPELDSGGGGSDIDPYKEFGSSYQLLNFLPLDFFPDLNALVDTATALYEEELTGREHCSPHHTAIRQALVCWDELTKLIAWMSSNITSEQVRTIIVNHVNDTWGLKVRQSLWFHLSCLTFGQHTVQEFLVSFGVWIRTPAPYRPPNAPILSTLPEHTVIC

SEQ ID NO: 11268 - protein, 1301 aa, Artificial Sequence
  SARS-CoV-2/France/IDF0372/2020__EPI_ISL_406596 spike protein (1-1147)(I909C_Y1047C) WhcAg construct
MFVFLVLLPLVSSQCVNLTTRTQLPPAYTNSFTRGVYYPDKVFRSSVLHSTQDLFLPFFSNVTWFHAIHVSGTNGTKRFDNPVLPFNDGVYFASTEKSNIIRGWIFGTTLDSKTQSLLIVNNATNVVIKVCEFQFCNDPFLGVYYHKNNKSWMESEFRVYSSANNCTFEYVSQPFLMDLEGKQGNFKNLREFVFKNIDGYFKIYSKHTPINLVRDLPQGFSALEPLVDLPIGINITRFQTLLALHRSYLTPGDSSSGWTAGAAAYYVGYLQPRTFLLKYNENGTITDAVDCALDPLSETKCTLKSFTVEKGIYQTSNFRVQPTESIVRFPNITNLCPFGEVFNATRFASVYAWNRKRISNCVADYSFLYNSASFSTFKCYGVSPTKLNDLCFTNVYADSFVIRGDEVRQIAPGQTGKIADYNYKLPDDFTGCVIAWNSNNLDSKVGGNYNYLYRLFRKSNLKPFERDISTEIYQAGSTPCNGVEGFNCYFPLQSYGFQPTNGVGYQPYRVVVLSFELLHAPATVCGPKKSTNLVKNKCVNFNFNGLTGTGVLTESNKKFLPFQQFGRDIADTTDAVRDPQTLEILDITPCSFGGVSVITPGTNTSNQVAVLYQDVNCTEVPVAIHADQLTPTWRVYSTGSNVFQTRAGCLIGAEHVNNSYECDIPIGAGICASYQTQTNSPRRARSVASQSIIAYTMSLGAENSVAYSNNSIAIPTNFTISVTTEILPVSMTKTSVDCTMYICGDSTECSNLLLQYGSFCTQLNRALTGIAVEQDKNTQEVFAQVKQIYKTPPIKDFGGFNFSQILPDPSKPSKRSFIEDLLFNKVTLADAGFIKQYGDCLGDIAARDLICAQKFNGLTVLPPLLTDEMIAQYTSALLAGTITSGWTFGAGAALQIPFAMQMAYRFNGCGVTQNVLYENQKLIANQFNSAIGKIQDSLSSTASALGKLQDVVNQNAQALNTLVKQLSSNFGAISSVLNDILSRLDKVEAEVQIDRLITGRLQSLQTYVTQQLIRAAEIRASANLAATKMSECVLGQSKRVDFCGKGCHLMSFPQSAPHGVVFLHVTYVPAQEKNFTTAPAICHDGKAHFPREGVFVSNGTHWFVTQRNFYEPQIITTDNTFVSGNCDVVIGIVNNTVYDPLQPELDSGGGGSDIDPYKEFGSSYQLLNFLPLDFFPDLNALVDTATALYEEELTGREHCSPHHTAIRQALVCWDELTKLIAWMSSNITSEQVRTIIVNHVNDTWGLKVRQSLWFHLSCLTFGQHTVQEFLVSFGVWIRTPAPYRPPNAPILSTLPEHTVIC

SEQ ID NO: 11269 - protein, 1301 aa, Artificial Sequence
  SARS-CoV-2/Australia/VIC01/2020__EPI_ISL_406844 spike protein (1-1147)(I909C_Y1047C) WhcAg construct
MFVFLVLLPLVSSQCVNLTTRTQLPPAYTNSFTRGVYYPDKVFRSSVLHSTQDLFLPFFSNVTWFHAIHVSGTNGTKRFDNPVLPFNDGVYFASTEKSNIIRGWIFGTTLDSKTQSLLIVNNATNVVIKVCEFQFCNDPFLGVYYHKNNKSWMESEFRVYSSANNCTFEYVSQPFLMDLEGKQGNFKNLREFVFKNIDGYFKIYSKHTPINLVRDLPQGFSALEPLVDLPIGINITRFQTLLALHRRYLTPGDSSSGWTAGAAAYYVGYLQPRTFLLKYNENGTITDAVDCALDPLSETKCTLKSFTVEKGIYQTSNFRVQPTESIVRFPNITNLCPFGEVFNATRFASVYAWNRKRISNCVADYSVLYNSASFSTFKCYGVSPTKLNDLCFTNVYADSFVIRGDEVRQIAPGQTGKIADYNYKLPDDFTGCVIAWNSNNLDSKVGGNYNYLYRLFRKSNLKPFERDISTEIYQAGSTPCNGVEGFNCYFPLQSYGFQPTNGVGYQPYRVVVLSFELLHAPATVCGPKKSTNLVKNKCVNFNFNGLTGTGVLTESNKKFLPFQQFGRDIADTTDAVRDPQTLEILDITPCSFGGVSVITPGTNTSNQVAVLYQDVNCTEVPVAIHADQLTPTWRVYSTGSNVFQTRAGCLIGAEHVNNSYECDIPIGAGICASYQTQTNSPRRARSVASQSIIAYTMSLGAENSVAYSNNSIAIPTNFTISVTTEILPVSMTKTSVDCTMYICGDSTECSNLLLQYGSFCTQLNRALTGIAVEQDKNTQEVFAQVKQIYKTPPIKDFGGFNFSQILPDPSKPSKRSFIEDLLFNKVTLADAGFIKQYGDCLGDIAARDLICAQKFNGLTVLPPLLTDEMIAQYTSALLAGTITSGWTFGAGAALQIPFAMQMAYRFNGCGVTQNVLYENQKLIANQFNSAIGKIQDSLSSTASALGKLQDVVNQNAQALNTLVKQLSSNFGAISSVLNDILSRLDKVEAEVQIDRLITGRLQSLQTYVTQQLIRAAEIRASANLAATKMSECVLGQSKRVDFCGKGCHLMSFPQSAPHGVVFLHVTYVPAQEKNFTTAPAICHDGKAHFPREGVFVSNGTHWFVTQRNFYEPQIITTDNTFVSGNCDVVIGIVNNTVYDPLQPELDSGGGGSDIDPYKEFGSSYQLLNFLPLDFFPDLNALVDTATALYEEELTGREHCSPHHTAIRQALVCWDELTKLIAWMSSNITSEQVRTIIVNHVNDTWGLKVRQSLWFHLSCLTFGQHTVQEFLVSFGVWIRTPAPYRPPNAPILSTLPEHTVIC

SEQ ID NO: 11270 - protein, 1301 aa, Artificial Sequence
  SARS-CoV-2/Germany/BavPat1/2020__EPI_ISL_406862 spike protein (1-1147)(I909C_Y1047C) WhcAg construct
MFVFLVLLPLVSSQCVNLTTRTQLPPAYTNSFTRGVYYPDKVFRSSVLHSTQDLFLPFFSNVTWFHAIHVSGTNGTKRFDNPVLPFNDGVYFASTEKSNIIRGWIFGTTLDSKTQSLLIVNNATNVVIKVCEFQFCNDPFLGVYYHKNNKSWMESEFRVYSSANNCTFEYVSQPFLMDLEGKQGNFKNLREFVFKNIDGYFKIYSKHTPINLVRDLPQGFSALEPLVDLPIGINITRFQTLLALHRSYLTPGDSSSGWTAGAAAYYVGYLQPRTFLLKYNENGTITDAVDCALDPLSETKCTLKSFTVEKGIYQTSNFRVQPTESIVRFPNITNLCPFGEVFNATRFASVYAWNRKRISNCVADYSVLYNSASFSTFKCYGVSPTKLNDLCFTNVYADSFVIRGDEVRQIAPGQTGKIADYNYKLPDDFTGCVIAWNSNNLDSKVGGNYNYLYRLFRKSNLKPFERDISTEIYQAGSTPCNGVEGFNCYFPLQSYGFQPTNGVGYQPYRVVVLSFELLHAPATVCGPKKSTNLVKNKCVNFNFNGLTGTGVLTESNKKFLPFQQFGRDIADTTDAVRDPQTLEILDITPCSFGGVSVITPGTNTSNQVAVLYQGVNCTEVPVAIHADQLTPTWRVYSTGSNVFQTRAGCLIGAEHVNNSYECDIPIGAGICASYQTQTNSPRRARSVASQSIIAYTMSLGAENSVAYSNNSIAIPTNFTISVTTEILPVSMTKTSVDCTMYICGDSTECSNLLLQYGSFCTQLNRALTGIAVEQDKNTQEVFAQVKQIYKTPPIKDFGGFNFSQILPDPSKPSKRSFIEDLLFNKVTLADAGFIKQYGDCLGDIAARDLICAQKFNGLTVLPPLLTDEMIAQYTSALLAGTITSGWTFGAGAALQIPFAMQMAYRFNGCGVTQNVLYENQKLIANQFNSAIGKIQDSLSSTASALGKLQDVVNQNAQALNTLVKQLSSNFGAISSVLNDILSRLDKVEAEVQIDRLITGRLQSLQTYVTQQLIRAAEIRASANLAATKMSECVLGQSKRVDFCGKGCHLMSFPQSAPHGVVFLHVTYVPAQEKNFTTAPAICHDGKAHFPREGVFVSNGTHWFVTQRNFYEPQIITTDNTFVSGNCDVVIGIVNNTVYDPLQPELDSGGGGSDIDPYKEFGSSYQLLNFLPLDFFPDLNALVDTATALYEEELTGREHCSPHHTAIRQALVCWDELTKLIAWMSSNITSEQVRTIIVNHVNDTWGLKVRQSLWFHLSCLTFGQHTVQEFLVSFGVWIRTPAPYRPPNAPILSTLPEHTVIC

SEQ ID NO: 11271 - protein, 1301 aa, Artificial Sequence
  SARS-CoV-2/Wuhan/HBCDC-HB-02/2020__EPI_ISL_412978 spike protein (1-1147)(I909C_Y1047C) WhcAg construct
MFVFLVLLPLVSSQCVNLTTRTQLPPAYTNSFTRGVYYPDKVFRSSVLHSTQDLFLPFFSNVTWFHAIHVSGTNGTKRFDNPVLPFNDGVYFASTEKSNIIRGWIFGTTLDSKTQSLLIVNNATNVVIKVCEFQFCNDPFLGVYYHKNNKSWMESEFRVYSSANNCTFEYVSQPFLMDLEGKQGNFKNLREFVFKNIDGYFKIYSKHTPINLVRDLPQGFSALEPLVDLPIGINITRFQTLLALHRSYLTPGDSSSGWTAGAAAYYVGYLQPRTFLLKYNENGTITDAVDCALDPLSETKCTLKSFTVEKGIYQTSNFRVQPTESIVRFPNITNLCPFGEVFNATRFASVYAWNRKRISNCVADYSVLYNSASFSTFKCYGVSPTKLNDLCFTNVYADSFVIRGDEVRQIAPGQTGKIADYNYKLPDDFTGCVIAWNSNNLDSKVGGNYNYLYRLFRKSNLKPFERDISTEIYQAGSTPCNGVEGFNCYFPLQSYGFQPTNGVGYQPYRVVVLSFELLHAPATVCGPKKSTNLVKNKCVNFNFNGLTGTGVLTESNKKFLPFQQFGRDIADTTDAVRDPQTLEILDITPCSFGGVSVITPGTNTSNQVAVLYQDVNCTEVPVAIHADQLTPTWRVYSTGSNVFQTRAGCLIGAEHVNNSYECDIPIGAGICASYQTQTNSPRRARSVASQSIIAYTMSLGAENSVAYSNNSIAIPTNFTISVTTEILPVSMTKTSVDCTMYICGDSTECSNFLLQYGSFCTQLNRALTGIAVEQDKNTQEVFAQVKQIYKTPPIKDFGGFNFSQILPDPSKPSKRSFIEDLLFNKVTLADAGFIKQYGDCLGDIAARDLICAQKFNGLTVLPPLLTDEMIAQYTSALLAGTITSGWTFGAGAALQIPFAMQMAYRFNGCGVTQNVLYENQKLIANQFNSAIGKIQDSLSSTASALGKLQDVVNQNAQALNTLVKQLSSNFGAISSVLNDILSRLDKVEAEVQIDRLITGRLQSLQTYVTQQLIRAAEIRASANLAATKMSECVLGQSKRVDFCGKGCHLMSFPQSAPHGVVFLHVTYVPAQEKNFTTAPAICHDGKAHFPREGVFVSNGTHWFVTQRNFYEPQIITTDNTFVSGNCDVVIGIVNNTVYDPLQPELDSGGGGSDIDPYKEFGSSYQLLNFLPLDFFPDLNALVDTATALYEEELTGREHCSPHHTAIRQALVCWDELTKLIAWMSSNITSEQVRTIIVNHVNDTWGLKVRQSLWFHLSCLTFGQHTVQEFLVSFGVWIRTPAPYRPPNAPILSTLPEHTVIC

SEQ ID NO: 11272 - protein, 1301 aa, Artificial Sequence
  SARS-CoV-2/Australia/QLD02/2020__EPI_ISL_407896 spike protein (1-1147)(I909C_Y1047C) WhcAg construct
MFVFLVLLPLVSSQCVNLTTRTQLPPAYTNSFTRGVYYPDKVFRSSVLHSTQDLFLPFFSNVTWFHAIHVSGTNGTKRFDNPVLPFNDGVYFASTEKSNIIRGWIFGTTLDSKTQSLLIVNNATNVVIKVCEFQFCNDPFLGVYYHKNNKSWMESEFRVYSSANNCTFEYVSQPFLMDLEGKQGNFKNLREFVFKNIDGYFKIYSKHTPINLVRDLPQGFSALEPLVDLPIGINITRFQTLLALHRSYLTPGDSSSGWTAGAAAYYVGYLQPRTFLLKYNENGTITDAVDCALDPLSETKCTLKSFTVEKGIYQTSNFRVQPTESIVRFPNITNLCPFGEVFNATRFASVYAWNRKRISNCVADYSVLYNSASFSTFKCYGVSPTKLNDLCFTNVYADSFVIRGDEVRQIAPGQTGKIADYNYKLPDDFTGCVIAWNSNNLDSKVGGNYNYLYRLFRKSNLKPFERDISTEIYQAGSTPCNGVEGFNCYFPLQSYGFQPTNGVGYQPYRVVVLSFELLHAPATVCGPKKSTNLVKNKCVNFNFNGLTGTGVLTESNKKFLPFQQFGRDIADTTDAVRDPQTLEILDITPCSFGGVSVITPGTNTSNQVAVLYQDVNCTEVPVAIHADQLTPTWRVYSTGSNVFQTRAGCLIGAEHVNNSYECDIPIGAGICASYQTQTNSPRRARSVASQSIIAYTMSLGAENSVAYSNNSIAIPTNFTISVTTEILPVSMTKTSVDCTMYICGDSTECSNLLLQYGSFCTQLNRALTGIAVEQDKNTQEVFAQVKQIYKTPPIKDFGGFNFSQILPDPSKPSKRSFIEDLLFNKVTLADAGFIKQYGDCLGDIAARDLICAQKFNGLTVLPPLLTDEMIAQYTSALLAGTITSGWTFGAGAALQIPFAMQMAYRFNGCGVTQNVLYENQKLIANQFNSAIGKIQDSLSSTASALGKLQDVVNQNAQALNTLVKQLSSNFGAISSVLNDILSRLDKVEAEVQIDRLITGRLQSLQTYVTQQLIRAAEIRASANLAATKMSECVLGQSKRVDFCGKGCHLMSFPQSAPHGVVFLHVTYVPAQEKNFTTAPAICHDGKAHFPREGVFVSNGTHWFVTQRNFYEPQIITTDNTFVSGNCDVVIGIVNNTVYDPLQLELDSGGGGSDIDPYKEFGSSYQLLNFLPLDFFPDLNALVDTATALYEEELTGREHCSPHHTAIRQALVCWDELTKLIAWMSSNITSEQVRTIIVNHVNDTWGLKVRQSLWFHLSCLTFGQHTVQEFLVSFGVWIRTPAPYRPPNAPILSTLPEHTVIC

SEQ ID NO: 11273 - protein, 1301 aa, Artificial Sequence
  SARS-CoV-2/India/1-31/2020__EPI_ISL_413523 spike protein (1-1147)(I909C_Y1047C) WhcAg construct
MFVFLVLLPLVSSQCVNLTTRTQLPPAYTNSFTRGVYYPDKVFRSSVLHSTQDLFLPFFSNVTWFHAIHVSGTNGTKRFDNPVLPFNDGVYFASTEKSNIIRGWIFGTTLDSKTQSLLIVNNATNVVIKVCEFQFCNDPFLGVYYHKNNKSWMESEFRVYSSANNCTFEYVSQPFLMDLEGKQGNFKNLREFVFKNIDGYFKIYSKHTPINLVRDLPQGFSALEPLVDLPIGINITRFQTLLALHRSYLTPGDSSSGWTAGAAAYYVGYLQPRTFLLKYNENGTITDAVDCALDPLSETKCTLKSFTVEKGIYQTSNFRVQPTESIVRFPNITNLCPFGEVFNATRFASVYAWNRKRISNCVADYSVLYNSASFSTFKCYGVSPTKLNDLCFTNVYADSFVIRGDEVRQIAPGQTGKIADYNYKLPDDFTGCVIAWNSNNLDSKVGGNYNYLYRLFRKSNLKPFERDISTEIYQAGSTPCNGVEGFNCYFPLQSYGFQPTNGVGYQPYRVVVLSFELLHAPATVCGPKKSTNLVKNKCVNFNFNGLTGTGVLTESNKKFLPFQQFGRDIADTTDAVRDPQTLEILDITPCSFGGVSVITPGTNTSNQVAVLYQDVNCTEVPVAIHADQLTPTWRVYSTGSNVFQTRAGCLIGAEHVNNSYECDIPIGAGICASYQTQTNSPRRARSVASQSIIAYTMSLGAENSVAYSNNSIAIPTNFTISVTTEILPVSMTKTSVDCTMYICGDSTECSNLLLQYGSFCTQLNRALTGIAVEQDKNTQEVFAQVKQIYKTPPIKDFGGFNFSQILPDPSKPSKRSFIEDLLFNKVTLADAGFIKQYGDCLGDIAARDLICAQKFNGLTVLPPLLTDEMIAQYTSALLAGTITSGWTFGAGAALQIPFAMQMAYRFNGCGVTQNVLYENQKLIANQFNSVIGKIQDSLSSTASALGKLQDVVNQNAQALNTLVKQLSSNFGAISSVLNDILSRLDKVEAEVQIDRLITGRLQSLQTYVTQQLIRAAEIRASANLAATKMSECVLGQSKRVDFCGKGCHLMSFPQSAPHGVVFLHVTYVPAQEKNFTTAPAICHDGKAHFPREGVFVSNGTHWFVTQRNFYEPQIITTDNTFVSGNCDVVIGIVNNTVYDPLQPELDSGGGGSDIDPYKEFGSSYQLLNFLPLDFFPDLNALVDTATALYEEELTGREHCSPHHTAIRQALVCWDELTKLIAWMSSNITSEQVRTIIVNHVNDTWGLKVRQSLWFHLSCLTFGQHTVQEFLVSFGVWIRTPAPYRPPNAPILSTLPEHTVIC

SEQ ID NO: 11274 - protein, 1301 aa, Artificial Sequence
  SARS-CoV-2/Guangdong/GD2020087-P0008/2020__EPI_ISL_413863 spike protein (1-1147)(I909C_Y1047C) WhcAg construct
MFVFLVLLPLVSSQCVNLTTRTQLPPAYTNSFTRGVYYPDKVFRSSVLHSTQDLFLPFFSNVTWFHAIHVSGTNGTKRFDNPVLPFNDGVYFASTEKSNIIRGWIFGTTLDSKTQSLLIVNNATNVVIKVCEFQFCNDPFLGVYYHKNNKSWMESEFRVYSSANNCTFEYVSQPFLMDLEGKQGNFKNLREFVFKNIDGYFKIYSKHTPINLVRDLPQGFSALEPLVDLPIGINITRFQTLLALHRSYLTPGDSSSGWTAGAAAYYVGYLQPRTFLLKYNENGTITDAVDCALDPLSETKCTLKSFTVEKGIYQTSNFRVQPTESIVRFPNITNLCPFGEVFNATRFASVYAWNRKRISNCVADYSVLYNSASFSTFKCYGVSPTKLNDLCFTNVYADSFVIRGDEVREIAPGQTGKIADYNYKLPDDFTGCVIAWNSNNLDSKVGGNYNYLYRLFRKSNLKPFERDISTEIYQAGSTPCNGVEGFNCYFPLQSYGFQPTNGVGYQPYRVVVLSFELLHAPATVCGPKKSTNLVKNKCVNFNFNGLTGTGVLTESNKKFLPFQQFGRDIADTTDAVRDPQTLEILDITPCSFGGVSVITPGTNTSNQVAVLYQDVNCTEVPVAIHADQLTPTWRVYSTGSNVFQTRAGCLIGAEHVNNSYECDIPIGAGICASYQTQTNSPRRARSVASQSIIAYTMSLGAENSVAYSNNSIAIPTNFTISVTTEILPVSMTKTSVDCTMYICGDSTECSNLLLQYGSFCTQLNRALTGIAVEQDKNTQEVFAQVKQIYKTPPIKDFGGFNFSQILPDPSKPSKRSFIEDLLFNKVTLADAGFIKQYGDCLGDIAARDLICAQKFNGLTVLPPLLTDEMIAQYTSALLAGTITSGWTFGAGAALQIPFAMQMAYRFNGCGVTQNVLYENQKLIANQFNSAIGKIQDSLSSTASALGKLQDVVNQNAQALNTLVKQLSSNFGAISSVLNDILSRLDKVEAEVQIDRLITGRLQSLQTYVTQQLIRAAEIRASANLAATKMSECVLGQSKRVDFCGKGCHLMSFPQSAPHGVVFLHVTYVPAQEKNFTTAPAICHDGKAHFPREGVFVSNGTHWFVTQRNFYEPQIITTDNTFVSGNCDVVIGIVNNTVYDPLQPELDSGGGGSDIDPYKEFGSSYQLLNFLPLDFFPDLNALVDTATALYEEELTGREHCSPHHTAIRQALVCWDELTKLIAWMSSNITSEQVRTIIVNHVNDTWGLKVRQSLWFHLSCLTFGQHTVQEFLVSFGVWIRTPAPYRPPNAPILSTLPEHTVIC

SEQ ID NO: 11275 - protein, 1301 aa, Artificial Sequence
  SARS-CoV-2/Sweden/01/2020__EPI_ISL_411951 spike protein (1-1147)(I909C_Y1047C) WhcAg construct
MFVFLVLLPLVSSQCVNLTTRTQLPPAYTNSFTRGVYYPDKVFRSSVLHSTQDLFLPFFSNVTWFHAIHVSGTNGTKRFDNPVLPFNDGVYFASTEKSNIIRGWIFGTTLDSKTQSLLIVNNATNVVIKVCEFQFCNDPFLGVYYHKNNKSWMESEFRVYSSANNCTFEYVSQPFLMDLEGKQGNFKNLREFVFKNIDGYFKIYSKHTPINLVRDLPQGFSALEPLVDLPIGINITRFQTLLALHRSYLTPGDSSSGWTAGAAAYYVGYLQPRTFLLKYNENGTITDAVDCALDPLSETKCTLKSFTVEKGIYQTSNFRVQPTESIVRFPNITNLCPFGEVFNATRFASVYAWNRKRISNCVADYSVLYNSASFSTFKCYGVSPTKLNDLCFTNVYADSFVIRGDEVRQIAPGQTGKIADYNYKLPDDFTGCVIAWNSNNLDSKVGGNYNYLYRLFRKSNLKPFERDISTEIYQAGSTPCNGVEGFNCYFPLQSYGFQPTNGVGYQPYRVVVLSFELLHAPATVCGPKKSTNLVKNKCVNFNFNGLTGTGVLTESNKKFLPFQQFGRDIADTTDAVRDPQTLEILDITPCSFGGVSVITPGTNTSNQVAVLYQDVNCTEVPVAIHADQLTPTWRVYSTGSNVFQTRAGCLIGAEHVNNSYECDIPIGAGICASYQTQTNSPRRARSVASQSIIAYTMSLGAENSVAYSNNSIAIPTNFTISVTTEILPVSMTKTSVDCTMYICGDSTECSNLLLQYGSFCTQLNRALTGIAVEQDKNTQEVFAQVKQIYKTPPIKDCGGFNFSQILPDPSKPSKRSFIEDLLFNKVTLADAGFIKQYGDCLGDIAARDLICAQKFNGLTVLPPLLTDEMIAQYTSALLAGTITSGWTFGAGAALQIPFAMQMAYRFNGCGVTQNVLYENQKLIANQFNSAIGKIQDSLSSTASALGKLQDVVNQNAQALNTLVKQLSSNFGAISSVLNDILSRLDKVEAEVQIDRLITGRLQSLQTYVTQQLIRAAEIRASANLAATKMSECVLGQSKRVDFCGKGCHLMSFPQSAPHGVVFLHVTYVPAQEKNFTTAPAICHDGKAHFPREGVFVSNGTHWFVTQRNFYEPQIITTDNTFVSGNCDVVIGIVNNTVYDPLQPELDSGGGGSDIDPYKEFGSSYQLLNFLPLDFFPDLNALVDTATALYEEELTGREHCSPHHTAIRQALVCWDELTKLIAWMSSNITSEQVRTIIVNHVNDTWGLKVRQSLWFHLSCLTFGQHTVQEFLVSFGVWIRTPAPYRPPNAPILSTLPEHTVIC

SEQ ID NO: 11276 - protein, 1301 aa, Artificial Sequence
  SARS-CoV-2/Tianmen/HBCDC-HB-07/2020__EPI_ISL_412983 spike protein (1-1147)(I909C_Y1047C) WhcAg construct
MFVFLVLLPLVSSQCVNLTTRTQLPPAYTNSFTRGVYYPDKVFRSSVLHSTQDLFLPFFSNVTWFHAIHVSGTNGTKRFDNPVLPFNDGVYFASTEKSNIIRGWIFGTTLDSKTQSLLIVNNATNVVIKVCEFQFCNDPFLGVYYHKNNKSWMESEFRVYSSANNCTFEYVSQPFLMDLEGKQGNFKNLREFVFKNIDGYFKIYSKHTPINLVRDLPQGFSALEPLVDLPIGINITRFQTLLALHRSYLTPGDSSSGWTAGAAAYYVGYLQPRTFLLKYNENGTITDAVDCALDPLSETKCTLKSFTVEKGIYQTSNFRVQPTESIVRFPNITNLCPFGEVFNATRFASVYAWNRKRISNCVADYSVLYNSASFSTFKCYGVSPTKLNDLCFTNVYADSFVIRGDEVRQIAPGQTGKIADYNYKLPDDFTGCVIAWNSNNLDSKVGGNYNYLYRLFRKSNLKPFERDISTEIYQAGSTPCNGVEGFNCYFPLQSYGFQPTNGVGYQPYRVVVLSFELLHAPATVCGPKKSTNLVKNKCVNFNFNGLTGTGVLTESNKKFLPFQQFGRDIADTTDAVRDPQTLEILDITPCSFGGVSVITPGTNTSNQVAVLYQDLNCTEVPVAIHADQLTPTWRVYSTGSNVFQTRAGCLIGAEHVNNSYECDIPIGAGICASYQTQTNSPRRARSVASQSIIAYTMSLGAENSVAYSNNSIAIPTNFTISVTTEILPVSMTKTSVDCTMYICGDSTECSNLLLQYGSFCTQLNRALTGIAVEQDKNTQEVFAQVKQIYKTPPIKDFGGFNFSQILPDPSKPSKRSFIEDLLFNKVTLADAGFIKQYGDCLGDIAARDLICAQKFNGLTVLPPLLTDEMIAQYTSALLAGTITSGWTFGAGAALQIPFAMQMAYRFNGCGVTQNVLYENQKLIANQFNSAIGKIQDSLSSTASALGKLQDVVNQNAQALNTLVKQLSSNFGAISSVLNDILSRLDKVEAEVQIDRLITGRLQSLQTYVTQQLIRAAEIRASANLAATKMSECVLGQSKRVDFCGKGCHLMSFPQSAPHGVVFLHVTYVPAQEKNFTTAPAICHDGKAHFPREGVFVSNGTHWFVTQRNFYEPQIITTDNTFVSGNCDVVIGIVNNTVYDPLQPELDSGGGGSDIDPYKEFGSSYQLLNFLPLDFFPDLNALVDTATALYEEELTGREHCSPHHTAIRQALVCWDELTKLIAWMSSNITSEQVRTIIVNHVNDTWGLKVRQSLWFHLSCLTFGQHTVQEFLVSFGVWIRTPAPYRPPNAPILSTLPEHTVIC

SEQ ID NO: 11277 - protein, 1301 aa, Artificial Sequence
  SARS-CoV-2/Hong Kong/case42_VM20002493/2020__EPI_ISL_414527 spike protein (1-1147)(I909C_Y1047C) WhcAg construct
MFVFLVLLPLVSSQCVNLTTRTQLPPAYTNSFTRGVYYPDKVFRSSVLHSTQDLFLPFFSNVTWFHAIHVSGTNGTKRFDNPVLPFNDGVYFASTEKSNIIRGWIFGTTLDSKTQSLLIVNNATNVVIKVCEFQFCNDPFLGVYYHKNNKSWMESEFRVYSSANNCTFEYVSQPFLMDLEGKQGNFKNLREFVFKNIDGYFKIYSKHTPINLVRDLPQGFSALEPLVDLPIGINITRFQTLLALHRSYLTPGDSSSGWTAGAAAYYVGYLQPRTFLLKYNENGTITDAVDCALDPLSETKCTLKSFTVEKGIYQTSNFRVQPTESIVRFPNITNLCPFGEVFNATRFASVYAWNRKRISNCVADYSVLYNSASFSTFKCYGVSPTKLNDLCFTNVYADSFVIRGDEVRQIAPGQTGKIADYNYKLPDDFTGCVIAWNSNNLDSKVGGNYNYLYRLFRKSNLKPFERDISTEIYQAGSTPCNGVEGFNCYFPLQSYGFQPTNGVGYQPYRVVVLSFELLHAPATVCGPKKSTNLVKNKCVNFNFNGLTGTGVLTESNKKFLPFQQFGRDIADTTDAVRDPQTLEILDITPCSFGGVSVITPGTNTSNQVAVLYQDVNCTEVPVAIHADQLTPTWRVYSTGSNVFQTRAGCLIGAEHVNNSYECDIPIGAGICASYQTQTNSPRRARSVASQSIIAYTMSLGAENSVAYSNNSIAIPTNFAISVTTEILPVSMTKTSVDCTMYICGDSTECSNLLLQYGSFCTQLNRALTGIAVEQDKNTQEVFAQVKQIYKTPPIKDFGGFNFSQILPDPSKPSKRSFIEDLLFNKVTLADAGFIKQYGDCLGDIAARDLICAQKFNGLTVLPPLLTDEMIAQYTSALLAGTITSGWTFGAGAALQIPFAMQMAYRFNGCGVTQNVLYENQKLIANQFNSAIGKIQDSLSSTASALGKLQDVVNQNAQALNTLVKQLSSNFGAISSVLNDILSRLDKVEAEVQIDRLITGRLQSLQTYVTQQLIRAAEIRASANLAATKMSECVLGQSKRVDFCGKGCHLMSFPQSAPHGVVFLHVTYVPAQEKNFTTAPAICHDGKAHFPREGVFVSNGTHWFVTQRNFYEPQIITTDNTFVSGNCDVVIGIVNNTVYDPLQPELDSGGGGSDIDPYKEFGSSYQLLNFLPLDFFPDLNALVDTATALYEEELTGREHCSPHHTAIRQALVCWDELTKLIAWMSSNITSEQVRTIIVNHVNDTWGLKVRQSLWFHLSCLTFGQHTVQEFLVSFGVWIRTPAPYRPPNAPILSTLPEHTVIC

SEQ ID NO: 11278 - protein, 1301 aa, Artificial Sequence
  SARS-CoV-2/USA/CruiseA-23/2020__EPI_ISL_414482 spike protein (1-1147)(I909C_Y1047C) WhcAg construct
MFVFLVLLPLVSSQCVNLTTRTQLPPAYTNSFTRGVYYPDKVFRSSVLHSTQDLFLPFFSNVTWFHAIHVSGTNGTKRFDNPVLPFNDGVYFASTEKSNIIRGWIFGTTLDSKTQSLLIVNNATNVVIKVCEFQFCNDPFLGVYYHKNNKSWMESEFRVYSSANNCTFEYVSQPFLMDLEVKQGNFKNLREFVFKNIDGYFKIYSKHTPINLVRDLPQGFSALEPLVDLPIGINITRFQTLLALHRSYLTPGDSSSGWTAGAAAYYVGYLQPRTFLLKYNENGTITDAVDCALDPLSETKCTLKSFTVEKGIYQTSNFRVQPTESIVRFPNITNLCPFGEVFNATRFASVYAWNRKRISNCVADYSVLYNSASFSTFKCYGVSPTKLNDLCFTNVYADSFVIRGDEVRQIAPGQTGKIADYNYKLPDDFTGCVIAWNSNNLDSKVGGNYNYLYRLFRKSNLKPFERDISTEIYQAGSTPCNGVEGFNCYFPLQSYGFQPTNGVGYQPYRVVVLSFELLHAPATVCGPKKSTNLVKNKCVNFNFNGLTGTGVLTESNKKFLPFQQFGRDIADTTDAVRDPQTLEILDITPCSFGGVSVITPGTNTSNQVAVLYQDVNCTEVPVAIHADQLTPTWRVYSTGSNVFQTRAGCLIGAEHVNNSYECDIPIGAGICASYQTQTNSPRRARSVASQSIIAYTMSLGAENSVAYSNNSIAIPTNFTISVTTEILPVSMTKTSVDCTMYICGDSTECSNLLLQYGSFCTQLNRALTGIAVEQDKNTQEVFAQVKQIYKTPPIKDFGGFNFSQILPDPSKPSKRSFIEDLLFNKVTLADAGFIKQYGDCLGDIAARDLICAQKFNGLTVLPPLLTDEMIAQYTSALLAGTITSGWTFGAGAALQIPFAMQMAYRFNGCGVTQNVLYENQKLIANQFNSAIGKIQDSLSSTASALGKLQDVVNQNAQALNTLVKQLSSNFGAISSVLNDILSRLDKVEAEVQIDRLITGRLQSLQTYVTQQLIRAAEIRASANLAATKMSECVLGQSKRVDFCGKGCHLMSFPQSAPHGVVFLHVTYVPAQEKNFTTAPAICHDGKAHFPREGVFVSNGTHWFVTQRNFYEPQIITTDNTFVSGNCDVVIGIVNNTVYDPLQPELDSGGGGSDIDPYKEFGSSYQLLNFLPLDFFPDLNALVDTATALYEEELTGREHCSPHHTAIRQALVCWDELTKLIAWMSSNITSEQVRTIIVNHVNDTWGLKVRQSLWFHLSCLTFGQHTVQEFLVSFGVWIRTPAPYRPPNAPILSTLPEHTVIC

SEQ ID NO: 11279 - protein, 1301 aa, Artificial Sequence
  SARS-CoV-2/Hong Kong/case85_VM20002868/2020__EPI_ISL_414519 spike protein (1-1147)(I909C_Y1047C) WhcAg construct
MFVFLVLVPLVSSQCVNLTTRTQLPPAYTNSFTRGVYYPDKVFRSSVLHSTQDLFLPFFSNVTWFHAIHVSGTNGTKRFDNPVLPFNDGVYFASTEKSNIIRGWIFGTTLDSKTQSLLIVNNATNVVIKVCEFQFCNDPFLGVYYHKNNKSWMESEFRVYSSANNCTFEYVSQPFLMDLEGKQGNFKNLREFVFKNIDGYFKIYSKHTPINLVRDLPQGFSALEPLVDLPIGINITRFQTLLALHRSYLTPGDSSSGWTAGAAAYYVGYLQPRTFLLKYNENGTITDAVDCALDPLSETKCTLKSFTVEKGIYQTSNFRVQPTESIVRFPNITNLCPFGEVFNATRFASVYAWNRKRISNCVADYSVLYNSASFSTFKCYGVSPTKLNDLCFTNVYADSFVIRGDEVRQIAPGQTGKIADYNYKLPDDFTGCVIAWNSNNLDSKVGGNYNYLYRLFRKSNLKPFERDISTEIYQAGSTPCNGVEGFNCYFPLQSYGFQPTNGVGYQPYRVVVLSFELLHAPATVCGPKKSTNLVKNKCVNFNFNGLTGTGVLTESNKKFLPFQQFGRDIADTTDAVRDPQTLEILDITPCSFGGVSVITPGTNTSNQVAVLYQDVNCTEVPVAIHADQLTPTWRVYSTGSNVFQTRAGCLIGAEHVNNSYECDIPIGAGICASYQTQTNSPRRARSVASQSIIAYTMSLGAENSVAYSNNSIAIPTNFTISVTTEILPVSMTKTSVDCTMYICGDSTECSNLLLQYGSFCTQLNRALTGIAVEQDKNTQEVFAQVKQIYKTPPIKDFGGFNFSQILPDPSKPSKRSFIEDLLFNKVTLADAGFIKQYGDCLGDIAARDLICAQKFNGLTVLPPLLTDEMIAQYTSALLAGTITSGWTFGAGAALQIPFAMQMAYRFNGCGVTQNVLYENQKLIANQFNSAIGKIQDSLSSTASALGKLQDVVNQNAQALNTLVKQLSSNFGAISSVLNDILSRLDKVEAEVQIDRLITGRLQSLQTYVTQQLIRAAEIRASANLAATKMSECVLGQSKRVDFCGKGCHLMSFPQSAPHGVVFLHVTYVPAQEKNFTTAPAICHDGKAHFPREGVFVSNGTHWFVTQRNFYEPQIITTDNTFVSGNCDVVIGIVNNTVYDPLQPELDSGGGGSDIDPYKEFGSSYQLLNFLPLDFFPDLNALVDTATALYEEELTGREHCSPHHTAIRQALVCWDELTKLIAWMSSNITSEQVRTIIVNHVNDTWGLKVRQSLWFHLSCLTFGQHTVQEFLVSFGVWIRTPAPYRPPNAPILSTLPEHTVIC

SEQ ID NO: 11280 - protein, 1301 aa, Artificial Sequence; identical to SEQ ID NO: 11270
  SARS-CoV-2/England/200990660/2020__EPI_ISL_414523 spike protein (1-1147)(I909C_Y1047C) WhcAg construct

SEQ ID NO: 11281 - protein, 1301 aa, Artificial Sequence
  SARS-CoV-2/Australia/NSW09/2020__EPI_ISL_413595 spike protein (1-1147)(I909C_Y1047C) WhcAg construct
MFVFLVLLPLVSSQCVNLTTRTQLPPAYTNSFTRGVYYPDKVFRSSVLHSTQDLFLPFFSNVTWFHAIHVSGTNGTKRFDNPVLPFNDGVYFASTEKSNIIRGWIFGTTLDSKTQSLLIVNNATNVVIKVCEFQFCNDPFLGVYYHKNNKSWMESEFRVYSSANNCTFEYVSQPFLMDLEGKQGNFKNLREFVFKNIDGYFKIYSKHTPINLVRDLPQGFSALEPLVDLPIGINITRFQTLLALHRSYLTPGDSSSGWTAGAAAYYVGYLQPRTFLLKYNENGTITDAVDCALDPLSETKCTLKSFTVEKGIYQTSNFRVQPTESIVRFPNITNLCPFGEVFNATRFASVYAWNRKRISNCVADYSVLYNSASFSTFKCYGVSPTKLNDLCFTNVYADSFVIRGDEVRQIAPGQTGKIADYNYKLPDDFTGCVIAWNSNNLDSKVGGNYNYLYRLFRKSNLKPFERDISTEIYQAGSTPCNGVEGFNCYFPLQSYGFQPTNGVGYQPYRVVVLSFELLHAPATVCGPKKSTNLVKNKCVNFNFNGLTGTGVLTESNKKFLPFQQFGRDIADTTDAVRDPQTLEILDITPCSFGGVSVITPGTNTSNQVAVLYQDVNCTEVPVAIHADQLTPTWRVYSTGSNVFQTRAGCLIGAEHVNNSYECDIPIGAGICASYQTQTNSPRRARSVASQSIIAYTMSLGAENSVAYSNNSIAIPTNFTISVTTEILPVSMTKTSVDCTMYICGDSTECSNLLLQYGSFCTQLNRALTGIAVEQDKNTQEVFAQVKQIYKTPPIKDFGGFNFSQILPDPSKPSKRSFIEDLLFNKVTLADAGFIKQYGDCLGDIAARDLICAQKFNGLTVLPPLLTDEMIAQYTSALLAGTITSGWTFGAGAALQIPFAMQMAYRFNGCGVTQNVLYENQKLIANQFNSAIGKIQDSLSFTASALGKLQDVVNQNAQALNTLVKQLSSNFGAISSVLNDILSRLDKVEAEVQIDRLITGRLQSLQTYVTQQLIRAAEIRASANLAATKMSECVLGQSKRVDFCGKGCHLMSFPQSAPHGVVFLHVTYVPAQEKNFTTAPAICHDGKAHFPREGVFVSNGTHWFVTQRNFYEPQIITTDNTFVSGNCDVVIGIVNNTVYDPLQPELDSGGGGSDIDPYKEFGSSYQLLNFLPLDFFPDLNALVDTATALYEEELTGREHCSPHHTAIRQALVCWDELTKLIAWMSSNITSEQVRTIIVNHVNDTWGLKVRQSLWFHLSCLTFGQHTVQEFLVSFGVWIRTPAPYRPPNAPILSTLPEHTVIC

SEQ ID NO: 11282 - protein, 1301 aa, Artificial Sequence; identical to SEQ ID NO: 11262
  SARS-CoV-2/Australia/NSW10/2020__EPI_ISL_413596 spike protein (1-1147)(I909C_Y1047C) WhcAg construct

SEQ ID NO: 11283 - protein, 1301 aa, Artificial Sequence
  SARS-CoV-2/Switzerland/1000477797/2020__EPI_ISL_413023 spike protein (1-1147)(I909C_Y1047C) WhcAg construct
MFVFLVLLPLVSSQCVNLTTRTQLPPAYTNSFTRGVYYPDKVFRSSVLHSTQDLFLPFFSNVTWFHAIHVSGTNGTKRFDNPVLPFNDGVYFASTEKSNIIRGWIFGTTLDSKTQSLLIVNNATNVVIKVCEFQFCNDPFLGVYYHKNNKSWMESEFRVYSSANNCTFEYVSQPFLMDLEGKQGNFKNLREFVFKNIDGYFNIYSKHTPINLVRDLPQGFSALEPLVDLPIGINITRFQTLLALHRSYLTPGDSSSGWTAGAAAYYVGYLQPRTFLLKYNENGTITDAVDCALDPLSETKCTLKSFTVEKGIYQTSNFRVQPTESIVRFPNITNLCPFGEVFNATRFASVYAWNRKRISNCVADYSVLYNSASFSTFKCYGVSPTKLNDLCFTNVYADSFVIRGDEVRQIAPGQTGKIADYNYKLPDDFTGCVIAWNSNNLDSKVGGNYNYLYRLFRKSNLKPFERDISTEIYQAGSTPCNGVEGFNCYFPLQSYGFQPTNGVGYQPYRVVVLSFELLHAPATVCGPKKSTNLVKNKCVNFNFNGLTGTGVLTESNKKFLPFQQFGRDIADTTDAVRDPQTLEILDITPCSFGGVSVITPGTNTSNQVAVLYQGVNCTEVPVAIHADQLTPTWRVYSTGSNVFQTRAGCLIGAEHVNNSYECDIPIGAGICASYQTQTNSPRRARSVASQSIIAYTMSLGAENSVAYSNNSIAIPTNFTISVTTEILPVSMTKTSVDCTMYICGDSTECSNLLLQYGSFCTQLNRALTGIAVEQDKNTQEVFAQVKQIYKTPPIKDFGGFNFSQILPDPSKPSKRSFIEDLLFNKVTLADAGFIKQYGDCLGDIAARDLICAQKFNGLTVLPPLLTDEMIAQYTSALLAGTITSGWTFGAGAALQIPFAMQMAYRFNGCGVTQNVLYENQKLIANQFNSAIGKIQDSLSSTASALGKLQDVVNQNAQALNTLVKQLSSNFGAISSVLNDILSRLDKVEAEVQIDRLITGRLQSLQTYVTQQLIRAAEIRASANLAATKMSECVLGQSKRVDFCGKGCHLMSFPQSAPHGVVFLHVTYVPAQEKNFTTAPAICHDGKAHFPREGVFVSNGTHWFVTQRNFYEPQIITTDNTFVSGNCDVVIGIVNNTVYDPLQPELDSGGGGSDIDPYKEFGSSYQLLNFLPLDFFPDLNALVDTATALYEEELTGREHCSPHHTAIRQALVCWDELTKLIAWMSSNITSEQVRTIIVNHVNDTWGLKVRQSLWFHLSCLTFGQHTVQEFLVSFGVWIRTPAPYRPPNAPILSTLPEHTVIC

SEQ ID NO: 11284 - protein, 1301 aa, Artificial Sequence
  SARS-CoV-2/Belgium/BA-02291/2020__EPI_ISL_415159 spike protein (1-1147)(I909C_Y1047C) WhcAg construct
MFVFLVLLPLVSSQCVNLTTRTQLPPAYTNSFTRGVYYPDKVFRSSVLHSTQDLFLPFFSNVTWFHAIHVSGTNGTKRFDNPVLPFNDGVYFASTEKSNIIRGWIFGTTLDSKTQSLLIVNNATNVVIKVCEFQFCNDPFLGVYYHKNNKSWMESEFRVYSSANNCTFEYVSQPFLMDLEGKQGNFKNLREFVFKNIDGYFKIYSKHTPINLVRDLPQGFSALEPLVDLPIGINITRFQTLLALHRSYLTPGDSSSGWTAGAAAYYVGYLQPRTFLLKYNENGTITDAVDCALDPLSETKCTLKSFTVEKGIYQTSNFRVQPTESIVRFPNITNLCPFGEVFNATRFASVYAWNRKRISNCVADYSVLYNSASFSTFKCYGVSPTKLNDLCFTNVYADSFVIRGDEVRQIAPGQTGKIADYNYKLPDDFTGCVIAWNSNNLDSKVGGNYNYLYRLFRRSNLKPFERDISTEIYQAGSTPCNGVEGFNCYFPLQSYGFQPTNGVGYQPYRVVVLSFELLPAPATVCGPKKSTNLVKNKCVNFNFNGLTGTGVLTESNKKFLPFQQFGRDIADTTDAVRDPQTLEILDITPCSFGGVSVITPGTNTSNQVAVLYQGVNCTEVPVAIHADQLTPTWRVYSTGSNVFQTRAGCLIGAEHVNNSYECDIPIGAGICASYQTQTNSPRRARSVASQSIIAYTMSLGAENSVAYSNNSIAIPTNFTISVTTEILPVSMTKTSVDCTMYICGDSTECSNLLLQYGSFCTQLNRALTGIAVEQDKNTQEVFAQVKQIYKTPPIKDFGGFNFSQILPDPSKPSKRSFIEDLLFNKVTLADAGFIKQYGDCLGDIAARDLICAQKFNGLTVLPPLLTDEMIAQYTSALLAGTITSGWTFGAGAALQIPFAMQMAYRFNGCGVTQNVLYENQKLIANQFNSAIGKIQDSLSSAAPALGKLQDVVNQNAQALNTLVKQLSSNFGAISSVLNDILSRLDKVEAEVQIDRLITGRLQSLQTYVTQQLIRAAEIRASANLAATKMSECVLGQSKRVDFCGKGCHLMSFPQSAPHGVVFLHVTYVPAQEKNFTTAPAICHDGKAHFPREGVFVSNGTHWFVTQRNFYEPQIITTDNTFVSGNCDVVIGIVNNTVYDPLQPELDSGGGGSDIDPYKEFGSSYQLLNFLPLDFFPDLNALVDTATALYEEELTGREHCSPHHTAIRQALVCWDELTKLIAWMSSNITSEQVRTIIVNHVNDTWGLKVRQSLWFHLSCLTFGQHTVQEFLVSFGVWIRTPAPYRPPNAPILSTLPEHTVIC

SEQ ID NO: 11285 - protein, 1301 aa, Artificial Sequence
  SARS-CoV-2/USA/WA8-UW5/2020__EPI_ISL_413486 spike protein (1-1147)(I909C_Y1047C) WhcAg construct
MFVFLVLLPLVSSQCVNLTTRTQLPPAYTNSFTRGVYYPDKVFRSSVLHSTQDLFLPFFSNVTWFHAIHVSGTNGTKRFDNPVLPFNDGVYFASTEKSNIIRGWIFGTTLDSKTQSLLIVNNATNVVIKVCEFQFCNDPFLGVYYHKNNKSWMESEFRVYSSANNCTFEYVSQPFLMDLEGKQGNFKNLREFVFKNIDGYFKIYSKHTPINLVRDLPQGFSALEPLVDLPIGINITRFQTLLALHRSYLTPGDSSSGWTAGAAAYYVGYLQPRTFLLKYNENGTITDAVDCALDPLSETKCTLKSFTVEKGIYQTSNFRVQPTESIVRFPNITNLCPFGEVFNATRFASVYAWNRKRISNCVADYSVLYNSASFSTFKCYGVSPTKLNDLCFTNVYADSFVIRGDEVRQIAPGQTGKIADYNYKLPDDFTGCVIAWNSNNLDSKVGGNYNYLYRLFRKSNLKPFERDISTEIYQAGSTPCNGVEGFNCYFPLQSYGFQPTNGVGYQPYRVVVLSFELLHAPATVCGPKKSTNLVKNKCVNFNFNGLTGTGVLTESNKKFLPFQQFGRDIADTTDAVRDPQTLEILDITPCSFGGVSVITPGTNTSNQVAVLYQDVNCTEVPVAIHADQLTPTWRVYSTGSNVFQTRAGCLIGAEYVNNSYECDIPIGAGICASYQTQTNSPRRARSVASQSIIAYTMSLGAENSVAYSNNSIAIPTNFTISVTTEILPVSMTKTSVDCTMYICGDSTECSNLLLQYGSFCTQLNRALTGIAVEQDKNTQEVFAQVKQIYKTPPIKDFGGFNFSQILPDPSKPSKRSFIEDLLFNKVTLADAGFIKQYGDCLGDIAARDLICAQKFNGLTVLPPLLTDEMIAQYTSALLAGTITSGWTFGAGAALQIPFAMQMAYRFNGCGVTQNVLYENQKLIANQFNSAIGKIQDSLSSTASALGKLQDVVNQNAQALNTLVKQLSSNFGAISSVLNDILSRLDKVEAEVQIDRLITGRLQSLQTYVTQQLIRAAEIRASANLAATKMSECVLGQSKRVDFCGKGCHLMSFPQSAPHGVVFLHVTYVPAQEKNFTTAPAICHDGKAHFPREGVFVSNGTHWFVTQRNFYEPQIITTDNTFVSGNCDVVIGIVNNTVYDPLQPELDSGGGGSDIDPYKEFGSSYQLLNFLPLDFFPDLNALVDTATALYEEELTGREHCSPHHTAIRQALVCWDELTKLIAWMSSNITSEQVRTIIVNHVNDTWGLKVRQSLWFHLSCLTFGQHTVQEFLVSFGVWIRTPAPYRPPNAPILSTLPEHTVIC

SEQ ID NO: 11286 - protein, 1301 aa, Artificial Sequence
  SARS-CoV-2/England/20102000506/2020__EPI_ISL_415147 spike protein (1-1147)(I909C_Y1047C) WhcAg construct
MFVFLVLLPLVSSQCVNLTTRTQLPPAYTNSFTRGVYYPDKVFRSSVLHSTQDLFLPFFSNVTWFHAIHVSGTNGTKRFDNPVLPFNDGVYFASTEKSNIIRGWIFGTTLDSKTQSLLIVNNATNVVIKVCEFQFCNDPFLGVYYHKNNKSWMESEFRVYSSANNCTFEYVSQPFLMDLEGKQGNFKNLREFVFKNIDGYFKIYSKHTPINLVRDLPQGFSALEPLVDLPIGINITRFQTLLALHRSYLTPGDSSSGWTAGAAAYYVGYLQPRTFLLKYNENGTITDAVDCALDPLSETKCTLKSFTVEKGIYQTSNFRVQPTESIVRFPNITNLCPFGEVFNATRFASVYAWNRKRISNCVADYSVLYNSASFSTFKCYGVSPTKLNDLCFTNVYADSFVIRGDEVRQIAPGQTGKIADYNYKLPDDFTGCVIAWNSNNLDSKVGGNYNYLYRLFRKSNLKPFERDISTEIYQAGSTPCNGVEGFNCYFPLQSYGFQPTNGVGYQPYRVVVLSFELLHAPATVCGPKKSTNLVKNKCVNFNFNGLTGTGVLTESNKKFLPFQQFGRDIADTTDAVRDPQTLEILDITPCSFGGVSVITPGTNTSNQVAVLYQGVNCTEVPVAIHADQLTPTWRVYSTGSNVFQTRAGCLIGAEHVNNSYECDIPIGAGICASYQTQTNSPRRARSVASQSIIAYTMSLGAENSVAYSNNSIAIPTNFTISVTTEILPVSMTKTSVDCTMYICGDSTECSNLLLQYGSFCTQLNRALTGIAVEQDKNTQEVFAQVKQIYKTPPIKDFGGFNFSQILPDPSKPSKRSFIEDLLFNKVTLADAGFIKQYGYCLGDIAARDLICAQKFNGLTVLPPLLTDEMIAQYTSALLAGTITSGWTFGAGAALQIPFAMQMAYRFNGCGVTQNVLYENQKLIANQFNSAIGKIQDSLSSTASALGKLQDVVNQNAQALNTLVKQLSSNFGAISSVLNDILSRLDKVEAEVQIDRLITGRLQSLQTYVTQQLIRAAEIRASANLAATKMSECVLGQSKRVDFCGKGCHLMSFPQSAPHGVVFLHVTYVPAQEKNFTTAPAICHDGKAHFPREGVFVSNGTHWFVTQRNFYEPQIITTDNTFVSGNCDVVIGIVNNTVYDPLQPELDSGGGGSDIDPYKEFGSSYQLLNFLPLDFFPDLNALVDTATALYEEELTGREHCSPHHTAIRQALVCWDELTKLIAWMSSNITSEQVRTIIVNHVNDTWGLKVRQSLWFHLSCLTFGQHTVQEFLVSFGVWIRTPAPYRPPNAPILSTLPEHTVIC

SEQ ID NO: 11287 - protein, 1301 aa, Artificial Sequence
  SARS-CoV-2/Belgium/VAG-03013/2020__EPI_ISL_415155 spike protein (1-1147)(I909C_Y1047C) WhcAg construct
MFVFLVLLPLVSSQCVNLTTRTQLPPAYTNSFTRGVYYPDKVFRSSVLHSTQDLFLPFFSNVTWFHAIHVSGTNGTKRFDNPVLPFNDGVYFASTEKSNIIRGWIFGTTLDSKTQSLLIVNNATNVVIKVCEFQFCNDPFLGVYYHKNNKSWMESEFRVYSSANNCTFEYVSQPFLMDLEGKQGNFKNLREFVFKNIDGYFKIYSKHTPINLVRDLPQGFSALEPLVDLPIGINITRFQTLLALHRSYLTPGDSSSGWTAGAAAYYVGYLQPRTFLLKYNENGTITDAVDCALDPLSETKCTLKSFTVEKGIYQTSNFRVQPTESIVRFPNITNLCPFGEVFNATRFASVYAWNRKRISNCVADYSVLYNSASFSTFKCYGVSPTKLNDLCFTNVYADSFVIRGDEVRQIAPGQTGKIADYNYKLPDDFTGCVIAWNSNNLDSKVGGNYNYLYRLFRKSNLKPFERDISTEIYQAGSTPCNGVEGFNCYFPLQSYGFQPTNGVGYQPYRVVVLSFELLHAPATVCGPKKSTNLVKNKCVNFNFNGLTGTGVLTESNKKFLPFQQFGRDIADTTDAVRDPQTLEILDITPCSFGGVSVITPGTNTSNQVAVLYQGVNCTEVPVAIHADQLTPTWRVYSTGSNVFQTRAGCLIGAEHVNNSYECDIPIGAGICASYQTQTNSPRRARSVASQSIIAYTMSLGAENSVAYSNNSIAIPTNFTISVTTEILPVSMTKTSVDCTMYICGDSTECSNLLLQYGSFCTQLNRALTGIAVEQDKNTQEVFAQVKQIYKTPPIKDFGGFNFSQILPDPSKPSKRSFIEDLLFNKVTLADAGFIKQYGDCLGDIAARDLICAQKFNGLTVLPPLLTDEMIAQYTSALLAGTITSGWTFGAGAALQIPFAMQMAYRFNGCGVTQNVLYENQKLIANQFNSAIGKIQDSLSSTATALGKLQDVVNQNAQALNTLVKQLSSNFGAISSVLNDILSRLDKVEAEVQIDRLITGRLQSLQTYVTQQLIRAAEIRASANLAATKMSECVLGQSKRVDFCGKGCHLMSFPQSAPHGVVFLHVTYVPAQEKNFTTAPAICHDGKAHFPREGVFVSNGTHWFVTQRNFYEPQIITTDNTFVSGNCDVVIGIVNNTVYDPLQPELDSGGGGSDIDPYKEFGSSYQLLNFLPLDFFPDLNALVDTATALYEEELTGREHCSPHHTAIRQALVCWDELTKLIAWMSSNITSEQVRTIIVNHVNDTWGLKVRQSLWFHLSCLTFGQHTVQEFLVSFGVWIRTPAPYRPPNAPILSTLPEHTVIC

SEQ ID NO: 11288 - protein, 1301 aa, Artificial Sequence
  SARS-CoV-2/Belgium/BC-03016/2020__EPI_ISL_415157 spike protein (1-1147)(I909C_Y1047C) WhcAg construct
MFVFLVLLPLVSSQCVNLTTRTQLPPAYTNSFTRGVYYPDKVFRSSVLHSTQDLFLPFFSNVTWFHAIHVSGTNGTKRFDNPVLPFNDGVYFASTEKSNIIRGWIFGTTLDSKTQSLLIVNNATNVVIKVCEFQFCNDPFLGVYYHKNNKSWMESEFRVYSSANNCTFEYVSQPFLMDLEGKQGNFKNLREFVFKNIDGYFKIYSKHTPINLVRDLPQGFSALEPLVDLPIGINITRFQTLLALHRSYLTPGDSSSGWTAGAAAYYVGYLQPRTFLLKYNENGTITDAVDCALDPLSETKCTLKSFTVEKGIYQTSNFRVQPTESIVRFPNITNLCPFGEVFNATRFASVYAWNRKRISNCVADYSVLYNSASFSTFKCYGVSPTKLNDLCFTNVYADSFVIRGDEVRQIAPGQTGKIADYNYKLPDDFTGCVIAWNSNNLDSKVGGNYNYLYRLFRKSNLKPFERDISTEIYQAGSTPCNGVEGFNCYFPLQSYGFQPTNGVGYQPYRVVVLSFELLHAPATVCGPKKSTNLVKNKCVNFNFNGLTGTGVLTESNKKFLPFQQFGRDIADTTDAVRDPQTLEILDITPCSFGGVSVITPGTNTSNQVAVLYQGVNCTEVPVAIHADQLTPTWRVYSTGSNVFQTRAGCLIGAEHVNNSYECDIPIGAGICASYQTQTNSPRRARSVASQSIIAYTMSLGAENSVAYSNNSIAIPTNFTISVTTEILPVSMTKTSVDCTMYICGDSTECSNLLLQYGSFCTQLNRALTGIAVEQDKNTQEVFAQVKQIYKTPPIKDFGGFNFSQILPDPSKPSKRSFIEDLLFNKVTLADAGFIKQYGDCLGDIAARDLICAQKFNGLTVLPPLLTDEMIAQYTSALLAGTITSGWTFGAGAALQIPFAMQMAYRFNGCGVTQNVLYENQKLIANQFNSAIGKIQDSLSSTAPALGKLQDVVNQNAQALNTLVKQLSSNFGAISSVLNDILSRLDKVEAEVQIDRLITGRLQSLQTYVTQQLIRAAEIRASANLAATKMSECVLGQSKRVDFCGKGCHLMSFPQSAPHGVVFLHVTYVPAQEKNFTTAPAICHDGKAHFPREGVFVSNGTHWFVTQRNFYEPQIITTDNTFVSGNCDVVIGIVNNTVYDPLQPELDSGGGGSDIDPYKEFGSSYQLLNFLPLDFFPDLNALVDTATALYEEELTGREHCSPHHTAIRQALVCWDELTKLIAWMSSNITSEQVRTIIVNHVNDTWGLKVRQSLWFHLSCLTFGQHTVQEFLVSFGVWIRTPAPYRPPNAPILSTLPEHTVIC

SEQ ID NO: 11289 - protein, 1301 aa, Artificial Sequence
  SARS-CoV-2/Germany/BavPat3/2020__EPI_ISL_414521 spike protein (1-1147)(I909C_Y1047C) WhcAg construct
MFVFLVLLPLVSSQCVNLTTRTQLPPAYTNSFTRGVYYPDKVFRSSVLHSTQDLFLPFFSNVTWFHAIHVSGTNGTKRFDNPVLPFNDGVYFASTEKSNIIRGWIFGTTLDSKTQSLLIVNNATNVVIKVCEFQFCNDPFLGVYYHKNNKSWMESEFRVYSSANNCTFEYVSQPFLMDLEGKQGNFKNLREFVFKNIDGYFKIYSKHTPINLVRDLPQGFSALEPLVDLPIGINITRFQTLLALHRSYLTPGDSSSGWTAGAAAYYVGYLQPRTFLLKYNENGTITDAVDCALDPLSETKCTLKSFTVEKGIYQTSNFRVQPTESIVRFPNITNLCPFGEVFNATRFASVYAWNRKRISNCVADYSVLYNSASFSTFKCYGVSPTKLNDLCFTNVYADSFVIRGDEVRQIAPGQTGKIADYNYKLPDDFTGCVIAWNSNNLDSKVGGNYNYLYRLFRKSNLKPFERDISTEIYQAGSTPCNGVEGFNCYFPLQSYGFQPTNGVGYQPYRVVVLSFELLHAPATVCGPKKSTNLVKNKCVNFNFNGLTGTGVLTESNKKFLPFQQFGRDIADTTDAVRDPQTLEILDITPCSFGGVSVITPGTNTSNQVAVLYQDVNCTEVPVAIHADQLTPTWRVYSTGSNVFQTRAGCLIGAEHVNNSYECDIPIGAGICASYQTQTNSPRRARSVASQSIIAYTMSLGAENSVAYSNNSIAIPTNFTISVTTEILPVSMTKTSVDCTMYICGDSTECSNLLLQYGSFCTQLNRALTGIAVEQDKNTQQVFAQVKQIYKTPPIKDFGGFNFSQILPDPSKPSKRSFIEDLLFNKVTLADAGFIKQYGDCLGDIAARDLICAQKFNGLTVLPPLLTDEMIAQYTSALLAGTITSGWTFGAGAALQIPFAMQMAYRFNGCGVTQNVLYENQKLIANQFNSAIGKIQDSLSSTASALGKLQDVVNQNAQALNTLVKQLSSNFGAISSVLNDILSRLDKVEAEVQIDRLITGRLQSLQTYVTQQLIRAAEIRASANLAATKMSECVLGQSKRVDFCGKGCHLMSFPQSAPHGVVFLHVTYVPAQEKNFTTAPAICHDGKAHFPREGVFVSNGTHWFVTQRNFYEPQIITTDNTFVSGNCDVVIGIVNNTVYDPLQPELDSGGGGSDIDPYKEFGSSYQLLNFLPLDFFPDLNALVDTATALYEEELTGREHCSPHHTAIRQALVCWDELTKLIAWMSSNITSEQVRTIIVNHVNDTWGLKVRQSLWFHLSCLTFGQHTVQEFLVSFGVWIRTPAPYRPPNAPILSTLPEHTVIC

SEQ ID NO: 11290 - protein, 1301 aa, Artificial Sequence
  SARS-CoV-2/France/HF1805/2020__EPI_ISL_414628 spike protein (1-1147)(I909C_Y1047C) WhcAg construct
MFVFLVLLPLVSSQCVNLTTRTQLPPAYTNSFTRGVYYPDKVFRSSVLHSTQDLFLPFFSNVTWFHAIHVSGTNGTKRFDNPVLPFNDGVYFASTEKSNIIRGWIFGTTLDSKTQSLLIVNNATNVVIKVCEFQFCNDPFLGVYYHKNNKSWMESEFRVYSSANNCTFEYVSQPFLMDLEGKQGNFKNLREFVFKNIDGYFKIYSKHTPINLVRDLPQGFSALEPLVDLPIGINITRFQTLLALHRSYLTPGDSSSGWTAGAAAYYVGYLQPRTFLLKYNENGTITDAVDCALDPLSETKCTLKSFTVEKGIYQTSNFRVQPTESIVRFPNITNLCPFGEVFNATRFASVYAWNRKRISNCVADYSVLYNSASFSTFKCYGVSPTKLNDLCFTNVYADSFVIRGDEVRQIAPGQTGKIADYNYKLPDDFTGCVIAWNSNNLDSKVGGNYNYLYRLFRKSNLKPFERDISTEIYQAGSTPCNGVEGFNCYFPLQSYGFQPTNGVGYQPYRVVVLSFELLHAPATVCGPKKSTNLVKNKCVNFNFNGLTGTGVLTESNKKFLPFQQFGRDIADTTDAVRDPQTLEILDITPCSFGGVSVITPGTNTSNQVAVLYQGVNCTEVPVAIHADQLTPTWRVYSTGSNVFQTRAGCLIGAEHVNNSYECDIPIGAGICASYQTQTNSPRRARSVASQSIIAYTMSLGAENSVAYSNNSIAIPTNFTISVTTEILPVSMTKTSVDCTMYICGDSTECSNLLLQYGSFCTQLNRALTGIAVEQDKNTQEVFAQVKQIYKTPPIKDFGGFNFSQILPDPSKPSKRSFIEDLLFNKVTLADAGFIKQYGDCLGDIAARDLICAQKFNGLTVLPPLLTDEMIAQYTSALLAGTITSGWTFGAGAALQIPFAMQMAYRFNGCGVTQNVLYENQKLIANQFNSAIGKIQDSLSSTASALGKLQDVVNQNAQALNTLVKQLSSNFGAISSVLNDILSRLDKVEAEVQIDRLITGRLQSLQTYVTQQLIRAAEIRASANLAATKMSECVLGQSKRVDFCGKGCHLMSFPQSAPHGVVFLHVTYVPAQEKNFTTAPAICHDGKAHFPREGVFVSNGTHWFVTQRNFYEPQIITTDNTFVSGNCDVVIGVVNNTVYDPLQPELDSGGGGSDIDPYKEFGSSYQLLNFLPLDFFPDLNALVDTATALYEEELTGREHCSPHHTAIRQALVCWDELTKLIAWMSSNITSEQVRTIIVNHVNDTWGLKVRQSLWFHLSCLTFGQHTVQEFLVSFGVWIRTPAPYRPPNAPILSTLPEHTVIC

SEQ ID NO: 11291 - protein, 1301 aa, Artificial Sequence
  SARS-CoV-2/Netherlands/ZuidHolland_9/2020__EPI_ISL_414445 spike protein (1-1147)(I909C_Y1047C) WhcAg construct
MFVFLVLLPLVSSQCVNLTTRTQLPPAYTNSFTRGVYYPDKVFRSSVLHSTQDLFLPFFSNVTWFHAIHVSGTNGTKRFDNPVLPFNDGVYFASTEKSNIIRGWIFGTTLDSKTQSLLIVNNATNVVIKVCEFQFCNDPFLGVYYHKNNKSWMESEFRVYSSANNCTFEYVSQPFLMDLEGKQGNFKNLREFVFKNIDGYFKIYSKHTPINLVRDLPQGFSALEPLVDLPIGINITRFQTLLALHRSYLTPGDSSSGWTAGAAAYYVGYLQPRTFLLKYNENGTITDAVDCALDPLSETKCTLKSFTVEKGIYQTSNFRVQPTESIVRFPNITNLCPFGEVFNATRFASVYAWNRKRISNCVADYSVLYNSASFSTFKCYGVSPTKLNDLCFTNVYADSFVIRGDEVRQIAPGQTGKIADYNYKLPDDFTGCVIAWNSNNLDSKVGGNYNYLYRLFRKSNLKPFERDISTEIYQAGSTPCNGVEGFNCYFPLQSYGFQPTNGVGYQPYRVVVLSFELLHAPATVCGPKKSTNLVKNKCVNFNFNGLTGTGVLTESNKKFLPFQQFGRDIADTTDAVRDPQTLEILDITPCSFGGVSVITPGTNTSNQVAVLYQGVNCTEVPVAIHADQLTPTWRVYSTGSNVFQTRAGCLIGAEHVNNSYECDIPIGAGICASYQTQTNSPRRARSVASQSIIAYTMSLGAENSVAYSNNSIAIPTNFTISVTTEILPVSMTKTSVDCTMYICGDSTECSNLLLQYGSFCTQLNRALTGIAVEQDKNTQEVFAQVKQIYKTPPIKDFGGFNFSQILPDPSKPSKRSFIEDLLFNKVTLADAGFIKQYGDCLGDIAARDLICVQKFNGLTVLPPLLTDEMIAQYTSALLAGTITSGWTFGAGAALQIPFAMQMAYRFNGCGVTQNVLYENQKLIANQFNSAIGKIQDSLSSTASALGKLQDVVNQNAQALNTLVKQLSSNFGAISSVLNDILSRLDKVEAEVQIDRLITGRLQSLQTYVTQQLIRAAEIRASANLAATKMSECVLGQSKRVDFCGKGCHLMSFPQSAPHGVVFLHVTYVPAQEKNFTTAPAICHDGKAHFPREGVFVSNGTHWFVTQRNFYEPQIITTDNTFVSGNCDVVIGIVNNTVYDPLQPELDSGGGGSDIDPYKEFGSSYQLLNFLPLDFFPDLNALVDTATALYEEELTGREHCSPHHTAIRQALVCWDELTKLIAWMSSNITSEQVRTIIVNHVNDTWGLKVRQSLWFHLSCLTFGQHTVQEFLVSFGVWIRTPAPYRPPNAPILSTLPEHTVIC

SEQ ID NO: 11292 - protein, 1301 aa, Artificial Sequence
  SARS-CoV-2/Finland/FIN03032020A/2020__EPI_ISL_413602 spike protein (1-1147)(I909C_Y1047C) WhcAg construct
MFVFLVLLPLVSSQCVNLTTRTQLPPAYTNSFTRGVYYPDKVFRSSVLHSTQDLFLPFFSNVTWFHAIHVSGTNGTKRFDNPVLPFNDGVYFASTEKSNIIRGWIFGTTLDSKTQSLLIVNNATNVVIKVCEFQFCNDPFLGVYYHKNNKSWMESEFRVYSSANNCTFEYVSQPFLMDLEGKQGNFKNLREFVFKNIDGYFKIYSKHTPINLVRDLPQGFSALEPLVDLPIGINITRFQTLLALHRSYLTPGDSSSGWTAGAAAYYVGYLQPRTFLLKYNENGTITDAVDCALDPLSETKCTLKSFTVEKGIYQTSNFRVQPTESIVRFPNITNLCPFGEVFNATRFASVYAWNRKRISNCVADYSVLYNSASFSTFKCYGVSPTKLNDLCFTNVYADSFVIRGDEVRQIAPGQTGKIADYNYKLPDDFTGCVISWNSNNLDSKVGGNYNYLYRLFRKSNLKPFERDISTEIYQAGSTPCNGVEGFNCYFPLQSYGFQPTNGVGYQPYRVVVLSFELLHAPATVCGPKKSTNLVKNKCVNFNFNGLTGTGVLTESNKKFLPFQQFGRDIADTTDAVRDPQTLEILDITPCSFGGVSVITPGTNTSNQVAVLYQGVNCTEVPVAIHADQLTPTWRVYSTGSNVFQTRAGCLIGAEHVNNSYECDIPIGAGICASYQTQTNSPRRARSVASQSIIAYTMSLGAENSVAYSNNSIAIPTNFTISVTTEILPVSMTKTSVDCTMYICGDSTECSNLLLQYGSFCTQLNRALTGIAVEQDKNTQEVFAQVKQIYKTPPIKDFGGFNFSQILPDPSKPSKRSFIEDLLFNKVTLADAGFIKQYGDCLGDIAARDLICAQKFNGLTVLPPLLTDEMIAQYTSALLAGTITSGWTFGAGAALQIPFAMQMAYRFNGCGVTQNVLYENQKLIANQFNSAIGKIQDSLSSTASALGKLQDVVNQNAQALNTLVKQLSSNFGAISSVLNDILSRLDKVEAEVQIDRLITGRLQSLQTYVTQQLIRAAEIRASANLAATKMSECVLGQSKRVDFCGKGCHLMSFPQSAPHGVVFLHVTYVPAQEKNFTTAPAICHDGKAHFPREGVFVSNGTHWFVTQRNFYEPQIITTDNTFVSGNCDVVIGIVNNTVYDPLQPELDSGGGGSDIDPYKEFGSSYQLLNFLPLDFFPDLNALVDTATALYEEELTGREHCSPHHTAIRQALVCWDELTKLIAWMSSNITSEQVRTIIVNHVNDTWGLKVRQSLWFHLSCLTFGQHTVQEFLVSFGVWIRTPAPYRPPNAPILSTLPEHTVIC

SEQ ID NO: 11293 - protein, 1301 aa, Artificial Sequence
  SARS-CoV-2/France/GE1977/2020__EPI_ISL_414632 spike protein (1-1147)(I909C_Y1047C) WhcAg construct
MFVFLVLLPLVSSQCVNLTTRTQLPPAYTNSFTRGVYYPDKVFRSSVLHSTQDLFLPFFSNVTWFHAIHVSGTNGTKRFDNPVLPFNDGVYFASTEKSNIIRGWIFGTTLDSKTQSLLIVNNATNVVIKVCEFQFCNDPFLGVYYHKNNKSWMESEFRVYSSANNCTFEYVSQPFLMDLEGKQGNFKNLREFVFKNIDGYFKIYSKHTPINLVRDLPQGFSALEPLVDLPIGINITRFQTLLALHRSYLTPGDSSSGWTAGAAAYYVGYLQPRTFLLKYNENGTITDAVDCALDPLSETKCTLKSFTVEKGIYQTSNFRVQPTESIVRFPNITNLCPFGEVFNATRFASVYAWNRKRISNCVADYSVLYNSASFSTFKCYGVSPTKLNDLCFTNVYADSFVIRGDEVRQIAPGQTGKIADYNYKLPDDFTGCVIAWNSNNLDSKVGGNYNYLYRLFRKSNLKPFERDISTEIYQAGSTPCNGVEGFNCYFPLQSYGFQPTNGVGYQPYRVVVLSFELLHAPATVCGPKKSTNLVKNKCVNFNFNGLTGTGVLTESNKKFLPFQQFGRDIADTTDAVRDPQTLEILDITPCSFGGVSVITPGTNTSNQVAVLYQGVNCTEVPVAIHADQLTPTWRVYSTGSNVFQTRAGCLIGAEHVNNSYECDIPIGAGICASYQTQTNSPRRARSVASQSIIAYTMSLGAENSVAYSNNSIAIPTNFTISVTTEILPVSMTKTSVDCTMYICGDSTECSNLLLQYGSFCTQLNRALTGIAVEQDKNTQEVFAQVKQIYKTPPIKDFGGFNFSQILPDPSKPSKRSFIEDLLFNKVTLADAGFIKQYGDCLGDIAARDLICAQKFNGLTVLPPLLTDEMIAQYTSALLAGTITSGWTFGAGAALQIPFAMQMAYRFNGCGVTQNVLYENQKLIANQFNSAIGKIQDSLFSTASALGKLQDVVNQNAQALNTLVKQLSSNFGAISSVLNDILSRLDKVEAEVQIDRLITGRLQSLQTYVTQQLIRAAEIRASANLAATKMSECVLGQSKRVDFCGKGCHLMSFPQSAPHGVVFLHVTYVPAQEKNFTTAPAICHDGKAHFPREGVFVSNGTHWFVTQRNFYEPQIITTDNTFVSGNCDVVIGIVNNTVYDPLQPELDSGGGGSDIDPYKEFGSSYQLLNFLPLDFFPDLNALVDTATALYEEELTGREHCSPHHTAIRQALVCWDELTKLIAWMSSNITSEQVRTIIVNHVNDTWGLKVRQSLWFHLSCLTFGQHTVQEFLVSFGVWIRTPAPYRPPNAPILSTLPEHTVIC

SEQ ID NO: 11294 - protein, 1301 aa, Artificial Sequence
  SARS-CoV-2/Finland/FIN-313/2020__EPI_ISL_414641 spike protein (1-1147)(I909C_Y1047C) WhcAg construct
MFVFLVLLPLVSSQCVNLTTRTQLPPAYTNSFTRGVYYPDKVFRSSVLHSTQDLFLPFFSNVTWFHAIHVSGTNGTKRFDNPVLPFNDGVYFASTEKSNIIRGWIFGTTLDSKTQSLLIVNNATNVVIKVCEFQFCNDPFLGVYYHKNNKSWMESEFRVYSSANNCTFEYVSQPFLMDLEGKQGNFKNLREFVFKNIDGYFKIYSKHTPINLVRDLPQGFSALEPLVDLPIGINITRFKTLLALHRSYLTPGDSSSGWTAGAAAYYVGYLQPRTFLLKYNENGTITDAVDCALDPLSETKCTLKSFTVEKGIYQTSNFRVQPTESIVRFPNITNLCPFGEVFNATRFASVYAWNRKRISNCVADYSVLYNSASFSTFKCYGVSPTKLNDLCFTNVYADSFVIRGDEVRQIAPGQTGKIADYNYKLPDDFTGCVIAWNSNNLDSKVGGNYNYLYRLFRKSNLKPFERDISTEIYQAGSTPCNGVEGFNCYFPLQSYGFQPTNGVGYQPYRVVVLSFELLHAPATVCGPKKSTNLVKNKCVNFNFNGLTGTGVLTESNKKFLPFQQFGRDIADTTDAVRDPQTLEILDITPCSFGGVSVITPGTNTSNQVAVLYQGVNCTEVPVAIHADQLTPTWRVYSTGSNVFQTRAGCLIGAEHVNNSYECDIPIGAGICASYQTQTNSPRRARSVASQSIIAYTMSLGAENSVAYSNNSIAIPTNFTISVTTEILPVSMTKTSVDCTMYICGDSTECSNLLLQYGSFCTQLNRALTGIAVEQDKNTQEVFAQVKQIYKTPPIKDFGGFNFSQILPDPSKPSKRSFIEDLLFNKVTLADAGFIKQYGDCLGDIAARDLICAQKFNGLTVLPPLLTDEMIAQYTSALLAGTITSGWTFGAGAALQIPFAMQMAYRFNGCGVTQNVLYENQKLIANQFNSAIGKIQDSLSSTASALGKLQDVVNQNAQALNTLVKQLSSNFGAISSVLNDILSRLDKVEAEVQIDRLITGRLQSLQTYVTQQLIRAAEIRASANLAATKMSECVLGQSKRVDFCGKGCHLMSFPQSAPHGVVFLHVTYVPAQEKNFTTAPAICHDGKAHFPREGVFVSNGTHWFVTQRNFYEPQIITTDNTFVSGNCDVVIGIVNNTVYDPLQPELDSGGGGSDIDPYKEFGSSYQLLNFLPLDFFPDLNALVDTATALYEEELTGREHCSPHHTAIRQALVCWDELTKLIAWMSSNITSEQVRTIIVNHVNDTWGLKVRQSLWFHLSCLTFGQHTVQEFLVSFGVWIRTPAPYRPPNAPILSTLPEHTVIC

SEQ ID NO: 11295 - protein, 1301 aa, Artificial Sequence
  SARS-CoV-2/Netherlands/ZuidHolland_2/2020__EPI_ISL_414556 spike protein (1-1147)(I909C_Y1047C) WhcAg construct
MFVFLVLLPLVSSQCVNLTTRTQLPPAYTNSFTRGVYYPDKVFRSSVLHSTQDLFLPFFSNVTWFHAIHVSGTNGTKRFDNPVLPFNDGVYFASTEKSNIIRGWIFGTTLDSKTQSLLIVNNATNVVIKVCEFQFCNDPFLGVYYHKNNKSWMESEFRVYSSANNCTFEYVSQPFLMDLEGKQGNFKNLREFVFKNIDGYFKIYSKHTPINLVRDLPQGFSALEPLVDLPIGINITRFQTLLALHRSYLTPGDSSSGWTAGAAAYYVGYLQPRTFLLKYNENGTITDAVDCALDPLSETKCTLKSFTVEKGIYQTSNFRVQPTESIVRFPNITNLCPFGEVFNATRFASVYAWNRKRISNCVADYSVLYNSASFSTFKCYGVSPTKLNDLCFTNVYADSFVIRGDEVRQIAPGQTGKIADYNYKLPDDFTGCVIAWNSNNLDSKVGGNYNYLYRLFRKSNLKPFERDISTEIYQAGSTPCNGVEGFNCYFPLQSYGFQPTNGVGYQPYRVVVLSFELLHAPATVCGPKKSTNLVKNKCVNFNFNGLTGTGVLTESNKKFLPFQQFGRDIADTTDAVRDPQTLEILDITPCSFGGVSVITPGTNTSNQVAVLYQGVNCTEVPVAIHADQLTPTWRVYSTGSNVFQTRAGCLIGAEHVNNSYECDIPIGAGICASYQTQTNSPRRARSVASQSIIAYTMSLGAENSVAYSNNSIAIPTNFTISVTTEILPVSMTKTSVDCTMYICGDSTECSNLLLQYGSFCTQLNRALTGIALEQDKNTQEVFAQVKQIYKTPPIKDFGGFNFSQILPDPSKPSKRSFIEDLLFNKVTLADAGFIKQYGDCLGDIAARDLICAQKFNGLTVLPPLLTDEMIAQYTSALLAGTITSGWTFGAGAALQIPFAMQMAYRFNGCGVTQNVLYENQKLIANQFNSAIGKIQDSLSSTASALGKLQDVVNQNAQALNTLVKQLSSNFGAISSVLNDILSRLDKVEAEVQIDRLITGRLQSLQTYVTQQLIRAAEIRASANLAATKMSECVLGQSKRVDFCGKGCHLMSFPQSAPHGVVFLHVTYVPAQEKNFTTAPAICHDGKAHFPREGVFVSNGTHWFVTQRNFYEPQIITTDNTFVSGNCDVVIGIVNNTVYDPLQPELDSGGGGSDIDPYKEFGSSYQLLNFLPLDFFPDLNALVDTATALYEEELTGREHCSPHHTAIRQALVCWDELTKLIAWMSSNITSEQVRTIIVNHVNDTWGLKVRQSLWFHLSCLTFGQHTVQEFLVSFGVWIRTPAPYRPPNAPILSTLPEHTVIC

SEQ ID NO: 11296 - protein, 1301 aa, Artificial Sequence
  SARS-CoV-2/USA/WA-UW31/2020__EPI_ISL_414618 spike protein (1-1147)(I909C_Y1047C) WhcAg construct
MFVFLVLLPLVSSQCVNLTTRTQLPPAYTNSFTRGVYYPDKVFRSSVLHSTQDLFLPFFSNVTWFHAIHVSGTNGTKRFDNPVLPFNDGVYFASTEKSNIIRGWIFGTTLDSKTQSLLIVNNATNVVIKVCEFQFCNDPFLGVYYHKNNKSWMESEFRVYSSANNCTFEYVSQPFLMDLEGKQGNFKNLREFVFKNIDGYFKIYSKHTPINLVRDLPQGFSALEPLVDLPIGINITRFQTLLALHRSYLTPGDSSSGWTAGAAAYYVGYLQPRTFLLKYNENGTITDAVDCALDPLSETKCTLKSFTVEKGIYQTSNFRVQPTESIVRFPNITNLCPFGEVFNATRFASVYAWNRKRISNCVADYSVLYNSASFSTFKCYGVSPTKLNDLCFTNVYADSFVIRGDEVRQIAPGQTGKIADYNYKLPDDFTGCVIAWNSNNLDSKVGGNYNYLYRLFRKSNLKPFERDISTEIYQAGSTPCNGAEGFNCYFPLQSYGFQPTNGVGYQPYRVVVLSFELLHAPATVCGPKKSTNLVKNKCVNFNFNGLTGTGVLTESNKKFLPFQQFGRDIADTTDAVRDPQTLEILDITPCSFGGVSVITPGTNTSNQVAVLYQDVNCTEVPVAIHADQLTPTWRVYSTGSNVFQTRAGCLIGAEHVNNSYECDIPIGAGICASYQTQTNSPRRARSVASQSIIAYTMSLGAENSVAYSNNSIAIPTNFTISVTTEILPVSMTKTSVDCTMYICGDSTECSNLLLQYGSFCTQLNRALTGIAVEQDKNTQEVFAQVKQIYKTPPIKDFGGFNFSQILPDPSKPSKRSFIEDLLFNKVTLADAGFIKQYGDCLGDIAARDLICAQKFNGLTVLPPLLTDEMIAQYTSALLAGTITSGWTFGAGAALQIPFAMQMAYRFNGCGVTQNVLYENQKLIANQFNSAIGKIQDSLSSTASALGKLQDVVNQNAQALNTLVKQLSSNFGAISSVLNDILSRLDKVEAEVQIDRLITGRLQSLQTYVTQQLIRAAEIRASANLAATKMSECVLGQSKRVDFCGKGCHLMSFPQSAPHGVVFLHVTYVPAQEKNFTTAPAICHDGKAHFPREGVFVSNGTHWFVTQRNFYEPQIITTDNTFVSGNCDVVIGIVNNTVYDPLQPELDSGGGGSDIDPYKEFGSSYQLLNFLPLDFFPDLNALVDTATALYEEELTGREHCSPHHTAIRQALVCWDELTKLIAWMSSNITSEQVRTIIVNHVNDTWGLKVRQSLWFHLSCLTFGQHTVQEFLVSFGVWIRTPAPYRPPNAPILSTLPEHTVIC

SEQ ID NO: 11297 - protein, 1301 aa, Artificial Sequence
  SARS-CoV-2/South Korea/SNU01/2020__EPI_ISL_411929 spike protein (1-1147)(I909C_Y1047C) WhcAg construct
MFVFLVLLPLVSSQCVNLTTRTQLPPAYTNSFTRGVYYPDKVFRSSVLHSTQDLFLPFFSNVTWFHAIHVSGTNGTKRFDNPVLPFNDGVYFASTEKSNIIRGWIFGTTLDSKTQSLLIVNNATNVVIKVCEFQFCNDPFLGVYYHKNNKSWMESEFRVYSSANNCTFEYVSQPFLMDLEGKQGNFKNLREFVFKNIDGYFKIYSKHTPINLVRDLPQGFWALEPLVDLPIGINITRFQTLLALHRSYLTPGDSSSGWTAGAAAYYVGYLQPRTFLLKYNENGTITDAVDCALDPLSETKCTLKSFTVEKGIYQTSNFRVQPTESIVRFPNITNLCPFGEVFNATRFASVYAWNRKRISNCVADYSVLYNSASFSTFKCYGVSPTKLNDLCFTNVYADSFVIRGDEVRQIAPGQTGKIADYNYKLPDDFTGCVIAWNSNNLDSKVGGNYNYLYRLFRKSNLKPFERDISTEIYQAGSTPCNGVEGFNCYFPLQSYGFQPTNGVGYQPYRVVVLSFELLHAPATVCGPKKSTNLVKNKCVNFNFNGLTGTGVLTESNKKFLPFQQFGRDIADTTDAVRDPQTLEILDITPCSFGGVSVITPGTNTSNQVAVLYQDVNCTEVPVAIHADQLTPTWRVYSTGSNVFQTRAGCLIGAEHVNNSYECDIPIGAGICASYQTQTNSPRRARSVASQSIIAYTMSLGAENSVAYSNNSIAIPTNFTISVTTEILPVSMTKTSVDCTMYICGDSTECSNLLLQYGSFCTQLNRALTGIAVEQDKNTQEVFAQVKQIYKTPPIKDFGGFNFSQILPDPSKPSKRSFIEDLLFNKVTLADAGFIKQYGDCLGDIAARDLICAQKFNGLTVLPPLLTDEMIAQYTSALLAGTITSGWTFGAGAALQIPFAMQMAYRFNGCGVTQNVLYENQKLIANQFNSAIGKIQDSLSSTASALGKLQDVVNQNAQALNTLVKQLSSNFGAISSVLNDILSRLDKVEAEVQIDRLITGRLQSLQTYVTQQLIRAAEIRASANLAATKMSECVLGQSKRVDFCGKGCHLMSFPQSAPHGVVFLHVTYVPAQEKNFTTAPAICHDGKAHFPREGVFVSNGTHWFVTQRNFYEPQIITTDNTFVSGNCDVVIGIVNNTVYDPLQPELDSGGGGSDIDPYKEFGSSYQLLNFLPLDFFPDLNALVDTATALYEEELTGREHCSPHHTAIRQALVCWDELTKLIAWMSSNITSEQVRTIIVNHVNDTWGLKVRQSLWFHLSCLTFGQHTVQEFLVSFGVWIRTPAPYRPPNAPILSTLPEHTVIC

SEQ ID NO: 11298 - protein, 1301 aa, Artificial Sequence
  SARS-CoV-2/China/WF0004/2020__EPI_ISL_413694 spike protein (1-1147)(I909C_Y1047C) WhcAg construct
MFVFLVLLPLVSSQCVNLTTRTQLPPAYTNSFTRGVYYPDKVFRSSVLHSTQDLFLPFFSNVTWFHAIHVSGTNGTKRFDNPVLPFNDGVYFASTEKSNIIRGWIFGTTLDSKTQSLLIVNNATNVVIKVCEFQFCNDPFLGVYYHKNNKSWTESEFRVYSSANNCTFEYVSQPFLMDLEGKQGNFKNLREFVFKNIDGYFKIYSKHTPINLVRDLPQGFSALEPLVDLPIGINITRFQTLLALHRSYLTPGDSSSGWTAGAAAYYVGYLQPRTFLLKYNENGTITDAVDCALDPLSETKCTLKSFTVEKGIYQTSNFRVQPTESIVRFPNITNLCPFGEVFNATRFASVYAWNRKRISNCVADYSVLYNSASFSTFKCYGVSPTKLNDLCFTNVYADSFVIRGDEVRQIAPGQTGKIADYNYKLPDDFTGCVIAWNSNNLDSKVGGNYNYLYRLFRKSNLKPFERDISTEIYQAGSTPCNGVEGFNCYFPLQSYGFQPTNGVGYQPYRVVVLSFELLHAPATVCGPKKSTNLVKNKCVNFNFNGLTGTGVLTESNKKFLPFQQFGRDIADTTDAVRDPQTLEILDITPCSFGGVSVITPGTNTSNQVAVLYQDVNCTEVPVAIHADQLTPTWRVYSTGSNVFQTRAGCLIGAEHVNNSYECDIPIGAGICASYQTQTNSPRRARSVASQSIIAYTMSLGAENSVAYSNNSIAIPTNFTISVTTEILPVSMTKTSVDCTMYICGDSTECSNLLLQYGSFCTQLNRALTGIAVEQDKNTQEVFAQVKQIYKTPPIKDFGGFNFSQILPDPSKPSKRSFIEDLLFNKVTLADAGFIKQYGDCLGDIAARDLICAQKFNGLTVLPPLLTDEMIAQYTSALLAGTITSGWTFGAGAALQIPFAMQMAYRFNGCGVTQNVLYENQKLIANQFNSAIGKIQDSLSSTASALGKLQDVVNQNAQALNTLVKQLSSNFGAISSVLNDILSRLDKVEAEVQIDRLITGRLQSLQTYVTQQLIRAAEIRASANLAATKMSECVLGQSKRFDFCGKGCHLMSFPQSAPHGVVFLHVTYVPAQEKNFTTAPAICHDGKAHFPREGVFVSNGTHWFVTQRNFYEPQIITTDNTFVSGNCDVVIGIVNNTVYDPLQPELDSGGGGSDIDPYKEFGSSYQLLNFLPLDFFPDLNALVDTATALYEEELTGREHCSPHHTAIRQALVCWDELTKLIAWMSSNITSEQVRTIIVNHVNDTWGLKVRQSLWFHLSCLTFGQHTVQEFLVSFGVWIRTPAPYRPPNAPILSTLPEHTVIC

SEQ ID NO: 11299 - protein, 1301 aa, Artificial Sequence
  SARS-CoV-2/China/WF0028/2020__EPI_ISL_413791 spike protein (1-1147)(I909C_Y1047C) WhcAg construct
MFVFLVLLPLVSSQCVNLTTRTQLPPAYTNSFTRGVYYPDKVFRSSVLHSTQDLFLPFFSNVTWFHAIHVSGTNGTKRFDNPVLPFNDGVYFASTEKSNIIRGWIFGTTLDSKTQSLLIVNNATNVVIKVCEFQFCNDPFLGVYYHKNNKSWMESEFRVYSSANNCTFEYVSQPFLMDLEGKQGNFKNLREFVFKNIDGYFKIYSKHTPINLVRDLPQGFSALEPLVDLPIGINITRFQTLLALHRSYLTPGDSSSGWTAGAAAYYVGYLQPRTFLLKYNENGTITDAVDCALDPLSETKCTLKSFTVEKGIYQTSNFRVQPTESIVRFPNITNLCPFGEVFNATRFASVYAWNRKRISNCVADYSVLYNSASFSTFKCYGVSPTKLNDLCFTNVYADSFVIRGDEVRQIAPGQTGKIADYNYKLPDDFTGCVIAWNSNNLDSKVGGNYNYLYRLFRKSNLKPFERDISTEIYQAGSTPCNGVEGFNCYFPLQSYGFQPTNGVGYQPYRVVVLSFELLHAPATVCGPKKSTNLVKNKCVNFNFNGLTGTGVLTESNKKFLPFQQFGRDIADTTDAVRDPQTLEILDITPCSFGGVSVITPGTNTSNQVAVLYQDVNCTEVPVAIHADQLTPTWRVYSTGSNVFQTRAGCLIGAEHVNNSYECDIPIGAGICASYQTQTNSPRRARSVASQSIIAYTMSLGAENSVAYSNNSIAIPTNFTISVTTEILPVSMTKTSVDCTMYICGDSTECSNLLLQYGSFCTQLNRALTGIAVEQDKNTQEVFAQVKQIYKTPPIKDFGGFNFSQILPDPSKPSKRSFIEDLLFNKVTLADAGFIKQYGDCLGDIAARDLICAQKFNGLTVLPPLLTDEMIAQYTSALLAGTITSGWTFGAGAALQIPFAMQMAYRFNGCGVTQNVLYENQKLIANQFNSAIGKIQDSLSSTASALGKLQDVVNQNAQALNTLVKQLSSNFGAISSVLNDILSRLDKVEAEVQIDRLITGRLQSLQTYVTQQLIRAAEIRASANLAATKMSECVLGQSKRVDFCGKGCHLMSFPQSAPHGVVFLHVTYVPAQEKNFTTAPAICHDGKAHFPREGVFVSNGTHWFVTQRNFYEPQIITTDNTFVSGNCDVVIGIVNNTVYDPLQPELESGGGGSDIDPYKEFGSSYQLLNFLPLDFFPDLNALVDTATALYEEELTGREHCSPHHTAIRQALVCWDELTKLIAWMSSNITSEQVRTIIVNHVNDTWGLKVRQSLWFHLSCLTFGQHTVQEFLVSFGVWIRTPAPYRPPNAPILSTLPEHTVIC

SEQ ID NO: 11300 - protein, 1301 aa, Artificial Sequence
  SARS-CoV-2/2019-nCoV/USA-CruiseA-18/2020__MT159716.1 spike protein (1-1147)(I909C_Y1047C) WhcAg construct
MFVFLVLLPLVSSQCVNLTTRTQLPPAYTNSFTRGVYYPDKVFRSSVLHSTQDLFLPFFSNVTWFHAIHVSGTNGTKRFDNPVLPFNDGVYFASTEKSNIIRGWIFGTTLDSKTQSLLIVNNATNVVIKVCEFQFCNDPFLGVYYHKNNKSWMESELRVYSSANNCTFEYVSQPFLMDLEGKQGNFKNLREFVFKNIDGYFKIYSKHTPINLVRDLPQGFSALEPLVDLPIGINITRFQTLLALHRSYLTPGDSSSGWTAGAAAYYVGYLQPRTFLLKYNENGTITDAVDCALDPLSETKCTLKSFTVEKGIYQTSNFRVQPTESIVRFPNITNLCPFGEVFNATRFASVYAWNRKRISNCVADYSVLYNSASFSTFKCYGVSPTKLNDLCFTNVYADSFVIRGDEVRQIAPGQTGKIADYNYKLPDDFTGCVIAWNSNNLDSKVGGNYNYLYRLFRKSNLKPFERDISTEIYQAGSTPCNGVEGFNCYFPLQSYGFQPTNGVGYQPYRVVVLSFELLHAPATVCGPKKSTNLVKNKCVNFNFNGLTGTGVLTESNKKFLPFQQFGRDIADTTDAVRDPQTLEILDITPCSFGGVSVITPGTNTSNQVAVLYQDVNCTEVPVAIHADQLTPTWRVYSTGSNVFQTRAGCLIGAEHVNNSYECDIPIGAGICASYQTQTNSPRRARSVASQSIIAYTMSLGAENSVAYSNNSIAIPTNFTISVTTEILPVSMTKTSVDCTMYICGDSTECSNLLLQYGSFCTQLNRALTGIAVEQDKNTQEVFAQVKQIYKTPPIKDFGGFNFSQILPDPSKPSKRSFIEDLLFNKVTLADAGFIKQYGDCLGDIAARDLICAQKFNGLTVLPPLLTDEMIAQYTSALLAGTITSGWTFGAGAALQIPFAMQMAYRFNGCGVTQNVLYENQKLIANQFNSAIGKIQDSLSSTASALGKLQDVVNQNAQALNTLVKQLSSNFGAISSVLNDILSRLDKVEAEVQIDRLITGRLQSLQTYVTQQLIRAAEIRASANLAATKMSECVLGQSKRVDFCGKGCHLMSFPQSAPHGVVFLHVTYVPAQEKNFTTAPAICHDGKAHFPREGVFVSNGTHWFVTQRNFYEPQIITTDNTFVSGNCDVVIGIVNNTVYDPLQPELDSGGGGSDIDPYKEFGSSYQLLNFLPLDFFPDLNALVDTATALYEEELTGREHCSPHHTAIRQALVCWDELTKLIAWMSSNITSEQVRTIIVNHVNDTWGLKVRQSLWFHLSCLTFGQHTVQEFLVSFGVWIRTPAPYRPPNAPILSTLPEHTVIC

SEQ ID NO: 11301 - protein, 1301 aa, Artificial Sequence
  SARS-CoV-2/SARS-CoV-2/Yunnan-01/human/2020/CHN__MT049951.1 spike protein (1-1147)(I909C_Y1047C) WhcAg construct
MFVFLVLLPLVSSQCVNLTTRTQLPPANTNSFTRGVYYPDKVFRSSVLHSTQDLFLPFFSNVTWFHAIHVSGTNGTKRFDNPVLPFNDGVYFASTEKSNIIRGWIFGTTLDSKTQSLLIVNNATNVVIKVCEFQFCNDPFLGVYYHKNNKSWMESEFRVYSSANNCTFEYVSQPFLMDLEGKQGNFKNLREFVFKNIDGYFKIYSKHTPINLVRDLPQGFSALEPLVDLPIGINITRFQTLLALHRSYLTPGDSSSGWTAGAAAYYVGYLQPRTFLLKYNENGTITDAVDCALDPLSETKCTLKSFTVEKGIYQTSNFRVQPTESIVRFPNITNLCPFGEVFNATRFASVYAWNRKRISNCVADYSVLYNSASFSTFKCYGVSPTKLNDLCFTNVYADSFVIRGDEVRQIAPGQTGKIADYNYKLPDDFTGCVIAWNSNNLDSKVGGNYNYLYRLFRKSNLKPFERDISTEIYQAGSTPCNGVEGFNCYFPLQSYGFQPTNGVGYQPYRVVVLSFELLHAPATVCGPKKSTNLVKNKCVNFNFNGLTGTGVLTESNKKFLPFQQFGRDIADTTDAVRDPQTLEILDITPCSFGGVSVITPGTNTSNQVAVLYQDVNCTEVPVAIHADQLTPTWRVYSTGSNVFQTRAGCLIGAEHVNNSYECDIPIGAGICASYQTQTNSPRRARSVASQSIIAYTMSLGAENSVAYSNNSIAIPTNFTISVTTEILPVSMTKTSVDCTMYICGDSTECSNLLLQYGSFCTQLNRALTGIAVEQDKNTQEVFAQVKQIYKTPPIKDFGGFNFSQILPDPSKPSKRSFIEDLLFNKVTLADAGFIKQYGDCLGDIAARDLICAQKFNGLTVLPPLLTDEMIAQYTSALLAGTITSGWTFGAGAALQIPFAMQMAYRFNGCGVTQNVLYENQKLIANQFNSAIGKIQDSLSSTASALGKLQDVVNQNAQALNTLVKQLSSNFGAISSVLNDILSRLDKVEAEVQIDRLITGRLQSLQTYVTQQLIRAAEIRASANLAATKMSECVLGQSKRVDFCGKGCHLMSFPQSAPHGVVFLHVTYVPAQEKNFTTAPAICHDGKAHFPREGVFVSNGTHWFVTQRNFYEPQIITTDNTFVSGNCDVVIGIVNNTVYDPLQPELDSGGGGSDIDPYKEFGSSYQLLNFLPLDFFPDLNALVDTATALYEEELTGREHCSPHHTAIRQALVCWDELTKLIAWMSSNITSEQVRTIIVNHVNDTWGLKVRQSLWFHLSCLTFGQHTVQEFLVSFGVWIRTPAPYRPPNAPILSTLPEHTVIC

SEQ ID NO: 11302 - protein, 1301 aa, Artificial Sequence
  SARS-CoV-2/USA/WA-UW292/2020__EPI_ISL_418077 spike protein (1-1147)(I909C_Y1047C) WhcAg construct
MFVFLVLLPLVSSQCVNLTTRTQLPPAYTNSFTRGVYYPDKVFRSSVLHSTQDLFLPFFSNVTWFHAIHVSGTNGTKRFDNPVLPFNDGVYFASTEKSNIIRGWIFGTTLDSKTQSLLIVNNATNVVIKVCEFQFCNDPFLGVYYHKNNKSWMESEFRVYSSANNCTFEYVSQPFLMDLEGKQGNFKNLREFVFKNIDGYFKIYSKHTPINLVRDLPQGFSALEPLVDLPIGINITRFQTLLALHRSYLTPGDSSSGWTAGAAAYYVGYLQPRTFLLKYNENGTITDAVDCALDPLSETKCTLKSFTVEKGIYQTSNFRVQPTESIVRFPNITNLCPFGEVFNATRFASVYAWNRKRISNCVADYSVLYNSASFSTFKCYGVSPTKLNDLCFTNVYADSFVIRGDEVRQIAPGQTGKIADYNYKLPDDFTGCVIAWNSNNLDSKVGGNYNYLYRLFRKSNLKPFERDISTEIYQASSTPCNGVEGFNCYFPLQSYGFQPTNGVGYQPYRVVVLSFELLHAPATVCGPKKSTNLVKNKCVNFNFNGLTGTGVLTESNKKFLPFQQFGRDIADTTDAVRDPQTLEILDITPCSFGGVSVITPGTNTSNQVAVLYQDVNCTEVPVAIHADQLTPTWRVYSTGSNVFQTRAGCLIGAEHVNNSYECDIPIGAGICASYQTQTNSPRRARSVASQSIIAYTMSLGAENSVAYSNNSIAIPTNFTISVTTEILPVSMTKTSVDCTMYICGDSTECSNLLLQYGSFCTQLNRALTGIAVEQDKNTQEVFAQVKQIYKTPPIKDFGGFNFSQILPDPSKPSKRSFIEDLLFNKVTLADAGFIKQYGDCLGDIAARDLICAQKFNGLTVLPPLLTDEMIAQYTSALLAGTITSGWTFGAGAALQIPFAMQMAYRFNGCGVTQNVLYENQKLIANQFNSAIGKIQDSLSSTASALGKLQDVVNQNAQALNTLVKQLSSNFGAISSVLNDILSRLDKVEAEVQIDRLITGRLQSLQTYVTQQLIRAAEIRASANLAATKMSECVLGQSKRVDFCGKGCHLMSFPQSAPHGVVFLHVTYVPAQEKNFTTAPAICHDGKAHFPREGVFVSNGTHWFVTQRNFYEPQIITTDNTFVSGNCDVVIGIVNNTVYDPLQPELDSGGGGSDIDPYKEFGSSYQLLNFLPLDFFPDLNALVDTATALYEEELTGREHCSPHHTAIRQALVCWDELTKLIAWMSSNITSEQVRTIIVNHVNDTWGLKVRQSLWFHLSCLTFGQHTVQEFLVSFGVWIRTPAPYRPPNAPILSTLPEHTVIC

SEQ ID NO: 11303 - protein, 1301 aa, Artificial Sequence
  SARS-CoV-2/Iceland/192/2020__EPI_ISL_417819 spike protein (1-1147)(I909C_Y1047C) WhcAg construct
MFVFFVLLPLVSSQCVNLTTRTQLPPAYTNSFTRGVYYPDKVFRSSVLHSTQDLFLPFFSNVTWFHAIHVSGTNGTKRFDNPVLPFNDGVYFASTEKSNIIRGWIFGTTLDSKTQSLLIVNNATNVVIKVCEFQFCNDPFLGVYYHKNNKSWMESEFRVYSSANNCTFEYVSQPFLMDLEGKQGNFKNLREFVFKNIDGYFKIYSKHTPINLVRDLPQGFSALEPLVDLPIGINITRFQTLLALHRSYLTPGDSSSGWTAGAAAYYVGYLQPRTFLLKYNENGTITDAVDCALDPLSETKCTLKSFTVEKGIYQTSNFRVQPTESIVRFPNITNLCPFGEVFNATRFASVYAWNRKRISNCVADYSVLYNSASFSTFKCYGVSPTKLNDLCFTNVYADSFVIRGDEVRQIAPGQTGKIADYNYKLPDDFTGCVIAWNSNNLDSKVGGNYNYLYRLFRKSNLKPFERDISTEIYQAGSTPCNGVEGFNCYFPLQSYGFQPTNGVGYQPYRVVVLSFELLHAPATVCGPKKSTNLVKNKCVNFNFNGLTGTGVLTESNKKFLPFQQFGRDIADTTDAVRDPQTLEILDITPCSFGGVSVITPGTNTSNQVAVLYQGVNCTEVPVAIHADQLTPTWRVYSTGSNVFQTRAGCLIGAEHVNNSYECDIPIGAGICASYQTQTNSPRRARSVASQSIIAYTMSLGAENSVAYSNNSIAIPTNFTISVTTEILPVSMTKTSVDCTMYICGDSTECSNLLLQYGSFCTQLNRALTGIAVEQDKNTQEVFAQVKQIYKTPPIKDFGGFNFSQILPDPSKPSKRSFIEDLLFNKVTLADAGFIKQYGDCLGDIAARDLICAQKFNGLTVLPPLLTDEMIAQYTSALLAGTITSGWTFGAGAALQIPFAMQMAYRFNGCGVTQNVLYENQKLIANQFNSAIGKIQDSLSSTASALGKLQDVVNQNAQALNTLVKQLSSNFGAISSVLNDILSRLDKVEAEVQIDRLITGRLQSLQTYVTQQLIRAAEIRASANLAATKMSECVLGQSKRVDFCGKGCHLMSFPQSAPHGVVFLHVTYVPAQEKNFTTAPAICHDGKAHFPREGVFVSNGTHWFVTQRNFYEPQIITTDNTFVSGNCDVVIGIVNNTVYDPLQPELDSGGGGSDIDPYKEFGSSYQLLNFLPLDFFPDLNALVDTATALYEEELTGREHCSPHHTAIRQALVCWDELTKLIAWMSSNITSEQVRTIIVNHVNDTWGLKVRQSLWFHLSCLTFGQHTVQEFLVSFGVWIRTPAPYRPPNAPILSTLPEHTVIC

SEQ ID NO: 11304 - protein, 1301 aa, Artificial Sequence
  SARS-CoV-2/Belgium/ULG-6939/2020__EPI_ISL_417020 spike protein (1-1147)(I909C_Y1047C) WhcAg construct
MFVFLVLLPLVSSQCVNLTTRTQLPPAYTNSFTRGVYYPDKVFRSSVLHSTQDLFLPFFSNVTWFHAIHVSGTNGTKRFDNPVLPFNDGVYFASTEKSNIIRGWIFGTTLDSKTQSLLIVNNATNVVIKVCEFQFCNDPFLGVYYHKNNKSWMESEFRVYSSANNCTFEYVSQPFLMDLEGKQGNFKNLREFVFKNIDGYFKIYSKHTPINLVRDLPQGFSALEPLVDLPIGINITRFQTLLALHRSYLTPGDSSSGWTAGAAAYYVGYLQPRTFLLKYNENGTITDAVDCALDPLSETKCTLKSFTVEKGIYQTSNFRVQPTESIVRFPNITNLCPFGEVFNATRFASVYAWNRKRISNCVADYSVLYNSASFSTFKCYGVSPTKLNDLCFTNVYADSFVIRGDEVRQIAPGQTGKIADYNYKLPDDFTGCVIAWNSNNLDSKVGGNYNYLYRLFRKSNLKPFERDISTEIYQAGSTPCNGVEGFNCYFPLQSYGFQPTNGVGYQPYRVVVLSFELLHAPATVCGPKKSTNLVKNKCVNFNFNGLTGTGVLTESNKKFLPFQQFGRDIADTTDAVRDPQTLEILDITPCSFGGVSVITPGTNTSNQVAVLYQGVNCTEVPVAIHADQLTPTWRVYSTGSNVFQTRAGCLIGAEHVNNSYECDIPIGAGICASYQTQTNSPRRARSVASQSIIAYTMSLGAENSVVYSNNSIAIPTNFTISVTTEILPVSMTKTSVDCTMYICGDSTECSNLLLQYGSFCTQLNRALTGIAVEQDKNTQEVFAQVKQIYKTPPIKDFGGFNFSQILPDPSKPSKRSFIEDLLFNKVTLADAGFIKQYGDCLGDIAARDLICAQKFNGLTVLPPLLTDEMIAQYTSALLAGTITSGWTFGAGAALQIPFAMQMAYRFNGCGVTQNVLYENQKLIANQFNSAIGKIQDSLSSTASALGKLQDVVNQNAQALNTLVKQLSSNFGAISSVLNDILSRLDKVEAEVQIDRLITGRLQSLQTYVTQQLIRAAEIRASANLAATKMSECVLGQSKRVDFCGKGCHLMSFPQSAPHGVVFLHVTYVPAQEKNFTTAPAICHDGKAHFPREGVFVSNGTHWFVTQRNFYEPQIITTDNTFVSGNCDVVIGIVNNTVYDPLQPELDSGGGGSDIDPYKEFGSSYQLLNFLPLDFFPDLNALVDTATALYEEELTGREHCSPHHTAIRQALVCWDELTKLIAWMSSNITSEQVRTIIVNHVNDTWGLKVRQSLWFHLSCLTFGQHTVQEFLVSFGVWIRTPAPYRPPNAPILSTLPEHTVIC

SEQ ID NO: 11305 - protein, 1301 aa, Artificial Sequence
  SARS-CoV-2/France/HF2496/2020__EPI_ISL_418231 spike protein (1-1147)(I909C_Y1047C) WhcAg construct
MFVFLVLLPLVSSQCVNLTTRTQLPPAYTNSFTRGVYYPDKVFRSSVLHSTQDLFLPFFSNVTWFHAIHVSGTNGTKRFDNPVLPFNDGVYFASTEKSNIIRGWIFGTTLDSKTQSLLIVNNATNVVIKVCEFQFCNDPFLGVYYHKNNKSWMESEFRVYSSANNCTFEYVSQPFLMDLEGKQGNFKNLREFVFKNIDGYFKIYSKHTPINLVRDLPQGFSALEPLVDLPIGINITRFQTLLALHRSYLTPGDSSSGWTAGAAAYYVGYLQPRTFLLKYNENGTITDAVDCALDPLSETKCTLKSFTVEKGIYQTSNFRVQPTESIVRFPNITNLCPFGEVFNATRFASVYAWNRKRISNCVADYSVLYNSASFSTFKCYGVSPTKLNDLCFTNVYADSFVIRGDEVRQIAPGQTGKIADYNYKLPDDFTGCVIAWNSNNLDSKVGGNYNYLYRLFRKSNLKPFERDISTEIYQAGSTPCNGVEGFNCYFPLQSYGFQPTNGVGYQPYRVVVLSFELLHAPATVCGPKKSTNLVKNKCVNFNFNGLTGTGVLTESNKKFLPFQQFGRDIADTTDAVRDPQTLEILDITPCSFGGVSVITPGTNTSNQVAVLYQGVNCTEVPVAIHADQLTPTWRVYSTGSNVFQTRAGCLIGAEHVNNSYECDIPIGAGICASYQTQTNSPRRARSVASQSIIAYTMSLGAENSVAYSNNSIAIPTNFTISVTTEILPVSMTKTSVDCTMYICGDSTECSNLLLQYGSFCTQLNRALTGIAVEQDKNTQEVFAQVKQIYKTPPIKDFGGFNFSQILPDPSKPSKRSFIEDLLFNKVTLADAGFIKQYGDCLGDIVARDLICAQKFNGLTVLPPLLTDEMIAQYTSALLAGTITSGWTFGAGAALQIPFAMQMAYRFNGCGVTQNVLYENQKLIANQFNSAIGKIQDSLSSTASALGKLQDVVNQNAQALNTLVKQLSSNFGAISSVLNDILSRLDKVEAEVQIDRLITGRLQSLQTYVTQQLIRAAEIRASANLAATKMSECVLGQSKRVDFCGKGCHLMSFPQSAPHGVVFLHVTYVPAQEKNFTTAPAICHDGKAHFPREGVFVSNGTHWFVTQRNFYEPQIITTDNTFVSGNCDVVIGIVNNTVYDPLQPELDSGGGGSDIDPYKEFGSSYQLLNFLPLDFFPDLNALVDTATALYEEELTGREHCSPHHTAIRQALVCWDELTKLIAWMSSNITSEQVRTIIVNHVNDTWGLKVRQSLWFHLSCLTFGQHTVQEFLVSFGVWIRTPAPYRPPNAPILSTLPEHTVIC

SEQ ID NO: 11306 - protein, 1301 aa, Artificial Sequence
  SARS-CoV-2/USA/WA-UW291/2020__EPI_ISL_418076 spike protein (1-1147)(I909C_Y1047C) WhcAg construct
MFVFLVLLPLVSSQCVNLTTRTQLPPAYTNSFTRGVYYPDKVFRSSVLHSTQDLFLPFFSNVTWFHAIHVSGTNGTKRFDNPVLPFNDGVYFASTEKSNIIRGWIFGTTLDSKTQSLLIVNNATNVVIKVCEFQFCNDPFLGVYYHKNNKSWMESEFRVYSSANNCTFEYVSQPFLMDLEGKQGNFKNLREFVFKNIDGYFKIYSKHTPINLVRDLPQGFSALEPLVDLPIGINITRFQTLLALHRSYLTPGDSSSGWTAGAAAYYVGYLQPRTFLLKYNENGTITDAVDCALDPLSETKCTLKSFTVEKGIYQTSNFRVQPTESIVRFPNITNLCPFGEVFNATRFASVYAWNRKRISNCVADYSVLYNSASFSTFKCYGVSPTKLNDLCFTNVYADSFVIRGDEVRQIAPGQTGKIADYNYKLPDDFTGCVIAWNSNNLDSKVGGNYNYLYRLFRKSNLKPFERDISTEIYQAGSTPCNGVEGFNCYFPLQSYGFQPTNGVGYQPYRVVVLSFELLHAPATVCGPKKSTNLVKNKCVNFNFNGLTGTGVLTESNKKFLPFQQFGRDIADTTDAVRDPQTLEILDITPCSFGGVSVITPGTNTSNQVAVLYQGVNCTEVPVAIHADQLTPTWRVYSTGSNVFQTRAGCLIGAEHVNNSYECDIPIGAGICASYQTQTNSPRRARSVASQSIIAYTMSLGAENSVAYSNNSIAIPTNFTISVTTEILPVSMTKTSVDCTMYICGDSTECSNLLLQYGSFCTQLNRALTGIAVEQDKNTQEVFAQVKQIYKTPPIKDFGGFNFSQILPDPSKPSKRSFIEDLLFNKVTLADAGFIKQYGDCLGDIAARDLICAQKFNGLTVLPPLLTDEMIAQYTSALLAGTITSGWTFGAGAALQIPFAMQMAYRFNGCGVTQNVLYENQKLIANQFNSAIGKIQYSLSSTASALGKLQDVVNQNAQALNTLVKQLSSNFGAISSVLNDILSRLDKVEAEVQIDRLITGRLQSLQTYVTQQLIRAAEIRASANLAATKMSECVLGQSKRVDFCGKGCHLMSFPQSAPHGVVFLHVTYVPAQEKNFTTAPAICHDGKAHFPREGVFVSNGTHWFVTQRNFYEPQIITTDNTFVSGNCDVVIGIVNNTVYDPLQPELDSGGGGSDIDPYKEFGSSYQLLNFLPLDFFPDLNALVDTATALYEEELTGREHCSPHHTAIRQALVCWDELTKLIAWMSSNITSEQVRTIIVNHVNDTWGLKVRQSLWFHLSCLTFGQHTVQEFLVSFGVWIRTPAPYRPPNAPILSTLPEHTVIC

SEQ ID NO: 11307 - protein, 1301 aa, Artificial Sequence; identical to SEQ ID NO: 11270
  SARS-CoV-2/Portugal/PT0034/2020__EPI_ISL_418019 spike protein (1-1147)(I909C_Y1047C) WhcAg construct

SEQ ID NO: 11308 - protein, 1301 aa, Artificial Sequence; identical to SEQ ID NO: 11262
  SARS-CoV-2/Iceland/202/2020__EPI_ISL_417750 spike protein (1-1147)(I909C_Y1047C) WhcAg construct

SEQ ID NO: 11309 - protein, 1301 aa, Artificial Sequence
  SARS-CoV-2/USA/WA-UW261/2020__EPI_ISL_418046 spike protein (1-1147)(I909C_Y1047C) WhcAg construct
MFVFLVLLPLVSSQCVNLTTRTQLPPAYTNSFTRGVYYPDKVFRSSVLHSTQDLFLPFFSNVTWFHAIHVSGTNGTKRFDNPVLPFNDGVYFASTEKSNIIRGWIFGTTLDSKTQSLLIVNNATNVVIKVCEFQFCNDPFLGVYYHKNNKSWMESEFRVYSSANNCTFEYVSQPFLMDLEGKQGNFKNLREFVFKNIDGYFKIYSKHTPINLVRDLPQGFSALEPLVDLPIGINITRFQTLLALHRSYLTPGDSSSGWTAGAAAYYVGYLQPRTFLLKYNENGTITDAVDCALDPLSETKCTLKSFTVEKGIYQTSNFRVQPTESIVRFPNITNLCPFGEVFNATRFTSVYAWNRKRISNCVADYSVLYNSASFSTFKCYGVSPTKLNDLCFTNVYADSFVIRGDEVRQIAPGQTGKIADYNYKLPDDFTGCVIAWNSNNLDSKVGGNYNYLYRLFRKSNLKPFERDISTEIYQAGSTPCNGVEGFNCYFPLQSYGFQPTNGVGYQPYRVVVLSFELLHAPATVCGPKKSTNLVKNKCVNFNFNGLTGTGVLTESNKKFLPFQQFGRDIADTTDAVRDPQTLEILDITPCSFGGVSVITPGTNTSNQVAVLYQDVNCTEVPVAIHADQLTPTWRVYSTGSNVFQTRAGCLIGAEHVNNSYECDIPIGAGICASYQTQTNSPRRARSVASQSIIAYTMSLGAENSVAYSNNSIAIPTNFTISVTTEILPVSMTKTSVDCTMYICGDSTECSNLLLQYGSFCTQLNRALTGIAVEQDKNTQEVFAQVKQIYKTPPIKDFGGFNFSQILPDPSKPSKRSFIEDLLFNKVTLADAGFIKQYGDCLGDIAARDLICAQKFNGLTVLPPLLTDEMIAQYTSALLAGTITSGWTFGAGAALQIPFAMQMAYRFNGCGVTQNVLYENQKLIANQFNSAIGKIQDSLSSTASALGKLQDVVNQNAQALNTLVKQLSSNFGAISSVLNDILSRLDKVEAEVQIDRLITGRLQSLQTYVTQQLIRAAEIRASANLAATKMSECVLGQSKRVDFCGKGCHLMSFPQSAPHGVVFLHVTYVPAQEKNFTTAPAICHDGKAHFPREGVFVSNGTHWFVTQRNFYEPQIITTDNTFVSGNCDVVIGIVNNTVYDPLQPELDSGGGGSDIDPYKEFGSSYQLLNFLPLDFFPDLNALVDTATALYEEELTGREHCSPHHTAIRQALVCWDELTKLIAWMSSNITSEQVRTIIVNHVNDTWGLKVRQSLWFHLSCLTFGQHTVQEFLVSFGVWIRTPAPYRPPNAPILSTLPEHTVIC

SEQ ID NO: 11310 - protein, 1301 aa, Artificial Sequence
  SARS-CoV-2/Portugal/PT0035/2020__EPI_ISL_418020 spike protein (1-1147)(I909C_Y1047C) WhcAg construct
MFVFLVLLPLVSSQCVNLTTRTQLPPAYTNSFTRGVYYPDKVFRSSVLHSTQDLFLPFFSNVTWFHAIHVSGTNGTKRFDNPVLPFNDGVYFASTEKSNIIRGWIFGTTLDSKTQSLLIVNNATNVVIKVCEFQFCNDPFLGVYYHKNNKSWMESEFRVYSSANNCTFEYVSQPFLMDLEGKQGNFKNLREFVFKNIDGYFKIYSKHTPINLVRDLPQGFSALEPLVDLPIGINITRFQTLLALHRSYLTPGDSSSGWTAGAAAYYVGYLQPRTFLLKYNENGTITDAVDCALDPLSETKCTLKSFTVEKGIYQTSNFRVQPTESIVRFPNITNLCPFGEVFNATRFASVYAWNRKRISNCVADYSVLYNSASFSTFKCYGVSPTKLNDLCFTNVYADSFVIRGDEVRQIAPGQTGKIADYNYKLPDDFTGCVIAWNSNNLDSKVGGNYNYLYRLFRKSNLKPFERDISTEIYQAGSTPCNGVEGFNCYFPLQSYGFQPTNGVGYQPYRVVVLSFELLHAPATVCGPKKSTNLVKNKCVNFNFNGLTGTGVLTESNKKFLPFQQFGRDIADTTDAVRDPQTLEILDITPCSFGGVSVITPGTNTSNQVAVLYQDVNCTEVPVAIHADQLTPTWRVYSTGSNVFQTRAGCLIGAEHVNNSYECDIPIGAGICASYQTQTNSPRRARSVASQSIIAYTMSLGAENSVAYSNNSIAIPTNFTISVTTEILPVSMTKTSVDCTMYICGDSTECSNLLLQYGSFCTQLNRALTGIAVEQDKNTQEVFAQVKQIYKTPPIKDFGGFNFSQILPDPSKPSKRSFIEDLLFNKVTLADAGFIKQYGDCLGDISARDLICAQKFNGLTVLPPLLTDEMIAQYTSALLAGTITSGWTFGAGAALQIPFAMQMAYRFNGCGVTQNVLYENQKLIANQFNSAIGKIQDSLSSTASALGKLQDVVNQNAQALNTLVKQLSSNFGAISSVLNDILSRLDKVEAEVQIDRLITGRLQSLQTYVTQQLIRAAEIRASANLAATKMSECVLGQSKRVDFCGKGCHLMSFPQSAPHGVVFLHVTYVPAQEKNFTTAPAICHDGKAHFPREGVFVSNGTHWFVTQRNFYEPQIITTDNTFVSGNCDVVIGIVNNTVYDPLQPELDSGGGGSDIDPYKEFGSSYQLLNFLPLDFFPDLNALVDTATALYEEELTGREHCSPHHTAIRQALVCWDELTKLIAWMSSNITSEQVRTIIVNHVNDTWGLKVRQSLWFHLSCLTFGQHTVQEFLVSFGVWIRTPAPYRPPNAPILSTLPEHTVIC

SEQ ID NO: 11311 - protein, 1301 aa, Artificial Sequence
  SARS-CoV-2/USA/NY-NYUMC7/2020__EPI_ISL_418192 spike protein (1-1147)(I909C_Y1047C) WhcAg construct
MFVFLVLLPLVSSQCVNLTTRTQLPPAYTNSFTRGVYYPDKVFRSSVLHSTQDLFLPFFSNVTWFHAIHVSGTNGTKRFDNPVLPFNDGVYFASTEKSNIIRGWIFGTTLDSKTQSLLIVNNATNVVIKVCEFQFCNDPFLGVYHHKNNKSWMESEFRVYSSANNCTFEYVSQPFLMDLEGKQGNFKNLREFVFKNIDGYFKIYSKHTPINLVRDLPQGFSALEPLVDLPIGINITRFQTLLALHRSYLTPGDSSSGWTAGAAAYYVGYLQPRTFLLKYNENGTITDAVDCALDPLSETKCTLKSFTVEKGIYQTSNFRVQPTESIVRFPNITNLCPFGEVFNATRFASVYAWNRKRISNCVADYSVLYNSASFSTFKCYGVSPTKLNDLCFTNVYADSFVIRGDEVRQIAPGQTGKIADYNYKLPDDFTGCVIAWNSNNLDSKVGGNYNYLYRLFRKSNLKPFERDISTEIYQAGSTPCNGVEGFNCYFPLQSYGFQPTNGVGYQPYRVVVLSFELLHAPATVCGPKKSTNLVKNKCVNFNFNGLTGTGVLTESNKKFLPFQQFGRDIADTTDAVRDPQTLEILDITPCSFGGVSVITPGTNTSNQVAVLYQGVNCTEVPVAIHADQLTPTWRVYSTGSNVFQTRAGCLIGAEHVNNSYECDIPIGAGICASYQTQTNSPRRARSVASQSIIAYTMSLGAENSVAYSNNSIAIPTNFTISVTTEILPVSMTKTSVDCTMYICGDSTECSNLLLQYGSFCTQLNRALTGIAVEQDKNTQEVFAQVKQIYKTPPIKDFGGFNFSQILPDPSKPSKRSFIEDLLFNKVTLADAGFIKQYGDCLGDIAARDLICAQKFNGLTVLPPLLTDEMIAQYTSALLAGTITSGWTFGAGAALQIPFAMQMAYRFNGCGVTQNVLYENQKLIANQFNSAIGKIQDSLSSTASALGKLQDVVNQNAQALNTLVKQLSSNFGAISSVLNDILSRLDKVEAEVQIDRLITGRLQSLQTYVTQQLIRAAEIRASANLAATKMSECVLGQSKRVDFCGKGCHLMSFPQSAPHGVVFLHVTYVPAQEKNFTTAPAICHDGKAHFPREGVFVSNGTHWFVTQRNFYEPQIITTDNTFVSGNCDVVIGIVNNTVYDPLQPELDSGGGGSDIDPYKEFGSSYQLLNFLPLDFFPDLNALVDTATALYEEELTGREHCSPHHTAIRQALVCWDELTKLIAWMSSNITSEQVRTIIVNHVNDTWGLKVRQSLWFHLSCLTFGQHTVQEFLVSFGVWIRTPAPYRPPNAPILSTLPEHTVIC

SEQ ID NO: 11312 - protein, 1301 aa, Artificial Sequence
  SARS-CoV-2/Iceland/189/2020__EPI_ISL_417709 spike protein (1-1147)(I909C_Y1047C) WhcAg construct
MFVFLVLLPLVSSQCVNLTTRTQLPPAYTNSFTRGVYYPDKVFRSSVLHSTQDLFLPFFSNVTWFHAIHVSGTNGTKRFDNPVLPFNDGVYFASTEKSNIIRGWIFGTTLDSKTQSLLIVNNATNVVIKVCEFQFCNDPFLGVYYHKNNKSWMESEFRVYSSANNCTFEYVSQPFLMDLEGKQGNFKNLREFVFKNIDGYFKIYSKHTPINLVRDLPQGFSALEPLVDLPIGINITRFQTLLALHRSYLTPGDSSSGWTAGAAAYYVGYLQPRTFLLKYNENGTITDAVDCALDPLSETKCTLKSFTVEKGIYQTSNFRVQPTESIVRFPNITNLCPFGEVFNATRFASVYAWNRKRISNCVADYSVLYNSASFSTFKCYGVSPTKLNDLCFTNVYADSFVIRGDEVRQIAPGQTGKIADYNYKLPDDFTGCVIAWNSNNLDSKVGGNYNYLYRLFRKSNLKPFERDISTEIYQAGSTPCNGVEGFNCYFPLQSYGFQPTNGVGYQPYRVVVLSFELLHAPATVCGPKKSTNLVKNKCVNFNFNGLTGTGVLTESNKKFLPFQQFGRDIADTTDAVRDPQTLEILDITPCSFGGVSVITPGTNTSNQVAVLYQGVNCTEVPVAIHADQLTPTWRVYSTGSNVFQTRAGCLIGAEHVNNSYECDIPIGAGICASYQTQTNSPRRARSVASQSIIAYTMSLGAENSVAYSNNSIAIPTNFTISVTTEILPVSMTKTSVDCTMYICGDSTECSNLLLQYGSFCTQLNRALTGIAVEQDKNTQEVFAQVKQIYKTPPIKDFGGFNFSQILPDPSKPSKRSFIEDLLFNKVTLADAGFTKQYGDCLGDIAARDLICAQKFNGLTVLPPLLTDEMIAQYTSALLAGTITSGWTFGAGAALQIPFAMQMAYRFNGCGVTQNVLYENQKLIANQFNSAIGKIQDSLSSTASALGKLQDVVNQNAQALNTLVKQLSSNFGAISSVLNDILSRLDKVEAEVQIDRLITGRLQSLQTYVTQQLIRAAEIRASANLAATKMSECVLGQSKRVDFCGKGCHLMSFPQSAPHGVVFLHVTYVPAQEKNFTTAPAICHDGKAHFPREGVFVSNGTHWFVTQRNFYEPQIITTDNTFVSGNCDVVIGIVNNTVYDPLQPELDSGGGGSDIDPYKEFGSSYQLLNFLPLDFFPDLNALVDTATALYEEELTGREHCSPHHTAIRQALVCWDELTKLIAWMSSNITSEQVRTIIVNHVNDTWGLKVRQSLWFHLSCLTFGQHTVQEFLVSFGVWIRTPAPYRPPNAPILSTLPEHTVIC

SEQ ID NO: 11313 - protein, 1301 aa, Artificial Sequence
  SARS-CoV-2/Australia/NSW56/2020__EPI_ISL_417408 spike protein (1-1147)(I909C_Y1047C) WhcAg construct
MFVFLVLLPLVSSQCVNLTTRTQLPPAYTNSFTRGVYYPDKVFRSSVLHSTQDLFLPFFSNVTWFHAIHVSGTNGTKRFDNPVLPFNDGVYFASTEKSNIIRGWIFGTTLDSKTQSLLIVNNATNVVIKVCEFQFCNDPFLGVYYHKNNKSWMESEFRVYSSANNCTFEYVSQPFLMDLEGKQGNFKNLREFVFKNIDGYFKIYSKHTPINLVRDLPQGFSALEPLVDLPIGINITRFQTLLALHRSYLTPGDSSSGWTAGAAAYYVGYLQPRTFLLKYNENGTITDAVDCALDPLSETKCTLKSFTVEKGIYQTSNFRVQPTESIVRFPNITNLCPFGEVFNATRFASVYAWNRKRISNCVADYSVLYNSASFSTFKCYGVSPTKLNDLCFTNVYADSFVIRGDEVRQIAPGQTGKIADYNYKLPDDFTGCVIAWNSNNLDSKVGGNYNYLYRLFRKSNLKPFERDISTEIYQAGSTPCNGVEGFNCYFPLQSYGFQPTNGVGYQPYRVVVLSFELLHAPATVCGPKKSTNLVKNKCVNFNFNGLTGTGVLTESNKKFLPFQQFGRDIADTTDAVRDPQTLEILDITPCSFGGVSVITPGTNTSNQVAVLYQDVNCTEVPVAIHADQLTPTWRVYSTGSNVFQTRAGCLIGAEHVNNSYECDIPIGAGICASYQTQTNSPRRARSVASQSIIAYTMSLGAENSVAYSNNSIAIPTNFTISVTTEILPVSMTKTSVDCTMYICGDSTECSNLLLQYGSFCTQLNRALTGIAVEQDKNTQEVFAQVKQIYKTPPIKDFGGFNFSQILPDSSKPSKRSFIEDLLFNKVTLADAGFIKQYGDCLGDIAARDLICAQKFNGLTVLPPLLTDEMIAQYTSALLAGTITSGWTFGAGAALQIPFAMQMAYRFNGCGVTQNVLYENQKLIANQFNSAIGKIQDSLSSTASALGKLQDVVNQNAQALNTLVKQLSSNFGAISSVLNDILSRLDKVEAEVQIDRLITGRLQSLQTYVTQQLIRAAEIRASANLAATKMSECVLGQSKRVDFCGKGCHLMSFPQSAPHGVVFLHVTYVPAQEKNFTTAPAICHDGKAHFPREGVFVSNGTHWFVTQRNFYEPQIITTDNTFVSGNCDVVIGIVNNTVYDPLQPELDSGGGGSDIDPYKEFGSSYQLLNFLPLDFFPDLNALVDTATALYEEELTGREHCSPHHTAIRQALVCWDELTKLIAWMSSNITSEQVRTIIVNHVNDTWGLKVRQSLWFHLSCLTFGQHTVQEFLVSFGVWIRTPAPYRPPNAPILSTLPEHTVIC

SEQ ID NO: 11314 - protein, 1301 aa, Artificial Sequence
  SARS-CoV-2/Iceland/280/2020__EPI_ISL_417608 spike protein (1-1147)(I909C_Y1047C) WhcAg construct
MFVFLVLLPLVSSQCVNLTTRTQLPPAYTNSFTRGVYYPDKVFRSSVLHSTQDLFLPFFSNVTWFHAIHVSGTNGTKRFDNPVLPFNDGVYFASTEKSNIIRGWIFGTTLDSKTQSLLIVNNATNVVIKVCEFQFCNDPFLGVYYHKNNKSWMESEFRVYSSANNCTFEYVSQPFLMDLEGKQGNFKNLREFVFKNIDGYFKIYSKHTPINLVRDLPQGFSALEPLVDLPIGINITRFQTLLALHRSYLTPGDSSSGWTAGAAAYYVGYLQPRTFLLKYNENGTITDAVDCALDPLSETKCTLKSFTVEKGIYQTSNFRVQPTESIVRFPNITNLCPFGEVFNATRFASVYAWNRKRISNCVADYSVLYNSASFSTFKCYGVSPTKLNDLCFTNVYADSFVIRGDEVRQIAPGQTGKIADYNYKLPDDFTGCVIAWNSNNLDSKVGGNYNYLYRLFRKSNLKPFERDISTEIYQAGSTPCNGVEGFNCYFPLQSYGFQPTNGVGYQPYRVVVLSFELLHAPATVCGPKKSTNLVKNKCVNFNFNGLTGTGVLTESNKKFLPFQQFGRDIADTTDAVRDPQTLEILDITPCSFGGVSVITPGTNTSNQVAVLYQGVNCTEVPVAIHADQLTPTWRVYSTGSNVFQTRAGCLIGAEHVNNSYECDIPIGAGICASYHTQTNSPRRARSVASQSIIAYTMSLGAENSVAYSNNSIAIPTNFTISVTTEILPVSMTKTSVDCTMYICGDSTECSNLLLQYGSFCTQLNRALTGIAVEQDKNTQEVFAQVKQIYKTPPIKDFGGFNFSQILPDPSKPSKRSFIEDLLFNKVTLADAGFIKQYGDCLGDIAARDLICAQKFNGLTVLPPLLTDEMIAQYTSALLAGTITSGWTFGAGAALQIPFAMQMAYRFNGCGVTQNVLYENQKLIANQFNSAIGKIQDSLSSTASALGKLQDVVNQNAQALNTLVKQLSSNFGAISSVLNDILSRLDKVEAEVQIDRLITGRLQSLQTYVTQQLIRAAEIRASANLAATKMSECVLGQSKRVDFCGKGCHLMSFPQSAPHGVVFLHVTYVPAQEKNFTTAPAICHDGKAHFPREGVFVSNGTHWFVTQRNFYEPQIITTDNTFVSGNCDVVIGIVNNTVYDPLQPELDSGGGGSDIDPYKEFGSSYQLLNFLPLDFFPDLNALVDTATALYEEELTGREHCSPHHTAIRQALVCWDELTKLIAWMSSNITSEQVRTIIVNHVNDTWGLKVRQSLWFHLSCLTFGQHTVQEFLVSFGVWIRTPAPYRPPNAPILSTLPEHTVIC

SEQ ID NO: 11315 - protein, 1301 aa, Artificial Sequence; identical to SEQ ID NO: 11270
  SARS-CoV-2/Iceland/247/2020__EPI_ISL_417575 spike protein (1-1147)(I909C_Y1047C) WhcAg construct

SEQ ID NO: 11316 - protein, 1301 aa, Artificial Sequence
  SARS-CoV-2/Iceland/238/2020__EPI_ISL_417566 spike protein (1-1147)(I909C_Y1047C) WhcAg construct
MFVFLVLLPLVSSQCVNLTTRTQLPPAYTNSFTRGVYYPDKVFRSSVLHSTQDLFLPFFSNVTWFHAIHVSGTNGTKRFDNPVLPFNDGVYFASTEKSNIIRGWIFGTTLDSKTQSLLIVNNATNVVIKVCEFQFCNDPFLGVYYHKNNKSWMESEFRVYSSANNCTFEYVSQPFLMDLEGKQGNFKNLREFVFKNIDGYFKIYSKHTPINLVRDLPQGFSALEPLVDLPIGINITRFQTLLALHRSYLTPGDSSSGWTAGAAAYYVGYLQPRTFLLKYNENGTITDAVDCALDPLSETKCTLKSFTVEKGIYQTSNFRVQPTESIVRFPNITNLCPFGEVFNATRFASVYAWNRKRISNCVADYSVLYNSASFSTFKCYGVSPTKLNDLCFTNVYADSFVIRGDEVRQIAPGQTGKIADYNYKLPDDFTGCVIAWNSNNLDSKVGGNYNYLYRLFRKSNLKPFERDISTEIYQAGSTPCNGVEGFNCYFPLQSYGFQPTNGVGYQPYRVVVLSFELLHAPATVCGPKKSTNLVKNKCVNFNFNGLTGTGVLTESNKKFLPFQQFGRDIADTTDAVRDPQTLEILDITPCSFGGVSVITPGTNTSNQVAVLYQGVNCTEVPVAIHADQLTPTWRVYSTGSNVFQTRAGCLIGAEHVNNSYECDIPIGAGICASYQTQTNSPRRARSVASQSIIAYTMSLGAENSVAYSNNSIAIPTNFTISVTTEILPVSMTKTSVDCTMYICGDSTECSNLLLQYGSFCTQLNRALTGIAVEQDKNTQEVFAQVKQIYKTPPIKDFGGFNFSQILPDPSKPSKRSFIEDLLFNKVTLADVGFIKQYGDCLGDIAARDLICAQKFNGLTVLPPLLTDEMIAQYTSALLAGTITSGWTFGAGAALQIPFAMQMAYRFNGCGVTQNVLYENQKLIANQFNSAIGKIQDSLSSTASALGKLQDVVNQNAQALNTLVKQLSSNFGAISSVLNDILSRLDKVEAEVQIDRLITGRLQSLQTYVTQQLIRAAEIRASANLAATKMSECVLGQSKRVDFCGKGCHLMSFPQSAPHGVVFLHVTYVPAQEKNFTTAPAICHDGKAHFPREGVFVSNGTHWFVTQRNFYEPQIITTDNTFVSGNCDVVIGIVNNTVYDPLQPELDSGGGGSDIDPYKEFGSSYQLLNFLPLDFFPDLNALVDTATALYEEELTGREHCSPHHTAIRQALVCWDELTKLIAWMSSNITSEQVRTIIVNHVNDTWGLKVRQSLWFHLSCLTFGQHTVQEFLVSFGVWIRTPAPYRPPNAPILSTLPEHTVIC

SEQ ID NO: 11317 - protein, 1301 aa, Artificial Sequence
  SARS-CoV-2/Greece/16/2020__EPI_ISL_418265 spike protein (1-1147)(I909C_Y1047C) WhcAg construct
MFVFLVLLPLVSSQCVNLTTRTQLPPAYTNSFTRGVYYPDKVFRSSVLHSTQDLFLPFFSNVTWFHAIHVSGTNGTKRFDNPVLPFNDGVYFASTEKSNIIRGWIFGTTLDSKTQSLLIVNNATNVVIKVCEFQFCNDPFLGVYYHKNNKSWMESEFRVYSSANNCTFEYVSQPFLMDLEGKQGNFKNLREFVFKNVDGYFKIYSKHTPINLVRDLPQGFSALEPLVDLPIGINITRFQTLLALHRSYLTPGDSSSGWTAGAAAYYVGYLQPRTFLLKYNENGTITDAVDCALDPLSETKCTLKSFTVEKGIYQTSNFRVQPTESIVRFPNITNLCPFGEVFNATRFASVYAWNRKRISNCVADYSVLYNSASFSTFKCYGVSPTKLNDLCFTNVYADSFVIRGDEVRQIAPGQTGKIADYNYKLPDDFTGCVIAWNSNNLDSKVGGNYNYLYRLFRKSNLKPFERDISTEIYQAGSTPCNGVEGFNCYFPLQSYGFQPTNGVGYQPYRVVVLSFELLHAPATVCGPKKSTNLVKNKCVNFNFNGLTGTGVLTESNKKFLPFQQFGRDIADTTDAVRDPQTLEILDITPCSFGGVSVITPGTNTSNQVAVLYQDVNCTEVPVAIHADQLTPTWRVYSTGSNVFQTRAGCLIGAEHVNNSYECDIPIGAGICASYQTQTNSPRRARSVASQSIIAYTMSLGAENSVAYSNNSIAIPTNFTISVTTEILPVSMTKTSVDCTMYICGDSTECSNLLLQYGSFCTQLNRALTGIAVEQDKNTQEVFAQVKQIYKTPPIKDFGGFNFSQILPDPSKPSKRSFIEDLLFNKVTLADAGFIKQYGDCLGDIAARDLICAQKFNGLTVLPPLLTDEMIAQYTSALLAGTITSGWTFGAGAALQIPFAMQMAYRFNGCGVTQNVLYENQKLIANQFNSAIGKIQDSLSSTASALGKLQDVVNQNAQALNTLVKQLSSNFGAISSVLNDILSRLDKVEAEVQIDRLITGRLQSLQTYVTQQLIRAAEIRASANLAATKMSECVLGQSKRVDFCGKGCHLMSFPQSAPHGVVFLHVTYVPAQEKNFTTAPAICHDGKAHFPREGVFVSNGTHWFVTQRNFYEPQIITTDNTFVSGNCDVVIGIVNNTVYDPLQPELDSGGGGSDIDPYKEFGSSYQLLNFLPLDFFPDLNALVDTATALYEEELTGREHCSPHHTAIRQALVCWDELTKLIAWMSSNITSEQVRTIIVNHVNDTWGLKVRQSLWFHLSCLTFGQHTVQEFLVSFGVWIRTPAPYRPPNAPILSTLPEHTVIC

SEQ ID NO: 11318 - protein, 1301 aa, Artificial Sequence
  SARS-CoV-2/Iceland/319/2020__EPI_ISL_417648 spike protein (1-1147)(I909C_Y1047C) WhcAg construct
MFVFLVLLPLVSSQCVNLTTRTQLPPAYTNSFTRGVYYPDKVFRSSVLHSTQDLFLPFFSNVTWFHAIHVSGTNGTKRFDNPVLPFNDGVYFASTEKSNIIRGWIFGTTLDSKTQSLLIVNNATNVVIKVCEFQFCNDPFLGVYYHKNNKSWMESEFRVYSSANNCTFEYVSQPFLIDLEGKQGNFKNLREFVFKNIDGYFKIYSKHTPINLVRDLPQGFSALEPLVDLPIGINITRFQTLLALHRSYLTPGDSSSGWTAGAAAYYVGYLQPRTFLLKYNENGTITDAVDCALDPLSETKCTLKSFTVEKGIYQTSNFRVQPTESIVRFPNITNLCPFGEVFNATRFASVYAWNRKRISNCVADYSVLYNSASFSTFKCYGVSPTKLNDLCFTNVYADSFVIRGDEVRQIAPGQTGKIADYNYKLPDDFTGCVIAWNSNNLDSKVGGNYNYLYRLFRKSNLKPFERDISTEIYQAGSTPCNGVEGFNCYFPLQSYGFQPTNGVGYQPYRVVVLSFELLHAPATVCGPKKSTNLVKNKCVNFNFNGLTGTGVLTESNKKFLPFQQFGRDIADTTDAVRDPQTLEILDITPCSFGGVSVITPGTNTSNQVAVLYQGVNCTEVPVAIHADQLTPTWRVYSTGSNVFQTRAGCLIGAEHVNNSYECDIPIGAGICASYQTQTNSPRRARSVASQSIIAYTMSLGAENSVAYSNNSIAIPTNFTISVTTEILPVSMTKTSVDCTMYICGDSTECSNLLLQYGSFCTQLNRALTGIAVEQDKNTQEVFAQVKQIYKTPPIKDFGGFNFSQILPDPSKPSKRSFIEDLLFNKVTLADAGFIKQYGDCLGDIAARDLICAQKFNGLTVLPPLLTDEMIAQYTSALLAGTITSGWTFGAGAALQIPFAMQMAYRFNGCGVTQNVLYENQKLIANQFNSAIGKIQDSLSSTASALGKLQDVVNQNAQALNTLVKQLSSNFGAISSVLNDILSRLDKVEAEVQIDRLITGRLQSLQTYVTQQLIRAAEIRASANLAATKMSECVLGQSKRVDFCGKGCHLMSFPQSAPHGVVFLHVTYVPAQEKNFTTAPAICHDGKAHFPREGVFVSNGTHWFVTQRNFYEPQIITTDNTFVSGNCDVVIGIVNNTVYDPLQPELDSGGGGSDIDPYKEFGSSYQLLNFLPLDFFPDLNALVDTATALYEEELTGREHCSPHHTAIRQALVCWDELTKLIAWMSSNITSEQVRTIIVNHVNDTWGLKVRQSLWFHLSCLTFGQHTVQEFLVSFGVWIRTPAPYRPPNAPILSTLPEHTVIC

SEQ ID NO: 11319 - protein, 1301 aa, Artificial Sequence
  SARS-CoV-2/Congo/94/2020__EPI_ISL_417947 spike protein (1-1147)(I909C_Y1047C) WhcAg construct
MFVFLVLLPLVSSQCVNLTTRTQLPPAYTNSFTRGVYYPDKVFRSSVLHSTQDLFLPFFSNVTWFHAIHVSGTNGTKRFDNPVLPFNDGVYFASTEKSNIIRGWIFGTTLDSKTQSLLIVNNATNVVIKVCEFQFCNDPFLGVYYHKNNKSWMESEFRVYSSANNCTFEYVSQPFLMDLEGKQGNFKNLREFVFKNIDGYFKIYSKHTPINLVRDLPQGFSALEPLVDLPIGINITRFQTLLALHRSYLTPGDSSSGWTAGAAAYYVGYLQPRTFLLKYNENGTITDAVDCALDPLSETKCTLKSFTVEKGIYQTSNFRVQPTESIVRFPNITNLCPFGEVFNATRFASVYAWNRKRISNCVADYSVLYNSASFSTFKCYGVSPTKLNDLCFTNVYADSFVIRGDEVRQIAPGQTGKIADYNYKLPDDFTGCVIAWNSNNLDSKVGGNYNYLYRLFRKSNLKPFERDISTEIYQAGSTPCNGVEGFNCYFPLQSYGFQPTNGVGYQPYRVVVLSFELLHAPATVCGPKKSTNLVKNKCVNFNFNGLTGTGVLTESNKKFLPFQQFGRDIADTTDAVRDPQTLEILDITPCSFGGVSVITPGTNTSNQVAVLYQGVNCTEVPVAIHADQLTPTWRVYSTGSNVFQTRAGCLIGAEHVNNSYECDIPIGAGICASYQTQTNSPRRARSVASQSIIAYTMSLGAENSVAYSNNSIAIPTNFTISVTTEILPVSMTKTSVDCTMYICGDSTECSNLLLQYGSFCTQLNRALTGIAVEQDKNTQEVFAQVKQIYKTPPIKDFGGFNFSQILPDPSKPSKRSFIEDILFNKVTLADAGFIKQYGDCLGDIAARDLICAQKFNGLTVLPPLLTDEMIAQYTSALLAGTITSGWTFGAGAALQIPFAMQMAYRFNGCGVTQNVLYENQKLIANQFNSAIGKIQDSLSSTASALGKLQDVVNQNAQALNTLVKQLSSNFGAISSVLNDILSRLDKVEAEVQIDRLITGRLQSLQTYVTQQLIRAAEIRASANLAATKMSECVLGQSKRVDFCGKGCHLMSFPQSAPHGVVFLHVTYVPAQEKNFTTAPAICHDGKAHFPREGVFVSNGTHWFVTQRNFYEPQIITTDNTFVSGNCDVVIGIVNNTVYDPLQPELDSGGGGSDIDPYKEFGSSYQLLNFLPLDFFPDLNALVDTATALYEEELTGREHCSPHHTAIRQALVCWDELTKLIAWMSSNITSEQVRTIIVNHVNDTWGLKVRQSLWFHLSCLTFGQHTVQEFLVSFGVWIRTPAPYRPPNAPILSTLPEHTVIC

SEQ ID NO: 11320 - protein, 1301 aa, Artificial Sequence
  SARS-CoV-2/Congo/158/2020__EPI_ISL_417950 spike protein (1-1147)(I909C_Y1047C) WhcAg construct
MFVFLVLLPLVSSQCVNLTTRTQLPPAYTNSFTRGVYYPDKVFRSSVLHSTQDLFLPFFSNVTWFHAIHVSGTNGTKRFDNPVLPFNDGVYFASTEKSNIIRGWIFGTTLDSKTQSLLIVNNATNVVIKVCEFQFCNDPFLGVYYHKNNKSWMESEFRVYSSANNCTFEYVSQPFLMDLEGKQGNFKNLREFVFKNIDGYFKIYSKHTPINLVRDLPQGFSALEPLVDLPIGINITRFQTLLALHRSYLTPGDSSSGWTAGAAAYYVGYLQPRTFLLKYNENGTITDAVDCALDPLSETKCTLKSFTVEKGIYQTSNFRVQPTESIVRFPNITNLCPFGEVFNATRFASVYAWNRKRISNCVADYSVLYNSASFSTFKCYGVSPTKLNDLCFTNVYADSFVIRGDEVRQIAPGQTGKIADYNYKLPDDFTGCVIAWNSNNLDSKVGGNYNYLYRLFRKSNLKPFERDISTEIYQAGSTPCNGVEGFNCYFPLQSYGFQPTNGVGYQPYRVVVLSFELLHAPATVCGPKKSTNLVKNKCVNFNFNGLTGTGVLTESNKKFLPFQQFGRDIADTTDAVRDPQTLEILDITPCSFGGVSVITPGTNTSNQVAVLYQDVNCTEVPVAIHADQLTPTWRVYSTGSNVFQTRAGCLIGAEHVNNSYECDIPIGAGICASYQTQTNSPRRARSVASQSIIAYTMSLGAENSVAYSNNSIAIPTNFTISVTTEILPVSMTKTSVDCTMYICGDSTECSNLLLQYGSFCTQLNRALTGIAVEQDKNTQEVFAQVKQIYKTPPIKDFGGFNFSQILPDPSKPSKRSFIEDLLFNKVTLADAGFIKQYGDCLGDIAARDLICAQKFNGLTVLPPLLTDEMIAQYTSALLAGTITSGWTFGAGAALQIPFAMQMAYRFNGCGVTQNVLYENQKLIANQFNSAIGKIQDSLSSTASALGKLQDVVNQNAQALNTLVKQLSSNFGAISSVLNDILSRLDKVEAEVQIDRLITGRLQSLQTYVTQQLIRAAEIRASANLAATKMSECVLGQSKRVDFCGKGCHLMSFPQSAPHGVVFLHVTYVPAQEKNFTTAPAICHDGKAHFPREGVFVSNGTHWFVTQRNFYEPQIITTDNTFLSGNCDVVIGIVNNTVYDPLQPELDSGGGGSDIDPYKEFGSSYQLLNFLPLDFFPDLNALVDTATALYEEELTGREHCSPHHTAIRQALVCWDELTKLIAWMSSNITSEQVRTIIVNHVNDTWGLKVRQSLWFHLSCLTFGQHTVQEFLVSFGVWIRTPAPYRPPNAPILSTLPEHTVIC

SEQ ID NO: 11321 - protein, 1301 aa, Artificial Sequence
  SARS-CoV-2/USA/UT-00034/2020__EPI_ISL_417977 spike protein (1-1147)(I909C_Y1047C) WhcAg construct
MFVFLVLLPLVSSQCVNLTTRTQLPPAYTNSFTRGVYYPDKVFRSSVLHSTQDLFLPFFSNVTWFHAIHVSGTNGTKRFDNPVLPFNDGVYFASTEKSNIIRGWIFGTTLDSKTQSLLIVNNATNVVIKVCEFQFCNDPFLGVYYYKNNKSWMESEFRVYSSANNCTFEYVSQPFLMDLEGKQGNFKNLREFVFKNIDGYFKIYSKHTPINLVRDLPQGFSALEPLVDLPIGINITRFQTLLALHRSYLTPGDSSSGWTAGAAAYYVGYLQPRTFLLKYNENGTITDAVDCALDPLSETKCTLKSFTVEKGIYQTSNFRVQPTESIVRFPNITNLCPFGEVFNATRFASVYAWNRKRISNCVADYSVLYNSASFSTFKCYGVSPTKLNDLCFTNVYADSFVIRGDEVRQIAPGQTGKIADYNYKLPDDFTGCVIAWNSNNLDSKVGGNYNYLYRLFRKSNLKPFERDISTEIYQAGSTPCNGVEGFNCYFPLQSYGFQPTNGVGYQPYRVVVLSFELLHAPATVCGPKKSTNLVKNKCVNFNFNGLTGTGVLTESNKKFLPFQQFGRDIADTTDAVRDPQTLEILDITPCSFGGVSVITPGTNTSNQVAVLYQGVNCTEVPVAIHADQLTPTWRVYSTGSNVFQTRAGCLIGAEHVNNSYECDIPIGAGICASYQTQTNSPRRARSVASQSIIAYTMSLGAENSVAYSNNSIAIPTNFTISVTTEILPVSMTKTSVDCTMYICGDSTECSNLLLQYGSFCTQLNRALTGIAVEQDKNTQEVFAQVKQIYKTPPIKDFGGFNFSQILPDPSKPSKRSFIEDLLFNKVTLADAGFIKQYGDCLGDIAARDLICAQKFNGLTVLPPLLTDEMIAQYTSALLAGTITSGWTFGAGAALQIPFAMQMAYRFNGCGVTQNVLYENQKLIANQFNSAIGKIQDSLSSTASALGKLQDVVNQNAQALNTLVKQLSSNFGAISSVLNDILSRLDKVEAEVQIDRLITGRLQSLQTYVTQQLIRAAEIRASANLAATKMSECVLGQSKRVDFCGKGCHLMSFPQSAPHGVVFLHVTYVPAQEKNFTTAPAICHDGKAHFPREGVFVSNGTHWFVTQRNFYEPQIITTDNTFVSGNCDVVIGIVNNTVYDPLQPELDSGGGGSDIDPYKEFGSSYQLLNFLPLDFFPDLNALVDTATALYEEELTGREHCSPHHTAIRQALVCWDELTKLIAWMSSNITSEQVRTIIVNHVNDTWGLKVRQSLWFHLSCLTFGQHTVQEFLVSFGVWIRTPAPYRPPNAPILSTLPEHTVIC

SEQ ID NO: 11322 - protein, 1301 aa, Artificial Sequence
  SARS-CoV-2/USA/UT-00033/2020__EPI_ISL_417976 spike protein (1-1147)(I909C_Y1047C) WhcAg construct
MFVFLVLLPLVSSQCVNLTTRTQLPPAYTNSFTRGVYYPDKVFRSSVLHSTQDLFLPFFSNVTWFHAIHVSGTNGTKRFDNPVLPFNDGVYFASTEKSNIIRGWIFGTTLDSKTQSLLIVNNATNVVIKVCEFQFCNDPFLGVYYHKNNKSWMESEFRVYSSANNCTFEYVSQPFLMDLEGKQGNFKNLREFVFKNIDGYFKIYSKHTPINLVRDLPQGFSALEPLVDLPIGINITRFQTLLALHRSYLTPGDSSSGLTAGAAAYYVGYLQPRTFLLKYNENGTITDAVDCALDPLSETKCTLKSFTVEKGIYQTSNFRVQPTESIVRFPNITNLCPFGEVFNATRFASVYAWNRKRISNCVADYSVLYNSASFSTFKCYGVSPTKLNDLCFTNVYADSFVIRGDEVRQIAPGQTGKIADYNYKLPDDFTGCVIAWNSNNLDSKVGGNYNYLYRLFRKSNLKPFERDISTEIYQAGSTPCNGVEGFNCYFPLQSYGFQPTNGVGYQPYRVVVLSFELLHAPATVCGPKKSTNLVKNKCVNFNFNGLTGTGVLTESNKKFLPFQQFGRDIADTTDAVRDPQTLEILDITPCSFGGVSVITPGTNTSNQVAVLYQGVNCTEVPVAIHADQLTPTWRVYSTGSNVFQTRAGCLIGAEHVNNSYECDIPIGAGICASYQTQTNSPRRARSVASQSIIAYTMSLGAENSVAYSNNSIAIPTNFTISVTTEILPVSMTKTSVDCTMYICGDSTECSNLLLQYGSFCTQLNRALTGIAVEQDKNTQEVFAQVKQIYKTPPIKDFGGFNFSQILPDPSKPSKRSFIEDLLFNKVTLADAGFIKQYGDCLGDIAARDLICAQKFNGLTVLPPLLTDEMIAQYTSALLAGTITSGWTFGAGAALQIPFAMQMAYRFNGCGVTQNVLYENQKLIANQFNSAIGKIQDSLSSTASALGKLQDVVNQNAQALNTLVKQLSSNFGAISSVLNDILSRLDKVEAEVQIDRLITGRLQSLQTYVTQQLIRAAEIRASANLAATKMSECVLGQSKRVDFCGKGCHLMSFPQSAPHGVVFLHVTYVPAQEKNFTTAPAICHDGKAHFPREGVFVSNGTHWFVTQRNFYEPQIITTDNTFVSGNCDVVIGIVNNTVYDPLQPELDSGGGGSDIDPYKEFGSSYQLLNFLPLDFFPDLNALVDTATALYEEELTGREHCSPHHTAIRQALVCWDELTKLIAWMSSNITSEQVRTIIVNHVNDTWGLKVRQSLWFHLSCLTFGQHTVQEFLVSFGVWIRTPAPYRPPNAPILSTLPEHTVIC

SEQ ID NO: 11323 - protein, 1301 aa, Artificial Sequence
  SARS-CoV-2/USA/WI-13/2020__EPI_ISL_417516 spike protein (1-1147)(I909C_Y1047C) WhcAg construct
MFVFLVLLPLVSSQCVNLTTRTQLPPAYTNSFTRGVYYPDKVFRSSVLHSTQDLFLPFFSNVTWFHAIHVSGTNGTKRFDNPVLPFNDGVYFASTEKSNIIRGWIFGTTLDSKTQSLLIVNNATNVVIKVCEFQFCNDPFLGVYYHKNNKSWMESEFRVYSSANNCTFEYVSQPFLMDLEGKQGNFKNLREFVFKNIDGYFKIYSKHTPINLVRDLPQGFSALEPLVDLPIGINITRFQTLLALHRSYLTPGDSSSGWTAGAAAYYVGYLQPRTFLLKYNENGTITDAVDCALDPLSETKCTLKSFTVEKGIYQTSNFRVLPTESIVRFPNITNLCPFGEVFNATRFASVYAWNRKRISNCVADYSVLYNSASFSTFKCYGVSPTKLNDLCFTNVYADSFVIRGDEVRQIAPGQTGKIADYNYKLPDDFTGCVIAWNSNNLDSKVGGNYNYLYRLFRKSNLKPFERDISTEIYQAGSTPCNGVEGFNCYFPLQSYGFQPTNGVGYQPYRVVVLSFELLHAPATVCGPKKSTNLVKNKCVNFNFNGLTGTGVLTESNKKFLPFQQFGRDIADTTDAVRDPQTLEILDITPCSFGGVSVITPGTNTSNQVAVLYQGVNCTEVPVAIHADQLTPTWRVYSTGSNVFQTRAGCLIGAEHVNNSYECDIPIGAGICASYQTQTNSPRRARSVASQSIIAYTMSLGAENSVAYSNNSIAIPTNFTISVTTEILPVSMTKTSVDCTMYICGDSTECSNLLLQYGSFCTQLNRALTGIAVEQDKNTQEVFAQVKQIYKTPPIKDFGGFNFSQILPDPSKPSKRSFIEDLLFNKVTLADAGFIKQYGDCLGDIAARDLICAQKFNGLTVLPPLLTDEMIAQYTSALLAGTITSGWTFGAGAALQIPFAMQMAYRFNGCGVTQNVLYENQKLIANQFNSAIGKIQDSLSSTASALGKLQDVVNQNAQALNTLVKQLSSNFGAISSVLNDILSRLDKVEAEVQIDRLITGRLQSLQTYVTQQLIRAAEIRASANLAATKMSECVLGQSKRVDFCGKGCHLMSFPQSAPHGVVFLHVTYVPAQEKNFTTAPAICHDGKAHFPREGVFVSNGTHWFVTQRNFYEPQIITTDNTFVSGNCDVVIGIVNNTVYDPLQPELDSGGGGSDIDPYKEFGSSYQLLNFLPLDFFPDLNALVDTATALYEEELTGREHCSPHHTAIRQALVCWDELTKLIAWMSSNITSEQVRTIIVNHVNDTWGLKVRQSLWFHLSCLTFGQHTVQEFLVSFGVWIRTPAPYRPPNAPILSTLPEHTVIC

SEQ ID NO: 11324 - protein, 1300 aa, Artificial Sequence
  SARS-CoV-2/India/1-27/2020__EPI_ISL_413522 spike protein (1-1146)(I908C_Y1046C) WhcAg construct
MFVFLVLLPLVSSQCVNLTTRTQLPPAYTNSFTRGVYYPDKVFRSSVLHSTQDLFLPFFSNVTWFHAIHVSGTNGTKRFDNPVLPFNDGVYFASTEKSNIIRGWIFGTTLDSKTQSLLIVNNATNVVIKVCEFQFCNDPFLGVYHKNNKSWMESEFRVYSSANNCTFEYVSQPFLMDLEGKQGNFKNLREFVFKNIDGYFKIYSKHTPINLVRDLPQGFSALEPLVDLPIGINITRFQTLLALHRSYLTPGDSSSGWTAGAAAYYVGYLQPRTFLLKYNENGTITDAVDCALDPLSETKCTLKSFTVEKGIYQTSNFRVQPTESIVRFPNITNLCPFGEVFNATRFASVYAWNRKRISNCVADYSVLYNSASFSTFKCYGVSPTKLNDLCFTNVYADSFVIRGDEVIQIAPGQTGKIADYNYKLPDDFTGCVIAWNSNNLDSKVGGNYNYLYRLFRKSNLKPFERDISTEIYQAGSTPCNGVEGFNCYFPLQSYGFQPTNGVGYQPYRVVVLSFELLHAPATVCGPKKSTNLVKNKCVNFNFNGLTGTGVLTESNKKFLPFQQFGRDIADTTDAVRDPQTLEILDITPCSFGGVSVITPGTNTSNQVAVLYQDVNCTEVPVAIHADQLTPTWRVYSTGSNVFQTRAGCLIGAEHVNNSYECDIPIGAGICASYQTQTNSPRRARSVASQSIIAYTMSLGAENSVAYSNNSIAIPTNFTISVTTEILPVSMTKTSVDCTMYICGDSTECSNLLLQYGSFCTQLNRALTGIAVEQDKNTQEVFAQVKQIYKTPPIKDFGGFNFSQILPDPSKPSKRSFIEDLLFNKVTLADAGFIKQYGDCLGDIAARDLICAQKFNGLTVLPPLLTDEMIAQYTSALLAGTITSGWTFGAGAALQIPFAMQMAYRFNGCGVTQNVLYENQKLIANQFNSAIGKIQDSLSSTASALGKLQDVVNQNAQALNTLVKQLSSNFGAISSVLNDILSRLDKVEAEVQIDRLITGRLQSLQTYVTQQLIRAAEIRASANLAATKMSECVLGQSKRVDFCGKGCHLMSFPQSAPHGVVFLHVTYVPAQEKNFTTAPAICHDGKAHFPREGVFVSNGTHWFVTQRNFYEPQIITTDNTFVSGNCDVVIGIVNNTVYDPLQPELDSGGGGSDIDPYKEFGSSYQLLNFLPLDFFPDLNALVDTATALYEEELTGREHCSPHHTAIRQALVCWDELTKLIAWMSSNITSEQVRTIIVNHVNDTWGLKVRQSLWFHLSCLTFGQHTVQEFLVSFGVWIRTPAPYRPPNAPILSTLPEHTVIC

SEQ ID NO: 11325 - protein, 1295 aa, Artificial Sequence
  SARS-CoV-2/pangolin/Guangxi/P4L/2017__EPI_ISL_410538 spike protein (1-1141)(I903C_Y1041C) WhcAg construct
MFVFLFVLPLVSSQCVNLTTRTGIPPGYTNSSTRGVYYPDKVFRSSILHLTQDLFLPFFSNVTWFNTINYQGGFKKFDNPVLPFNDGVYFASTEKSNIIRGWIFGTTLDARTQSLLIVNNATNVVIKVCEFQFCTDPFLGVYYHNNNKTWVENEFRVYSSANNCTFEYISQPFLMDLEGKQGNFKNLREFVFKNVDGYFKIYSKHTPIDLVRDLPRGFAALEPLVDLPIGINITRFQTLLALHRSYLTPGNLESGWTTGAAAYYVGYLQQRTFLLSYNQNGTITDAVDCSLDPLSETKCTLKSLTVEKGIYQTSNFRVQPTISIVRFPNITNLCPFGEVFNASKFASVYAWNRKRISNCVADYSVLYNSTSFSTFKCYGVSPTKLNDLCFTNVYADSFVVKGDEVRQIAPGQTGVIADYNYKLPDDFTGCVIAWNSVKQDALTGGNYGYLYRLFRKSKLKPFERDISTEIYQAGSTPCNGQVGLNCYYPLERYGFHPTTGVNYQPFRVVVLSFELLNGPATVCGPKLSTTLVKDKCVNFNFNGLTGTGVLTTSKKQFLPFQQFGRDISDTTDAVRDPQTLEILDITPCSFGGVSVITPGTNTSNQVAVLYQDVNCTEVPMAIHAEQLTPAWRVYSAGANVFQTRAGCLVGAEHVNNSYECDIPVGAGICASYHSMSSLRSVNQRSIIAYTMSLGAENSVAYSNNSIAIPTNFTISVTTEILPVSMTKTSVDCTMYICGDSIECSNLLLQYGSFCTQLNRALTGIAVEQDKNTQEVFAQVKQIYKTPPIKDFGGFNFSQILPDPSKPSKRSFIEDLLFNKVTLADAGFIKQYGDCLGDIAARDLICAQKFNGLTVLPPLLTDEMIAQYTSALLAGTITSGWTFGAGAALQIPFAMQMAYRFNGCGVTQNVLYENQKLIANQFNSAIGKIQDSLSSTASALGKLQDVVNQNAQALNTLVKQLSSNFGAISSVLNDILSRLDKVEAEVQIDRLITGRLQSLQTYVTQQLIRAAEIRASANLAATKMSECVLGQSKRVDFCGKGCHLMSFPQSAPHGVVFLHVTYVPAQEKNFTTAPAICHEGKAHFPREGVFVSNGTHWFITQRNFYEPQIITTDNTFVSGSCDVVIGIVNNTVYDPLQPELDSGGGGSDIDPYKEFGSSYQLLNFLPLDFFPDLNALVDTATALYEEELTGREHCSPHHTAIRQALVCWDELTKLIAWMSSNITSEQVRTIIVNHVNDTWGLKVRQSLWFHLSCLTFGQHTVQEFLVSFGVWIRTPAPYRPPNAPILSTLPEHTVIC

SEQ ID NO: 11326 - protein, 1295 aa, Artificial Sequence
  SARS-CoV-2/pangolin/Guangxi/P5L/2017__EPI_ISL_410540 spike protein (1-1141)(I903C_Y1041C) WhcAg construct
MFVFLFVLPLVSSQCVNLTTRTGIPPGYTNSSTRGVYYPDKVFRSSILHLTQDLFLPFFSNVTWFNTINYQGGFKKFDNPVLPFNDGVYFASTEKSNIIRGWIFGTTLDARTQSLLIVNNATNVVIKVCEFQFCTDPFLGVYYHNNNKTWVENEFRVYSSANNCTFEYISQPFLMDLEGKQGNFKNLREFVFKNVDGYFKIYSKHTPIDLVRDLPRGFAALEPLVDLPIGINITRFQTLLALHRSYLTPGKLESGWTTGAAAYYVGYLQQRTFLLSYNQNGTITDAVDCSLDPLSETKCTLKSLTVEKGIYQTSNFRVQPTISIVRFPNITNLCPFGEVFNASKFASVYAWNRKRISNCVADYSVLYNSTSFSTFKCYGVSPTKLNDLCFTNVYADSFVVKGDEVRQIAPGQTGVIADYNYKLPDDFTGCVIAWNSVKQDALTGGNYGYLYRLFRKSKLKPFERDISTEIYQAGSTPCNGQVGLNCYYPLERYGFHPTTGVNYQPFRVVVLSFELLNGPATVCGPKLSTTLVKDKCVNFNFNGLTGTGVLTTSKKQFLPFQQFGRDISDTTDAVRDPQTLEILDITPCSFGGVSVITPGTNTSNQVAVLYQDVNCTEVPMAIHAEQLTPAWRVYSAGANVFQTRAGCLVGAEHVNNSYECDIPVGAGICASYHSMSSFRSVNQRSIIAYTMSLGAENSVAYSNNSIAIPTNFTISVTTEILPVSMTKTSVDCTMYICGDSIECSNLLLQYGSFCTQLNRALTGIAVEQDKNTQEVFAQVKQIYKTPPIKDFGGFNFSQILPDPSKPSKRSFIEDLLFNKVTLADAGFIKQYGDCLGDIAARDLICAQKFNGLTVLPPLLTDEMIAQYTSALLAGTITSGWTFGAGAALQIPFAMQMAYRFNGCGVTQNVLYENQKLIANQFNSAIGKIQDSLSSTASALGKLQDVVNQNAQALNTLVKQLSSNFGAISSVLNDILSRLDKVEAEVQIDRLITGRLQSLQTYVTQQLIRAAEIRASANLAATKMSECVLGQSKRVDFCGKGCHLMSFPQSAPHGVVFLHVTYVPAQEKNFTTAPAICHEGKAHFPREGVFVSNGTHWFITQRNFYEPQIITTDNTFVSGSCDVVIGIVNNTVYDPLQPELDSGGGGSDIDPYKEFGSSYQLLNFLPLDFFPDLNALVDTATALYEEELTGREHCSPHHTAIRQALVCWDELTKLIAWMSSNITSEQVRTIIVNHVNDTWGLKVRQSLWFHLSCLTFGQHTVQEFLVSFGVWIRTPAPYRPPNAPILSTLPEHTVIC

SEQ ID NO: 11327 - protein, 1295 aa, Artificial Sequence
  SARS-CoV-2/pangolin/Guangxi/P5E/2017__EPI_ISL_410541 spike protein (1-1141)(I903C_Y1041C) WhcAg construct
MFVFLFVLPLVSSQCVNLTTRTGIPPGYTNSSTRGVYYPDKVFRSSILHLTQDLFLPFFSNVTWFNTITYQGGSKKFDNPVLPFNDGVYFASTEKSNIIRGWIFGTTLDARTQSLLIVNNATNVVIKVCEFQFCTDPFLGVYYHNNNKTWVENEFRVYSSANNCTFEYISQPFLMDLEGKQGNFKNLREFVFKNVDGYFKIYSKHTPIDLVRDLPRGFAALEPLVDLPIGINITRFQTLLALHRSYLTPGKLESGWTTGAAAYYVGYLQQRTFLLSYNQNGTITDAVDCSLDPLSETKCTLKSLTVEKGIYQTSNFRVQPTISIVRFPNITNLCPFGEVFNASKFASVYAWNRKRISNCVADYSVLYNSTSFSTFKCYGVSPTKLNDLCFTNVYADSFVVKGDEVRQIAPGQTGVIADYNYKLPDDFTGCVIAWNSVKQDALTGDNYGYLYRLFRKSKLKPFERDISTEIYQAGSTPCNGQVGLNCYYPLERYGFHPTTGVNYQPFRVVVLSFELLNGPATVCGPKLSTTLVKDKCVNFNFNGLTGTGVLTTSKKQFLPFQQFGRDISDTTDAVRDPQTLEILDITPCSFGGVSVITPGTNTSNQVAVLYQDVNCTEVPMAIHAEQLTPAWRVYSAGANVFQTRAGCLVGAEHVNNSYECDIPVGAGICASYHSMSSFRSVNQRSIIAYTMSLGAENSVAYSNNSIAIPTNFTISVTTEILPVSMTKTSVDCTMYICGDSIECSNLLLQYGSFCTQLNRALTGIAVEQDKNTQEVFAQVKQIYKTPPIKDFGGFNFSQILPDPSKPSKRSFIEDLLFNKVTLADAGFIKQYGDCLGDIAARDLICAQKFNGLTVLPPLLTDEMIAQYTSALLAGTITSGWTFGAGAALQIPFAMQMAYRFNGCGVTQNVLYENQKLIANQFNSAIGKIQDSLSSTASALGKLQDVVNQNAQALNTLVKQLSSNFGAISSVLNDILSRLDKVEAEVQIDRLITGRLQSLQTYVTQQLIRAAEIRASANLAATKMSECVLGQSKRVDFCGKGCHLMSFPQSAPHGVVFLHVTYVPAQEKNFTTAPAICHEGKAHFPREGVFVSNGTHWFITQRNFYEPQIITTDNTFVSGSCDVVIGIVNNTVYDPLQPELDSGGGGSDIDPYKEFGSSYQLLNFLPLDFFPDLNALVDTATALYEEELTGREHCSPHHTAIRQALVCWDELTKLIAWMSSNITSEQVRTIIVNHVNDTWGLKVRQSLWFHLSCLTFGQHTVQEFLVSFGVWIRTPAPYRPPNAPILSTLPEHTVIC

SEQ ID NO: 11328 - protein, 1293 aa, Artificial Sequence
  SARS-CoV-2/pangolin/Guangxi/P1E/2017__EPI_ISL_410539 spike protein (1-1139)(I901C_Y1039C) WhcAg construct
MFVFLFVLPLVSSQCVNLTTRTGIQPGYTNSSTRGVYYPDKVFRSSILHLTQDLFLPFFSNVTWFNTINYQGGFKKFDNPVLPFNDGVYFASTEKSNIIRGWIFGTTLDARTQSLLIVNNATNVVIKVCEFQFCTDPFLGVYYHNNNKTWVENEFRVYSSANNCTFEYISQPFLMDLEGKQGNFKNLREFVFKNVDGYFKIYSKHTPIDLVRDLPRGFAALEPLVDLPIGINITRFQTLLALHRSYLTPGKLESGWTTGAAAYYVGYLQQRTFLLSYNQNGTITDAVDCSLDPLSETKCTLKSLTVEKGIYQTSNFRVQPTISIVRFPNITNLCPFGEVFNASKFASVYAWNRKRISNCVADYSVLYNSTSFSTFKCYGVSPTKLNDLCFTNVYADSFVVKGDEVRQIAPGQTGVIADYNYKLPDDFTGCVIAWNSVKQDALTGGNYLYRLFRKSKLKPFERDISTEIYQAGSTPCNGQVGLNCYYPLERYGFHPTTGVNYQPFRVVVLSFELLNGPATVCGPKLSTTLVKDKCVNFNFNGLTGTGVLTTSKKQFLPFQQFGRDISDTTDAVRDPQTLEILDITPCSFGGVSVITPGTNTSNQVAVLYQDVNCTEVPMAIHAEQLTPAWRVYSAGANVFQTRAGCLVGAEHVNNSYECDIPVGAGICASYHSMSSLRSVNQRSIIAYTMSLGAENSVAYSNNSIAIPTNFTISVTTEILPVSMTKTSVDCTMYICGDSIECSNLLLQYGSFCTQLNRALTGIAVEQDKNTQEVFAQVKQIYKTPPIKDFGGFNFSQILPDPSKPSKRSFIEDLLFNKVTLADAGFIKQYGDCLGDIAARDLICAQKFNGLTVLPPLLTDEMIAQYTSALLAGTITSGWTFGAGAALQIPFAMQMAYRFNGCGVTQNVLYENQKLIANQFNSAIGKIQDSLSSTASALGKLQDVVNQNAQALNTLVKQLSSNFGAISSVLNDILSRLDKVEAEVQIDRLITGRLQSLQTYVTQQLIRAAEIRASANLAATKMSECVLGQSKRVDFCGKGCHLMSFPQSAPHGVVFLHVTYVPAQEKNFTTAPAICHEGKAHFPREGVFVSNGTHWFITQRNFYEPQIITTDNTFVSGSCDVVIGIVNNTVYDPLQPELDSGGGGSDIDPYKEFGSSYQLLNFLPLDFFPDLNALVDTATALYEEELTGREHCSPHHTAIRQALVCWDELTKLIAWMSSNITSEQVRTIIVNHVNDTWGLKVRQSLWFHLSCLTFGQHTVQEFLVSFGVWIRTPAPYRPPNAPILSTLPEHTVIC

SEQ ID NO: 11329 - protein, 1301 aa, Artificial Sequence
  SARS-CoV-2/Wuhan/WIV05/2019__EPI_ISL_402128 spike protein (1-1147)(Q965C_S1003C) WhcAg construct
MFVFLVLLPLVSSQCVNLTTRTQLPPAYTNSFTRGVYYPDKVFRSSVLHSTQDLFLPFFSNVTWFHAIHVSGTNGTKRFDNPVLPFNDGVYFASTEKSNIIRGWIFGTTLDSKTQSLLIVNNATNVVIKVCEFQFCNDPFLGVYYHKNNKSWMESEFRVYSSANNCTFEYVSQPFLMDLEGKQGNFKNLREFVFKNIDGYFKIYSKHTPINLVRDLPQGFSALEPLVDLPIGINITRFQTLLALHRSYLTPGDSSSGWTAGAAAYYVGYLQPRTFLLKYNENGTITDAVDCALDPLSETKCTLKSFTVEKGIYQTSNFRVQPTESIVRFPNITNLCPFGEVFNATRFASVYAWNRKRISNCVADYSVLYNSASFSTFKCYGVSPTKLNDLCFTNVYADSFVIRGDEVRQIAPGQTGKIADYNYKLPDDFTGCVIAWNSNNLDSKVGGNYNYLYRLFRKSNLKPFERDISTEIYQAGSTPCNGVEGFNCYFPLQSYGFQPTNGVGYQPYRVVVLSFELLHAPATVCGPKKSTNLVKNKCVNFNFNGLTGTGVLTESNKKFLPFQQFGRDIADTTDAVRDPQTLEILDITPCSFGGVSVITPGTNTSNQVAVLYQDVNCTEVPVAIHADQLTPTWRVYSTGSNVFQTRAGCLIGAEHVNNSYECDIPIGAGICASYQTQTNSPRRARSVASQSIIAYTMSLGAENSVAYSNNSIAIPTNFTISVTTEILPVSMTKTSVDCTMYICGDSTECSNLLLQYGSFCTQLNRALTGIAVEQDKNTQEVFAQVKQIYKTPPIKDFGGFNFSQILPDPSKPSKRSFIEDLLFNKVTLADAGFIKQYGDCLGDIAARDLICAQKFNGLTVLPPLLTDEMIAQYTSALLAGTITSGWTFGAGAALQIPFAMQMAYRFNGIGVTQNVLYENQKLIANQFNSAIGKIQDSLSSTASALGKLQDVVNQNAQALNTLVKCLSSNFGAISSVLNDILSRLDKVEAEVQIDRLITGRLQCLQTYVTQQLIRAAEIRASANLAATKMSECVLGQSKRVDFCGKGYHLMSFPQSAPHGVVFLHVTYVPAQEKNFTTAPAICHDGKAHFPREGVFVSNGTHWFVTQRNFYEPQIITTDNTFVSGNCDVVIGIVNNTVYDPLQPELDSGGGGSDIDPYKEFGSSYQLLNFLPLDFFPDLNALVDTATALYEEELTGREHCSPHHTAIRQALVCWDELTKLIAWMSSNITSEQVRTIIVNHVNDTWGLKVRQSLWFHLSCLTFGQHTVQEFLVSFGVWIRTPAPYRPPNAPILSTLPEHTVIC

SEQ ID NO: 11330 - protein, 1297 aa, Artificial Sequence
  SARS-CoV-2/bat/Yunnan/RaTG13/2013__EPI_ISL_402131 spike protein (1-1143)(Q961C_S999C) WhcAg construct
MFVFLVLLPLVSSQCVNLTTRTQLPPAYTNSSTRGVYYPDKVFRSSVLHLTQDLFLPFFSNVTWFHAIHVSGTNGIKRFDNPVLPFNDGVYFASTEKSNIIRGWIFGTTLDSKTQSLLIVNNATNVVIKVCEFQFCNDPFLGVYYHKNNKSWMESEFRVYSSANNCTFEYVSQPFLMDLEGKQGNFKNLREFVFKNIDGYFKIYSKHTPINLVRDLPPGFSALEPLVDLPIGINITRFQTLLALHRSYLTPGDSSSGWTAGAAAYYVGYLQPRTFLLKYNENGTITDAVDCALDPLSETKCTLKSFTVEKGIYQTSNFRVQPTDSIVRFPNITNLCPFGEVFNATTFASVYAWNRKRISNCVADYSVLYNSTSFSTFKCYGVSPTKLNDLCFTNVYADSFVITGDEVRQIAPGQTGKIADYNYKLPDDFTGCVIAWNSKHIDAKEGGNFNYLYRLFRKANLKPFERDISTEIYQAGSKPCNGQTGLNCYYPLYRYGFYPTDGVGHQPYRVVVLSFELLNAPATVCGPKKSTNLVKNKCVNFNFNGLTGTGVLTESNKKFLPFQQFGRDIADTTDAVRDPQTLEILDITPCSFGGVSVITPGTNASNQVAVLYQDVNCTEVPVAIHADQLTPTWRVYSTGSNVFQTRAGCLIGAEHVNNSYECDIPIGAGICASYQTQTNSRSVASQSIIAYTMSLGAENSVAYSNNSIAIPTNFTISVTTEILPVSMTKTSVDCTMYICGDSTECSNLLLQYGSFCTQLNRALTGIAVEQDKNTQEVFAQVKQIYKTPPIKDFGGFNFSQILPDPSKPSKRSFIEDLLFNKVTLADAGFIKQYGDCLGDIAARDLICAQKFNGLTVLPPLLTDEMIAQYTSALLAGTITSGWTFGAGAALQIPFAMQMAYRFNGIGVTQNVLYENQKLIANQFNSAIGKIQDSLSSTASALGKLQDVVNQNAQALNTLVKCLSSNFGAISSVLNDILSRLDKVEAEVQIDRLITGRLQCLQTYVTQQLIRAAEIRASANLAATKMSECVLGQSKRVDFCGKGYHLMSFPQSAPHGVVFLHVTYVPAQEKNFTTAPAICHDGKAHFPREGVFVSNGTHWFVTQRNFYEPQIITTDNTFVSGSCDVVIGIVNNTVYDPLQPELDSGGGGSDIDPYKEFGSSYQLLNFLPLDFFPDLNALVDTATALYEEELTGREHCSPHHTAIRQALVCWDELTKLIAWMSSNITSEQVRTIIVNHVNDTWGLKVRQSLWFHLSCLTFGQHTVQEFLVSFGVWIRTPAPYRPPNAPILSTLPEHTVIC

SEQ ID NO: 11331 - protein, 1301 aa, Artificial Sequence
  SARS-CoV-2/Wuhan/HBCDC-HB-01/2019__EPI_ISL_402132 spike protein (1-1147)(Q965C_S1003C) WhcAg construct
MFVFLVLLPLVSSQCVNLTTRTQLPPAYTNSITRGVYYPDKVFRSSVLHSTQDLFLPFFSNVTWFHAIHVSGTNGTKRFDNPVLPFNDGVYFASTEKSNIIRGWIFGTTLDSKTQSLLIVNNATNVVIKVCEFQFCNDPFLGVYYHKNNKSWMESEFRVYSSANNCTFEYVSQPFLMDLEGKQGNFKNLREFVFKNIDGYFKIYSKHTPINLVRDLPQGFSALEPLVDLPIGINITRFQTLLALHRSYLTPGDSSSGWTAGAAAYYVGYLQPRTFLLKYNENGTITDAVDCALDPLSETKCTLKSFTVEKGIYQTSNFRVQPTESIVRFPNITNLCPFGEVFNATRFASVYAWNRKRISNCVADYSVLYNSASFSTFKCYGVSPTKLNDLCFTNVYADSFVIRGDEVRQIAPGQTGKIADYNYKLPDDFTGCVIAWNSNNLDSKVGGNYNYLYRLFRKSNLKPFERDISTEIYQAGSTPCNGVEGFNCYFPLQSYGFQPTNGVGYQPYRVVVLSFELLHAPATVCGPKKSTNLVKNKCVNFNFNGLTGTGVLTESNKKFLPFQQFGRDIADTTDAVRDPQTLEILDITPCSFGGVSVITPGTNTSNQVAVLYQDVNCTEVPVAIHADQLTPTWRVYSTGSNVFQTRAGCLIGAEHVNNSYECDIPIGAGICASYQTQTNSPRRARSVASQSIIAYTMSLGAENSVAYSNNSIAIPTNFTISVTTEILPVSMTKTSVDCTMYICGDSTECSNLLLQYGSFCTQLNRALTGIAVEQDKNTQEVFAQVKQIYKTPPIKDFGGFNFSQILPDPSKPSKRSFIEDLLFNKVTLADAGFIKQYGDCLGDIAARDLICAQKFNGLTVLPPLLTDEMIAQYTSALLAGTITSGWTFGAGAALQIPFAMQMAYRFNGIGVTQNVLYENQKLIANQFNSAIGKIQDSLSSTASALGKLQDVVNQNAQALNTLVKCLSSNFGAISSVLNDILSRLDKVEAEVQIDRLITGRLQCLQTYVTQQLIRAAEIRASANLAATKMSECVLGQSKRVDFCGKGYHLMSFPQSAPHGVVFLHVTYVPAQEKNFTTAPAICHDGKAHFPREGVFVSNGTHWFVTQRNFYEPQIITTDNTFVSGNCDVVIGIVNNTVYDPLQPELDSGGGGSDIDPYKEFGSSYQLLNFLPLDFFPDLNALVDTATALYEEELTGREHCSPHHTAIRQALVCWDELTKLIAWMSSNITSEQVRTIIVNHVNDTWGLKVRQSLWFHLSCLTFGQHTVQEFLVSFGVWIRTPAPYRPPNAPILSTLPEHTVIC

SEQ ID NO: 11332 - protein, 1301 aa, Artificial Sequence
  SARS-CoV-2/Guangdong/20SF028/2020__EPI_ISL_403936 spike protein (1-1147)(Q965C_S1003C) WhcAg construct
MFVFLVLLPLVSSQCVNLTTRTQLPPAYTNSFTRGVYYPDKVFRSSVLYSTQDLFLPFFSNVTWFHAIHVSGTNGTKRFDNPVLPFNDGVYFASTEKSNIIRGWIFGTTLDSKTQSLLIVNNATNVVIKVCEFQFCNDPFLGVYYHKNNKSWMESEFRVYSSANNCTFEYVSQPFLMDLEGKQGNFKNLREFVFKNIDGYFKIYSKHTPINLVRDLPQGFSALEPLVDLPIGINITRFQTLLALHRSYLTPGDSSSGWTAGAAAYYVGYLQPRTFLLKYNENGTITDAVDCALDPLSETKCTLKSFTVEKGIYQTSNFRVQPTESIVRFPNITNLCPFGEVFNATRFASVYAWNRKRISNCVADYSVLYNSASFSTFKCYGVSPTKLNDLCFTNVYADSFVIRGDEVRQIAPGQTGKIADYNYKLPDDFTGCVIAWNSNNLDSKVGGNYNYLYRLFRKSNLKPFERDISTEIYQAGSTPCNGVEGFNCYFPLQSYGFQPTNGVGYQPYRVVVLSFELLHAPATVCGPKKSTNLVKNKCVNFNFNGLTGTGVLTESNKKFLPFQQFGRDIADTTDAVRDPQTLEILDITPCSFGGVSVITPGTNTSNQVAVLYQDVNCTEVPVAIHADQLTPTWRVYSTGSNVFQTRAGCLIGAEHVNNSYECDIPIGAGICASYQTQTNSPRRARSVASQSIIAYTMSLGAENSVAYSNNSIAIPTNFTISVTTEILPVSMTKTSVDCTMYICGDSTECSNLLLQYGSFCTQLNRALTGIAVEQDKNTQEVFAQVKQIYKTPPIKDFGGFNFSQILPDPSKPSKRSFIEDLLFNKVTLADAGFIKQYGDCLGDIAARDLICAQKFNGLTVLPPLLTDEMIAQYTSALLAGTITSGWTFGAGAALQIPFAMQMAYRFNGIGVTQNVLYENQKLIANQFNSAIGKIQDSLSSTASALGKLQDVVNQNAQALNTLVKCLSSNFGAISSVLNDILSRLDKVEAEVQIDRLITGRLQCLQTYVTQQLIRAAEIRASANLAATKMSECVLGQSKRVDFCGKGYHLMSFPQSAPHGVVFLHVTYVPAQEKNFTTAPAICHDGKAHFPREGVFVSNGTHWFVTQRNFYEPQIITTDNTFVSGNCDVVIGIVNNTVYDPLQPELDSGGGGSDIDPYKEFGSSYQLLNFLPLDFFPDLNALVDTATALYEEELTGREHCSPHHTAIRQALVCWDELTKLIAWMSSNITSEQVRTIIVNHVNDTWGLKVRQSLWFHLSCLTFGQHTVQEFLVSFGVWIRTPAPYRPPNAPILSTLPEHTVIC

SEQ ID NO: 11333 - protein, 1301 aa, Artificial Sequence
  SARS-CoV-2/Shenzhen/SZTH-001/2020__EPI_ISL_406592 spike protein (1-1147)(Q965C_S1003C) WhcAg construct
MFVFLVLLPLVSSQCVNLTTRTQLPPAYTNSFTRGVYYPDKVFRSSVLHSTQDLFLPFFSNVTWFHAIHVSGTNGTKRFDNPVLPFNDGVYFASTEKSNIIRGWIFGTTLDSKTQSLLIVNNATNVVIKVCEFQFCNDPFLGVYYHKNNKSWMESEFRVYSSANNCTFEYVSQPFLMDLEGKQGNFKNLREFVFKNIDGYFKIYSKHTPINLVRDLPQGFSALEPLVDLPIGINITRFQTLLALHRSYLTPGDSSSGWTAGAAAYYVGYLQPRTFLLKYNENGTITDAVDCALDPLSETKCTLKSFTVEKGIYQTSNFRVQPTESIVRFPNITNLCPFGEVFNATRFASVYAWNRKRISNCVADYSVLYNSASFSTFKCYGVSPTKLNDLCFTNVYADSFVIRGDEVRQIAPGQTGKIADYNYKLPDDFTGCVIAWNSNNLDSKVGGNYNYLYRLFRKSNLKPFERDISTEIYQAGSTPCNGVEGFNCYFPLQSYGFQPTNGVGYQPYRVVVLSFELLHAPATVCGPKKSTNLVKNKCVNFNFNGLTGTGVLTESNKKFLPFQQFGRDIADTTDAVRDPQTLEILDITPCSFGGVSVITPGTNTSNQVAVLYQDVNCTEVPVAIHADQLTPTWRVYSTGSNVFQTRAGCLIGAEHVNNSYECDIPIGAGICASYQTQTNSPRRARSVASQSIIAYTMSLGAENSVAYSNNSIAIPTNFTISVTTEILPVSMTKTSVDCTMYICGDSTECSNLLLQYGSFCTQLNRALTGIAVEQDKNTQEVFAQVKQIYKTPPIKDFGGFNFSQILPDPSKPSKRSFIEDLLFNKVTLADAGFIKQYGDCLGDIAARDLICAQKFNGLTVLPPLLTDEMIAQYTSALLAGTITSGWTFGAGAALQIPFAMQMAYRFNGIGVTQNVLYENQKLIANQFNSAIGKIQDSLSSTASALGKLQDVVNQNAQALNTLVKCLSSNFGAISSVLNDILSRLDKVEAEVQIDRLITGRLQCLQTYVTQQLIRAAEIRASANLAATKMSECVLGQSKRVDFCGKGYHLMSFPQSAPHGVVFLHVTYVPAQEKNFTTAPAICHDGKAHFPREGVFVSNGTHWFVTQRNFYEPQIITTDNTFVSGNCDVLIGIVNNTVYDPLQPELDSGGGGSDIDPYKEFGSSYQLLNFLPLDFFPDLNALVDTATALYEEELTGREHCSPHHTAIRQALVCWDELTKLIAWMSSNITSEQVRTIIVNHVNDTWGLKVRQSLWFHLSCLTFGQHTVQEFLVSFGVWIRTPAPYRPPNAPILSTLPEHTVIC

SEQ ID NO: 11334 - protein, 1301 aa, Artificial Sequence
  SARS-CoV-2/Shenzhen/SZTH-004/2020__EPI_ISL_406595 spike protein (1-1147)(Q965C_S1003C) WhcAg construct
MFVFLVLLPLVSSQCVNLTTRTQLPPAYTNSFTRGVYYPDKVFRSSVLHSTQDLFLPFFSNVTWFHAIHVSGTNGTKRFDNPVLPFNDGVYFASTEKSNIIRGWIFGTTLDSKTQSLLIVNNATNVVIKVCEFQFCNDPFLGVYYHKNNKSWMESEFRVYSSANNCTFEYVSQPFLMDLEGKQGNFKNLREFVFKNIDGYFKIYSKHTPINLVRDLPQGFSALEPLVDLPIGINITRFQTLLALHRSYLTPGDSSSGWTAGAAAYYVGYLQPRTFLLKYNENGTITDAVDCALDPLSETKCTLKSFTVEKGIYQTSNFRVQPTESIVRFPNITNLCPFGEVFNATRFASVYAWDRKRISNCVAYYSVLYNSASFSTFKCYGVSPTKLNDLCFTNVYADSFVIRGDEVRQIAPGQTGKIADYNYKLPDDFTGCVIAWNSNNLDSKVGGNYNYLYRLFRKSNLKPFERDISTEIYQAGSTPCNGVEGFNCYFPLQSYGFQPTNGVGYQPYRVVVLSFELLHAPATVCGPKKSTNLVKNKCVNFNFNGLTGTGVLTESNKKFLPFQQFGRDIADTTDAVRDPQTLEILDITPCSFGGVSVITPGTNTSNQVAVLYQDVNCTEVPVAIHADQLTPTWRVYSTGSNVFQTRAGCLIGAEHVNNSYECDIPIGAGICASYQTQTNSPRRARSVASQSIIAYTMSLGAENSVAYSNNSIAIPTNFTISVTTEILPVSMTKTSVDCTMYICGDSTECSNLLLQYGSFCTQLNRALTGIAVEQDKNTQEVFAQVKQIYKTPPIKDFGGFNFSQILPDPSKPSKRSFIEDLLFNKVTLADAGFIKQYGDCLGDIAARDLICAQKFNGLTVLPPLLTDEMIAQYTSALLAGTITSGWTFGAGAALQIPFAMQMAYRFNGIGVTQNVLYENQKLIANQFNSAIGKIQDSLSSTASALGKLQDVVNQNAQALNTLVKCLSSNFGAISSVLNDILSRLDKVEAEVQIDRLITGRLQCLQTYVTQQLIRAAEIRASANLAATKMSECVLGQSKRVDFCGKGYHLMSFPQSAPHGVVFLHVTYVPAQEKNFTTAPAICHDGKAHFPREGVFVSNGTHWFVTQRNFYEPQIITTDNTFVSGNCDVVIGIVNNTVYDPLQPELDSGGGGSDIDPYKEFGSSYQLLNFLPLDFFPDLNALVDTATALYEEELTGREHCSPHHTAIRQALVCWDELTKLIAWMSSNITSEQVRTIIVNHVNDTWGLKVRQSLWFHLSCLTFGQHTVQEFLVSFGVWIRTPAPYRPPNAPILSTLPEHTVIC

SEQ ID NO: 11335 - protein, 1301 aa, Artificial Sequence
  SARS-CoV-2/France/IDF0372/2020__EPI_ISL_406596 spike protein (1-1147)(Q965C_S1003C) WhcAg construct
MFVFLVLLPLVSSQCVNLTTRTQLPPAYTNSFTRGVYYPDKVFRSSVLHSTQDLFLPFFSNVTWFHAIHVSGTNGTKRFDNPVLPFNDGVYFASTEKSNIIRGWIFGTTLDSKTQSLLIVNNATNVVIKVCEFQFCNDPFLGVYYHKNNKSWMESEFRVYSSANNCTFEYVSQPFLMDLEGKQGNFKNLREFVFKNIDGYFKIYSKHTPINLVRDLPQGFSALEPLVDLPIGINITRFQTLLALHRSYLTPGDSSSGWTAGAAAYYVGYLQPRTFLLKYNENGTITDAVDCALDPLSETKCTLKSFTVEKGIYQTSNFRVQPTESIVRFPNITNLCPFGEVFNATRFASVYAWNRKRISNCVADYSFLYNSASFSTFKCYGVSPTKLNDLCFTNVYADSFVIRGDEVRQIAPGQTGKIADYNYKLPDDFTGCVIAWNSNNLDSKVGGNYNYLYRLFRKSNLKPFERDISTEIYQAGSTPCNGVEGFNCYFPLQSYGFQPTNGVGYQPYRVVVLSFELLHAPATVCGPKKSTNLVKNKCVNFNFNGLTGTGVLTESNKKFLPFQQFGRDIADTTDAVRDPQTLEILDITPCSFGGVSVITPGTNTSNQVAVLYQDVNCTEVPVAIHADQLTPTWRVYSTGSNVFQTRAGCLIGAEHVNNSYECDIPIGAGICASYQTQTNSPRRARSVASQSIIAYTMSLGAENSVAYSNNSIAIPTNFTISVTTEILPVSMTKTSVDCTMYICGDSTECSNLLLQYGSFCTQLNRALTGIAVEQDKNTQEVFAQVKQIYKTPPIKDFGGFNFSQILPDPSKPSKRSFIEDLLFNKVTLADAGFIKQYGDCLGDIAARDLICAQKFNGLTVLPPLLTDEMIAQYTSALLAGTITSGWTFGAGAALQIPFAMQMAYRFNGIGVTQNVLYENQKLIANQFNSAIGKIQDSLSSTASALGKLQDVVNQNAQALNTLVKCLSSNFGAISSVLNDILSRLDKVEAEVQIDRLITGRLQCLQTYVTQQLIRAAEIRASANLAATKMSECVLGQSKRVDFCGKGYHLMSFPQSAPHGVVFLHVTYVPAQEKNFTTAPAICHDGKAHFPREGVFVSNGTHWFVTQRNFYEPQIITTDNTFVSGNCDVVIGIVNNTVYDPLQPELDSGGGGSDIDPYKEFGSSYQLLNFLPLDFFPDLNALVDTATALYEEELTGREHCSPHHTAIRQALVCWDELTKLIAWMSSNITSEQVRTIIVNHVNDTWGLKVRQSLWFHLSCLTFGQHTVQEFLVSFGVWIRTPAPYRPPNAPILSTLPEHTVIC

SEQ ID NO: 11336 - protein, 1301 aa, Artificial Sequence
  SARS-CoV-2/Australia/VIC01/2020__EPI_ISL_406844 spike protein (1-1147)(Q965C_S1003C) WhcAg construct
MFVFLVLLPLVSSQCVNLTTRTQLPPAYTNSFTRGVYYPDKVFRSSVLHSTQDLFLPFFSNVTWFHAIHVSGTNGTKRFDNPVLPFNDGVYFASTEKSNIIRGWIFGTTLDSKTQSLLIVNNATNVVIKVCEFQFCNDPFLGVYYHKNNKSWMESEFRVYSSANNCTFEYVSQPFLMDLEGKQGNFKNLREFVFKNIDGYFKIYSKHTPINLVRDLPQGFSALEPLVDLPIGINITRFQTLLALHRRYLTPGDSSSGWTAGAAAYYVGYLQPRTFLLKYNENGTITDAVDCALDPLSETKCTLKSFTVEKGIYQTSNFRVQPTESIVRFPNITNLCPFGEVFNATRFASVYAWNRKRISNCVADYSVLYNSASFSTFKCYGVSPTKLNDLCFTNVYADSFVIRGDEVRQIAPGQTGKIADYNYKLPDDFTGCVIAWNSNNLDSKVGGNYNYLYRLFRKSNLKPFERDISTEIYQAGSTPCNGVEGFNCYFPLQSYGFQPTNGVGYQPYRVVVLSFELLHAPATVCGPKKSTNLVKNKCVNFNFNGLTGTGVLTESNKKFLPFQQFGRDIADTTDAVRDPQTLEILDITPCSFGGVSVITPGTNTSNQVAVLYQDVNCTEVPVAIHADQLTPTWRVYSTGSNVFQTRAGCLIGAEHVNNSYECDIPIGAGICASYQTQTNSPRRARSVASQSIIAYTMSLGAENSVAYSNNSIAIPTNFTISVTTEILPVSMTKTSVDCTMYICGDSTECSNLLLQYGSFCTQLNRALTGIAVEQDKNTQEVFAQVKQIYKTPPIKDFGGFNFSQILPDPSKPSKRSFIEDLLFNKVTLADAGFIKQYGDCLGDIAARDLICAQKFNGLTVLPPLLTDEMIAQYTSALLAGTITSGWTFGAGAALQIPFAMQMAYRFNGIGVTQNVLYENQKLIANQFNSAIGKIQDSLSSTASALGKLQDVVNQNAQALNTLVKCLSSNFGAISSVLNDILSRLDKVEAEVQIDRLITGRLQCLQTYVTQQLIRAAEIRASANLAATKMSECVLGQSKRVDFCGKGYHLMSFPQSAPHGVVFLHVTYVPAQEKNFTTAPAICHDGKAHFPREGVFVSNGTHWFVTQRNFYEPQIITTDNTFVSGNCDVVIGIVNNTVYDPLQPELDSGGGGSDIDPYKEFGSSYQLLNFLPLDFFPDLNALVDTATALYEEELTGREHCSPHHTAIRQALVCWDELTKLIAWMSSNITSEQVRTIIVNHVNDTWGLKVRQSLWFHLSCLTFGQHTVQEFLVSFGVWIRTPAPYRPPNAPILSTLPEHTVIC

SEQ ID NO: 11337 - protein, 1301 aa, Artificial Sequence
  SARS-CoV-2/Germany/BavPat1/2020__EPI_ISL_406862 spike protein (1-1147)(Q965C_S1003C) WhcAg construct
MFVFLVLLPLVSSQCVNLTTRTQLPPAYTNSFTRGVYYPDKVFRSSVLHSTQDLFLPFFSNVTWFHAIHVSGTNGTKRFDNPVLPFNDGVYFASTEKSNIIRGWIFGTTLDSKTQSLLIVNNATNVVIKVCEFQFCNDPFLGVYYHKNNKSWMESEFRVYSSANNCTFEYVSQPFLMDLEGKQGNFKNLREFVFKNIDGYFKIYSKHTPINLVRDLPQGFSALEPLVDLPIGINITRFQTLLALHRSYLTPGDSSSGWTAGAAAYYVGYLQPRTFLLKYNENGTITDAVDCALDPLSETKCTLKSFTVEKGIYQTSNFRVQPTESIVRFPNITNLCPFGEVFNATRFASVYAWNRKRISNCVADYSVLYNSASFSTFKCYGVSPTKLNDLCFTNVYADSFVIRGDEVRQIAPGQTGKIADYNYKLPDDFTGCVIAWNSNNLDSKVGGNYNYLYRLFRKSNLKPFERDISTEIYQAGSTPCNGVEGFNCYFPLQSYGFQPTNGVGYQPYRVVVLSFELLHAPATVCGPKKSTNLVKNKCVNFNFNGLTGTGVLTESNKKFLPFQQFGRDIADTTDAVRDPQTLEILDITPCSFGGVSVITPGTNTSNQVAVLYQGVNCTEVPVAIHADQLTPTWRVYSTGSNVFQTRAGCLIGAEHVNNSYECDIPIGAGICASYQTQTNSPRRARSVASQSIIAYTMSLGAENSVAYSNNSIAIPTNFTISVTTEILPVSMTKTSVDCTMYICGDSTECSNLLLQYGSFCTQLNRALTGIAVEQDKNTQEVFAQVKQIYKTPPIKDFGGFNFSQILPDPSKPSKRSFIEDLLFNKVTLADAGFIKQYGDCLGDIAARDLICAQKFNGLTVLPPLLTDEMIAQYTSALLAGTITSGWTFGAGAALQIPFAMQMAYRFNGIGVTQNVLYENQKLIANQFNSAIGKIQDSLSSTASALGKLQDVVNQNAQALNTLVKCLSSNFGAISSVLNDILSRLDKVEAEVQIDRLITGRLQCLQTYVTQQLIRAAEIRASANLAATKMSECVLGQSKRVDFCGKGYHLMSFPQSAPHGVVFLHVTYVPAQEKNFTTAPAICHDGKAHFPREGVFVSNGTHWFVTQRNFYEPQIITTDNTFVSGNCDVVIGIVNNTVYDPLQPELDSGGGGSDIDPYKEFGSSYQLLNFLPLDFFPDLNALVDTATALYEEELTGREHCSPHHTAIRQALVCWDELTKLIAWMSSNITSEQVRTIIVNHVNDTWGLKVRQSLWFHLSCLTFGQHTVQEFLVSFGVWIRTPAPYRPPNAPILSTLPEHTVIC

SEQ ID NO: 11338 - protein, 1301 aa, Artificial Sequence
  SARS-CoV-2/Wuhan/HBCDC-HB-02/2020__EPI_ISL_412978 spike protein (1-1147)(Q965C_S1003C) WhcAg construct
MFVFLVLLPLVSSQCVNLTTRTQLPPAYTNSFTRGVYYPDKVFRSSVLHSTQDLFLPFFSNVTWFHAIHVSGTNGTKRFDNPVLPFNDGVYFASTEKSNIIRGWIFGTTLDSKTQSLLIVNNATNVVIKVCEFQFCNDPFLGVYYHKNNKSWMESEFRVYSSANNCTFEYVSQPFLMDLEGKQGNFKNLREFVFKNIDGYFKIYSKHTPINLVRDLPQGFSALEPLVDLPIGINITRFQTLLALHRSYLTPGDSSSGWTAGAAAYYVGYLQPRTFLLKYNENGTITDAVDCALDPLSETKCTLKSFTVEKGIYQTSNFRVQPTESIVRFPNITNLCPFGEVFNATRFASVYAWNRKRISNCVADYSVLYNSASFSTFKCYGVSPTKLNDLCFTNVYADSFVIRGDEVRQIAPGQTGKIADYNYKLPDDFTGCVIAWNSNNLDSKVGGNYNYLYRLFRKSNLKPFERDISTEIYQAGSTPCNGVEGFNCYFPLQSYGFQPTNGVGYQPYRVVVLSFELLHAPATVCGPKKSTNLVKNKCVNFNFNGLTGTGVLTESNKKFLPFQQFGRDIADTTDAVRDPQTLEILDITPCSFGGVSVITPGTNTSNQVAVLYQDVNCTEVPVAIHADQLTPTWRVYSTGSNVFQTRAGCLIGAEHVNNSYECDIPIGAGICASYQTQTNSPRRARSVASQSIIAYTMSLGAENSVAYSNNSIAIPTNFTISVTTEILPVSMTKTSVDCTMYICGDSTECSNFLLQYGSFCTQLNRALTGIAVEQDKNTQEVFAQVKQIYKTPPIKDFGGFNFSQILPDPSKPSKRSFIEDLLFNKVTLADAGFIKQYGDCLGDIAARDLICAQKFNGLTVLPPLLTDEMIAQYTSALLAGTITSGWTFGAGAALQIPFAMQMAYRFNGIGVTQNVLYENQKLIANQFNSAIGKIQDSLSSTASALGKLQDVVNQNAQALNTLVKCLSSNFGAISSVLNDILSRLDKVEAEVQIDRLITGRLQCLQTYVTQQLIRAAEIRASANLAATKMSECVLGQSKRVDFCGKGYHLMSFPQSAPHGVVFLHVTYVPAQEKNFTTAPAICHDGKAHFPREGVFVSNGTHWFVTQRNFYEPQIITTDNTFVSGNCDVVIGIVNNTVYDPLQPELDSGGGGSDIDPYKEFGSSYQLLNFLPLDFFPDLNALVDTATALYEEELTGREHCSPHHTAIRQALVCWDELTKLIAWMSSNITSEQVRTIIVNHVNDTWGLKVRQSLWFHLSCLTFGQHTVQEFLVSFGVWIRTPAPYRPPNAPILSTLPEHTVIC

SEQ ID NO: 11339 - protein, 1301 aa, Artificial Sequence
  SARS-CoV-2/Australia/QLD02/2020__EPI_ISL_407896 spike protein (1-1147)(Q965C_S1003C) WhcAg construct
MFVFLVLLPLVSSQCVNLTTRTQLPPAYTNSFTRGVYYPDKVFRSSVLHSTQDLFLPFFSNVTWFHAIHVSGTNGTKRFDNPVLPFNDGVYFASTEKSNIIRGWIFGTTLDSKTQSLLIVNNATNVVIKVCEFQFCNDPFLGVYYHKNNKSWMESEFRVYSSANNCTFEYVSQPFLMDLEGKQGNFKNLREFVFKNIDGYFKIYSKHTPINLVRDLPQGFSALEPLVDLPIGINITRFQTLLALHRSYLTPGDSSSGWTAGAAAYYVGYLQPRTFLLKYNENGTITDAVDCALDPLSETKCTLKSFTVEKGIYQTSNFRVQPTESIVRFPNITNLCPFGEVFNATRFASVYAWNRKRISNCVADYSVLYNSASFSTFKCYGVSPTKLNDLCFTNVYADSFVIRGDEVRQIAPGQTGKIADYNYKLPDDFTGCVIAWNSNNLDSKVGGNYNYLYRLFRKSNLKPFERDISTEIYQAGSTPCNGVEGFNCYFPLQSYGFQPTNGVGYQPYRVVVLSFELLHAPATVCGPKKSTNLVKNKCVNFNFNGLTGTGVLTESNKKFLPFQQFGRDIADTTDAVRDPQTLEILDITPCSFGGVSVITPGTNTSNQVAVLYQDVNCTEVPVAIHADQLTPTWRVYSTGSNVFQTRAGCLIGAEHVNNSYECDIPIGAGICASYQTQTNSPRRARSVASQSIIAYTMSLGAENSVAYSNNSIAIPTNFTISVTTEILPVSMTKTSVDCTMYICGDSTECSNLLLQYGSFCTQLNRALTGIAVEQDKNTQEVFAQVKQIYKTPPIKDFGGFNFSQILPDPSKPSKRSFIEDLLFNKVTLADAGFIKQYGDCLGDIAARDLICAQKFNGLTVLPPLLTDEMIAQYTSALLAGTITSGWTFGAGAALQIPFAMQMAYRFNGIGVTQNVLYENQKLIANQFNSAIGKIQDSLSSTASALGKLQDVVNQNAQALNTLVKCLSSNFGAISSVLNDILSRLDKVEAEVQIDRLITGRLQCLQTYVTQQLIRAAEIRASANLAATKMSECVLGQSKRVDFCGKGYHLMSFPQSAPHGVVFLHVTYVPAQEKNFTTAPAICHDGKAHFPREGVFVSNGTHWFVTQRNFYEPQIITTDNTFVSGNCDVVIGIVNNTVYDPLQLELDSGGGGSDIDPYKEFGSSYQLLNFLPLDFFPDLNALVDTATALYEEELTGREHCSPHHTAIRQALVCWDELTKLIAWMSSNITSEQVRTIIVNHVNDTWGLKVRQSLWFHLSCLTFGQHTVQEFLVSFGVWIRTPAPYRPPNAPILSTLPEHTVIC

SEQ ID NO: 11340 - protein, 1301 aa, Artificial Sequence
  SARS-CoV-2/India/1-31/2020__EPI_ISL_413523 spike protein (1-1147)(Q965C_S1003C) WhcAg construct
MFVFLVLLPLVSSQCVNLTTRTQLPPAYTNSFTRGVYYPDKVFRSSVLHSTQDLFLPFFSNVTWFHAIHVSGTNGTKRFDNPVLPFNDGVYFASTEKSNIIRGWIFGTTLDSKTQSLLIVNNATNVVIKVCEFQFCNDPFLGVYYHKNNKSWMESEFRVYSSANNCTFEYVSQPFLMDLEGKQGNFKNLREFVFKNIDGYFKIYSKHTPINLVRDLPQGFSALEPLVDLPIGINITRFQTLLALHRSYLTPGDSSSGWTAGAAAYYVGYLQPRTFLLKYNENGTITDAVDCALDPLSETKCTLKSFTVEKGIYQTSNFRVQPTESIVRFPNITNLCPFGEVFNATRFASVYAWNRKRISNCVADYSVLYNSASFSTFKCYGVSPTKLNDLCFTNVYADSFVIRGDEVRQIAPGQTGKIADYNYKLPDDFTGCVIAWNSNNLDSKVGGNYNYLYRLFRKSNLKPFERDISTEIYQAGSTPCNGVEGFNCYFPLQSYGFQPTNGVGYQPYRVVVLSFELLHAPATVCGPKKSTNLVKNKCVNFNFNGLTGTGVLTESNKKFLPFQQFGRDIADTTDAVRDPQTLEILDITPCSFGGVSVITPGTNTSNQVAVLYQDVNCTEVPVAIHADQLTPTWRVYSTGSNVFQTRAGCLIGAEHVNNSYECDIPIGAGICASYQTQTNSPRRARSVASQSIIAYTMSLGAENSVAYSNNSIAIPTNFTISVTTEILPVSMTKTSVDCTMYICGDSTECSNLLLQYGSFCTQLNRALTGIAVEQDKNTQEVFAQVKQIYKTPPIKDFGGFNFSQILPDPSKPSKRSFIEDLLFNKVTLADAGFIKQYGDCLGDIAARDLICAQKFNGLTVLPPLLTDEMIAQYTSALLAGTITSGWTFGAGAALQIPFAMQMAYRFNGIGVTQNVLYENQKLIANQFNSVIGKIQDSLSSTASALGKLQDVVNQNAQALNTLVKCLSSNFGAISSVLNDILSRLDKVEAEVQIDRLITGRLQCLQTYVTQQLIRAAEIRASANLAATKMSECVLGQSKRVDFCGKGYHLMSFPQSAPHGVVFLHVTYVPAQEKNFTTAPAICHDGKAHFPREGVFVSNGTHWFVTQRNFYEPQIITTDNTFVSGNCDVVIGIVNNTVYDPLQPELDSGGGGSDIDPYKEFGSSYQLLNFLPLDFFPDLNALVDTATALYEEELTGREHCSPHHTAIRQALVCWDELTKLIAWMSSNITSEQVRTIIVNHVNDTWGLKVRQSLWFHLSCLTFGQHTVQEFLVSFGVWIRTPAPYRPPNAPILSTLPEHTVIC

SEQ ID NO: 11341 - protein, 1301 aa, Artificial Sequence
  SARS-CoV-2/Guangdong/GD2020087-P0008/2020__EPI_ISL_413863 spike protein (1-1147)(Q965C_S1003C) WhcAg construct
MFVFLVLLPLVSSQCVNLTTRTQLPPAYTNSFTRGVYYPDKVFRSSVLHSTQDLFLPFFSNVTWFHAIHVSGTNGTKRFDNPVLPFNDGVYFASTEKSNIIRGWIFGTTLDSKTQSLLIVNNATNVVIKVCEFQFCNDPFLGVYYHKNNKSWMESEFRVYSSANNCTFEYVSQPFLMDLEGKQGNFKNLREFVFKNIDGYFKIYSKHTPINLVRDLPQGFSALEPLVDLPIGINITRFQTLLALHRSYLTPGDSSSGWTAGAAAYYVGYLQPRTFLLKYNENGTITDAVDCALDPLSETKCTLKSFTVEKGIYQTSNFRVQPTESIVRFPNITNLCPFGEVFNATRFASVYAWNRKRISNCVADYSVLYNSASFSTFKCYGVSPTKLNDLCFTNVYADSFVIRGDEVREIAPGQTGKIADYNYKLPDDFTGCVIAWNSNNLDSKVGGNYNYLYRLFRKSNLKPFERDISTEIYQAGSTPCNGVEGFNCYFPLQSYGFQPTNGVGYQPYRVVVLSFELLHAPATVCGPKKSTNLVKNKCVNFNFNGLTGTGVLTESNKKFLPFQQFGRDIADTTDAVRDPQTLEILDITPCSFGGVSVITPGTNTSNQVAVLYQDVNCTEVPVAIHADQLTPTWRVYSTGSNVFQTRAGCLIGAEHVNNSYECDIPIGAGICASYQTQTNSPRRARSVASQSIIAYTMSLGAENSVAYSNNSIAIPTNFTISVTTEILPVSMTKTSVDCTMYICGDSTECSNLLLQYGSFCTQLNRALTGIAVEQDKNTQEVFAQVKQIYKTPPIKDFGGFNFSQILPDPSKPSKRSFIEDLLFNKVTLADAGFIKQYGDCLGDIAARDLICAQKFNGLTVLPPLLTDEMIAQYTSALLAGTITSGWTFGAGAALQIPFAMQMAYRFNGIGVTQNVLYENQKLIANQFNSAIGKIQDSLSSTASALGKLQDVVNQNAQALNTLVKCLSSNFGAISSVLNDILSRLDKVEAEVQIDRLITGRLQCLQTYVTQQLIRAAEIRASANLAATKMSECVLGQSKRVDFCGKGYHLMSFPQSAPHGVVFLHVTYVPAQEKNFTTAPAICHDGKAHFPREGVFVSNGTHWFVTQRNFYEPQIITTDNTFVSGNCDVVIGIVNNTVYDPLQPELDSGGGGSDIDPYKEFGSSYQLLNFLPLDFFPDLNALVDTATALYEEELTGREHCSPHHTAIRQALVCWDELTKLIAWMSSNITSEQVRTIIVNHVNDTWGLKVRQSLWFHLSCLTFGQHTVQEFLVSFGVWIRTPAPYRPPNAPILSTLPEHTVIC

SEQ ID NO: 11342 - protein, 1301 aa, Artificial Sequence
  SARS-CoV-2/Sweden/01/2020__EPI_ISL_411951 spike protein (1-1147)(Q965C_S1003C) WhcAg construct
MFVFLVLLPLVSSQCVNLTTRTQLPPAYTNSFTRGVYYPDKVFRSSVLHSTQDLFLPFFSNVTWFHAIHVSGTNGTKRFDNPVLPFNDGVYFASTEKSNIIRGWIFGTTLDSKTQSLLIVNNATNVVIKVCEFQFCNDPFLGVYYHKNNKSWMESEFRVYSSANNCTFEYVSQPFLMDLEGKQGNFKNLREFVFKNIDGYFKIYSKHTPINLVRDLPQGFSALEPLVDLPIGINITRFQTLLALHRSYLTPGDSSSGWTAGAAAYYVGYLQPRTFLLKYNENGTITDAVDCALDPLSETKCTLKSFTVEKGIYQTSNFRVQPTESIVRFPNITNLCPFGEVFNATRFASVYAWNRKRISNCVADYSVLYNSASFSTFKCYGVSPTKLNDLCFTNVYADSFVIRGDEVRQIAPGQTGKIADYNYKLPDDFTGCVIAWNSNNLDSKVGGNYNYLYRLFRKSNLKPFERDISTEIYQAGSTPCNGVEGFNCYFPLQSYGFQPTNGVGYQPYRVVVLSFELLHAPATVCGPKKSTNLVKNKCVNFNFNGLTGTGVLTESNKKFLPFQQFGRDIADTTDAVRDPQTLEILDITPCSFGGVSVITPGTNTSNQVAVLYQDVNCTEVPVAIHADQLTPTWRVYSTGSNVFQTRAGCLIGAEHVNNSYECDIPIGAGICASYQTQTNSPRRARSVASQSIIAYTMSLGAENSVAYSNNSIAIPTNFTISVTTEILPVSMTKTSVDCTMYICGDSTECSNLLLQYGSFCTQLNRALTGIAVEQDKNTQEVFAQVKQIYKTPPIKDCGGFNFSQILPDPSKPSKRSFIEDLLFNKVTLADAGFIKQYGDCLGDIAARDLICAQKFNGLTVLPPLLTDEMIAQYTSALLAGTITSGWTFGAGAALQIPFAMQMAYRFNGIGVTQNVLYENQKLIANQFNSAIGKIQDSLSSTASALGKLQDVVNQNAQALNTLVKCLSSNFGAISSVLNDILSRLDKVEAEVQIDRLITGRLQCLQTYVTQQLIRAAEIRASANLAATKMSECVLGQSKRVDFCGKGYHLMSFPQSAPHGVVFLHVTYVPAQEKNFTTAPAICHDGKAHFPREGVFVSNGTHWFVTQRNFYEPQIITTDNTFVSGNCDVVIGIVNNTVYDPLQPELDSGGGGSDIDPYKEFGSSYQLLNFLPLDFFPDLNALVDTATALYEEELTGREHCSPHHTAIRQALVCWDELTKLIAWMSSNITSEQVRTIIVNHVNDTWGLKVRQSLWFHLSCLTFGQHTVQEFLVSFGVWIRTPAPYRPPNAPILSTLPEHTVIC

SEQ ID NO: 11343 - protein, 1301 aa, Artificial Sequence
  SARS-CoV-2/Tianmen/HBCDC-HB-07/2020__EPI_ISL_412983 spike protein (1-1147)(Q965C_S1003C) WhcAg construct
MFVFLVLLPLVSSQCVNLTTRTQLPPAYTNSFTRGVYYPDKVFRSSVLHSTQDLFLPFFSNVTWFHAIHVSGTNGTKRFDNPVLPFNDGVYFASTEKSNIIRGWIFGTTLDSKTQSLLIVNNATNVVIKVCEFQFCNDPFLGVYYHKNNKSWMESEFRVYSSANNCTFEYVSQPFLMDLEGKQGNFKNLREFVFKNIDGYFKIYSKHTPINLVRDLPQGFSALEPLVDLPIGINITRFQTLLALHRSYLTPGDSSSGWTAGAAAYYVGYLQPRTFLLKYNENGTITDAVDCALDPLSETKCTLKSFTVEKGIYQTSNFRVQPTESIVRFPNITNLCPFGEVFNATRFASVYAWNRKRISNCVADYSVLYNSASFSTFKCYGVSPTKLNDLCFTNVYADSFVIRGDEVRQIAPGQTGKIADYNYKLPDDFTGCVIAWNSNNLDSKVGGNYNYLYRLFRKSNLKPFERDISTEIYQAGSTPCNGVEGFNCYFPLQSYGFQPTNGVGYQPYRVVVLSFELLHAPATVCGPKKSTNLVKNKCVNFNFNGLTGTGVLTESNKKFLPFQQFGRDIADTTDAVRDPQTLEILDITPCSFGGVSVITPGTNTSNQVAVLYQDLNCTEVPVAIHADQLTPTWRVYSTGSNVFQTRAGCLIGAEHVNNSYECDIPIGAGICASYQTQTNSPRRARSVASQSIIAYTMSLGAENSVAYSNNSIAIPTNFTISVTTEILPVSMTKTSVDCTMYICGDSTECSNLLLQYGSFCTQLNRALTGIAVEQDKNTQEVFAQVKQIYKTPPIKDFGGFNFSQILPDPSKPSKRSFIEDLLFNKVTLADAGFIKQYGDCLGDIAARDLICAQKFNGLTVLPPLLTDEMIAQYTSALLAGTITSGWTFGAGAALQIPFAMQMAYRFNGIGVTQNVLYENQKLIANQFNSAIGKIQDSLSSTASALGKLQDVVNQNAQALNTLVKCLSSNFGAISSVLNDILSRLDKVEAEVQIDRLITGRLQCLQTYVTQQLIRAAEIRASANLAATKMSECVLGQSKRVDFCGKGYHLMSFPQSAPHGVVFLHVTYVPAQEKNFTTAPAICHDGKAHFPREGVFVSNGTHWFVTQRNFYEPQIITTDNTFVSGNCDVVIGIVNNTVYDPLQPELDSGGGGSDIDPYKEFGSSYQLLNFLPLDFFPDLNALVDTATALYEEELTGREHCSPHHTAIRQALVCWDELTKLIAWMSSNITSEQVRTIIVNHVNDTWGLKVRQSLWFHLSCLTFGQHTVQEFLVSFGVWIRTPAPYRPPNAPILSTLPEHTVIC

SEQ ID NO: 11344 - protein, 1301 aa, Artificial Sequence
  SARS-CoV-2/Hong Kong/case42_VM20002493/2020__EPI_ISL_414527 spike protein (1-1147)(Q965C_S1003C) WhcAg construct
MFVFLVLLPLVSSQCVNLTTRTQLPPAYTNSFTRGVYYPDKVFRSSVLHSTQDLFLPFFSNVTWFHAIHVSGTNGTKRFDNPVLPFNDGVYFASTEKSNIIRGWIFGTTLDSKTQSLLIVNNATNVVIKVCEFQFCNDPFLGVYYHKNNKSWMESEFRVYSSANNCTFEYVSQPFLMDLEGKQGNFKNLREFVFKNIDGYFKIYSKHTPINLVRDLPQGFSALEPLVDLPIGINITRFQTLLALHRSYLTPGDSSSGWTAGAAAYYVGYLQPRTFLLKYNENGTITDAVDCALDPLSETKCTLKSFTVEKGIYQTSNFRVQPTESIVRFPNITNLCPFGEVFNATRFASVYAWNRKRISNCVADYSVLYNSASFSTFKCYGVSPTKLNDLCFTNVYADSFVIRGDEVRQIAPGQTGKIADYNYKLPDDFTGCVIAWNSNNLDSKVGGNYNYLYRLFRKSNLKPFERDISTEIYQAGSTPCNGVEGFNCYFPLQSYGFQPTNGVGYQPYRVVVLSFELLHAPATVCGPKKSTNLVKNKCVNFNFNGLTGTGVLTESNKKFLPFQQFGRDIADTTDAVRDPQTLEILDITPCSFGGVSVITPGTNTSNQVAVLYQDVNCTEVPVAIHADQLTPTWRVYSTGSNVFQTRAGCLIGAEHVNNSYECDIPIGAGICASYQTQTNSPRRARSVASQSIIAYTMSLGAENSVAYSNNSIAIPTNFAISVTTEILPVSMTKTSVDCTMYICGDSTECSNLLLQYGSFCTQLNRALTGIAVEQDKNTQEVFAQVKQIYKTPPIKDFGGFNFSQILPDPSKPSKRSFIEDLLFNKVTLADAGFIKQYGDCLGDIAARDLICAQKFNGLTVLPPLLTDEMIAQYTSALLAGTITSGWTFGAGAALQIPFAMQMAYRFNGIGVTQNVLYENQKLIANQFNSAIGKIQDSLSSTASALGKLQDVVNQNAQALNTLVKCLSSNFGAISSVLNDILSRLDKVEAEVQIDRLITGRLQCLQTYVTQQLIRAAEIRASANLAATKMSECVLGQSKRVDFCGKGYHLMSFPQSAPHGVVFLHVTYVPAQEKNFTTAPAICHDGKAHFPREGVFVSNGTHWFVTQRNFYEPQIITTDNTFVSGNCDVVIGIVNNTVYDPLQPELDSGGGGSDIDPYKEFGSSYQLLNFLPLDFFPDLNALVDTATALYEEELTGREHCSPHHTAIRQALVCWDELTKLIAWMSSNITSEQVRTIIVNHVNDTWGLKVRQSLWFHLSCLTFGQHTVQEFLVSFGVWIRTPAPYRPPNAPILSTLPEHTVIC

SEQ ID NO: 11345 - protein, 1301 aa, Artificial Sequence
  SARS-CoV-2/USA/CruiseA-23/2020__EPI_ISL_414482 spike protein (1-1147)(Q965C_S1003C) WhcAg construct
MFVFLVLLPLVSSQCVNLTTRTQLPPAYTNSFTRGVYYPDKVFRSSVLHSTQDLFLPFFSNVTWFHAIHVSGTNGTKRFDNPVLPFNDGVYFASTEKSNIIRGWIFGTTLDSKTQSLLIVNNATNVVIKVCEFQFCNDPFLGVYYHKNNKSWMESEFRVYSSANNCTFEYVSQPFLMDLEVKQGNFKNLREFVFKNIDGYFKIYSKHTPINLVRDLPQGFSALEPLVDLPIGINITRFQTLLALHRSYLTPGDSSSGWTAGAAAYYVGYLQPRTFLLKYNENGTITDAVDCALDPLSETKCTLKSFTVEKGIYQTSNFRVQPTESIVRFPNITNLCPFGEVFNATRFASVYAWNRKRISNCVADYSVLYNSASFSTFKCYGVSPTKLNDLCFTNVYADSFVIRGDEVRQIAPGQTGKIADYNYKLPDDFTGCVIAWNSNNLDSKVGGNYNYLYRLFRKSNLKPFERDISTEIYQAGSTPCNGVEGFNCYFPLQSYGFQPTNGVGYQPYRVVVLSFELLHAPATVCGPKKSTNLVKNKCVNFNFNGLTGTGVLTESNKKFLPFQQFGRDIADTTDAVRDPQTLEILDITPCSFGGVSVITPGTNTSNQVAVLYQDVNCTEVPVAIHADQLTPTWRVYSTGSNVFQTRAGCLIGAEHVNNSYECDIPIGAGICASYQTQTNSPRRARSVASQSIIAYTMSLGAENSVAYSNNSIAIPTNFTISVTTEILPVSMTKTSVDCTMYICGDSTECSNLLLQYGSFCTQLNRALTGIAVEQDKNTQEVFAQVKQIYKTPPIKDFGGFNFSQILPDPSKPSKRSFIEDLLFNKVTLADAGFIKQYGDCLGDIAARDLICAQKFNGLTVLPPLLTDEMIAQYTSALLAGTITSGWTFGAGAALQIPFAMQMAYRFNGIGVTQNVLYENQKLIANQFNSAIGKIQDSLSSTASALGKLQDVVNQNAQALNTLVKCLSSNFGAISSVLNDILSRLDKVEAEVQIDRLITGRLQCLQTYVTQQLIRAAEIRASANLAATKMSECVLGQSKRVDFCGKGYHLMSFPQSAPHGVVFLHVTYVPAQEKNFTTAPAICHDGKAHFPREGVFVSNGTHWFVTQRNFYEPQIITTDNTFVSGNCDVVIGIVNNTVYDPLQPELDSGGGGSDIDPYKEFGSSYQLLNFLPLDFFPDLNALVDTATALYEEELTGREHCSPHHTAIRQALVCWDELTKLIAWMSSNITSEQVRTIIVNHVNDTWGLKVRQSLWFHLSCLTFGQHTVQEFLVSFGVWIRTPAPYRPPNAPILSTLPEHTVIC

SEQ ID NO: 11346 - protein, 1301 aa, Artificial Sequence
  SARS-CoV-2/Hong Kong/case85_VM20002868/2020__EPI_ISL_414519 spike protein (1-1147)(Q965C_S1003C) WhcAg construct
MFVFLVLVPLVSSQCVNLTTRTQLPPAYTNSFTRGVYYPDKVFRSSVLHSTQDLFLPFFSNVTWFHAIHVSGTNGTKRFDNPVLPFNDGVYFASTEKSNIIRGWIFGTTLDSKTQSLLIVNNATNVVIKVCEFQFCNDPFLGVYYHKNNKSWMESEFRVYSSANNCTFEYVSQPFLMDLEGKQGNFKNLREFVFKNIDGYFKIYSKHTPINLVRDLPQGFSALEPLVDLPIGINITRFQTLLALHRSYLTPGDSSSGWTAGAAAYYVGYLQPRTFLLKYNENGTITDAVDCALDPLSETKCTLKSFTVEKGIYQTSNFRVQPTESIVRFPNITNLCPFGEVFNATRFASVYAWNRKRISNCVADYSVLYNSASFSTFKCYGVSPTKLNDLCFTNVYADSFVIRGDEVRQIAPGQTGKIADYNYKLPDDFTGCVIAWNSNNLDSKVGGNYNYLYRLFRKSNLKPFERDISTEIYQAGSTPCNGVEGFNCYFPLQSYGFQPTNGVGYQPYRVVVLSFELLHAPATVCGPKKSTNLVKNKCVNFNFNGLTGTGVLTESNKKFLPFQQFGRDIADTTDAVRDPQTLEILDITPCSFGGVSVITPGTNTSNQVAVLYQDVNCTEVPVAIHADQLTPTWRVYSTGSNVFQTRAGCLIGAEHVNNSYECDIPIGAGICASYQTQTNSPRRARSVASQSIIAYTMSLGAENSVAYSNNSIAIPTNFTISVTTEILPVSMTKTSVDCTMYICGDSTECSNLLLQYGSFCTQLNRALTGIAVEQDKNTQEVFAQVKQIYKTPPIKDFGGFNFSQILPDPSKPSKRSFIEDLLFNKVTLADAGFIKQYGDCLGDIAARDLICAQKFNGLTVLPPLLTDEMIAQYTSALLAGTITSGWTFGAGAALQIPFAMQMAYRFNGIGVTQNVLYENQKLIANQFNSAIGKIQDSLSSTASALGKLQDVVNQNAQALNTLVKCLSSNFGAISSVLNDILSRLDKVEAEVQIDRLITGRLQCLQTYVTQQLIRAAEIRASANLAATKMSECVLGQSKRVDFCGKGYHLMSFPQSAPHGVVFLHVTYVPAQEKNFTTAPAICHDGKAHFPREGVFVSNGTHWFVTQRNFYEPQIITTDNTFVSGNCDVVIGIVNNTVYDPLQPELDSGGGGSDIDPYKEFGSSYQLLNFLPLDFFPDLNALVDTATALYEEELTGREHCSPHHTAIRQALVCWDELTKLIAWMSSNITSEQVRTIIVNHVNDTWGLKVRQSLWFHLSCLTFGQHTVQEFLVSFGVWIRTPAPYRPPNAPILSTLPEHTVIC

SEQ ID NO: 11347 - protein, 1301 aa, Artificial Sequence; identical to SEQ ID NO: 11337
  SARS-CoV-2/England/200990660/2020__EPI_ISL_414523 spike protein (1-1147)(Q965C_S1003C) WhcAg construct

SEQ ID NO: 11348 - protein, 1301 aa, Artificial Sequence
  SARS-CoV-2/Australia/NSW09/2020__EPI_ISL_413595 spike protein (1-1147)(Q965C_S1003C) WhcAg construct
MFVFLVLLPLVSSQCVNLTTRTQLPPAYTNSFTRGVYYPDKVFRSSVLHSTQDLFLPFFSNVTWFHAIHVSGTNGTKRFDNPVLPFNDGVYFASTEKSNIIRGWIFGTTLDSKTQSLLIVNNATNVVIKVCEFQFCNDPFLGVYYHKNNKSWMESEFRVYSSANNCTFEYVSQPFLMDLEGKQGNFKNLREFVFKNIDGYFKIYSKHTPINLVRDLPQGFSALEPLVDLPIGINITRFQTLLALHRSYLTPGDSSSGWTAGAAAYYVGYLQPRTFLLKYNENGTITDAVDCALDPLSETKCTLKSFTVEKGIYQTSNFRVQPTESIVRFPNITNLCPFGEVFNATRFASVYAWNRKRISNCVADYSVLYNSASFSTFKCYGVSPTKLNDLCFTNVYADSFVIRGDEVRQIAPGQTGKIADYNYKLPDDFTGCVIAWNSNNLDSKVGGNYNYLYRLFRKSNLKPFERDISTEIYQAGSTPCNGVEGFNCYFPLQSYGFQPTNGVGYQPYRVVVLSFELLHAPATVCGPKKSTNLVKNKCVNFNFNGLTGTGVLTESNKKFLPFQQFGRDIADTTDAVRDPQTLEILDITPCSFGGVSVITPGTNTSNQVAVLYQDVNCTEVPVAIHADQLTPTWRVYSTGSNVFQTRAGCLIGAEHVNNSYECDIPIGAGICASYQTQTNSPRRARSVASQSIIAYTMSLGAENSVAYSNNSIAIPTNFTISVTTEILPVSMTKTSVDCTMYICGDSTECSNLLLQYGSFCTQLNRALTGIAVEQDKNTQEVFAQVKQIYKTPPIKDFGGFNFSQILPDPSKPSKRSFIEDLLFNKVTLADAGFIKQYGDCLGDIAARDLICAQKFNGLTVLPPLLTDEMIAQYTSALLAGTITSGWTFGAGAALQIPFAMQMAYRFNGIGVTQNVLYENQKLIANQFNSAIGKIQDSLSFTASALGKLQDVVNQNAQALNTLVKCLSSNFGAISSVLNDILSRLDKVEAEVQIDRLITGRLQCLQTYVTQQLIRAAEIRASANLAATKMSECVLGQSKRVDFCGKGYHLMSFPQSAPHGVVFLHVTYVPAQEKNFTTAPAICHDGKAHFPREGVFVSNGTHWFVTQRNFYEPQIITTDNTFVSGNCDVVIGIVNNTVYDPLQPELDSGGGGSDIDPYKEFGSSYQLLNFLPLDFFPDLNALVDTATALYEEELTGREHCSPHHTAIRQALVCWDELTKLIAWMSSNITSEQVRTIIVNHVNDTWGLKVRQSLWFHLSCLTFGQHTVQEFLVSFGVWIRTPAPYRPPNAPILSTLPEHTVIC

SEQ ID NO: 11349 - protein, 1301 aa, Artificial Sequence; identical to SEQ ID NO: 11329
  SARS-CoV-2/Australia/NSW10/2020__EPI_ISL_413596 spike protein (1-1147)(Q965C_S1003C) WhcAg construct

SEQ ID NO: 11350 - protein, 1301 aa, Artificial Sequence
  SARS-CoV-2/Switzerland/1000477797/2020__EPI_ISL_413023 spike protein (1-1147)(Q965C_S1003C) WhcAg construct
MFVFLVLLPLVSSQCVNLTTRTQLPPAYTNSFTRGVYYPDKVFRSSVLHSTQDLFLPFFSNVTWFHAIHVSGTNGTKRFDNPVLPFNDGVYFASTEKSNIIRGWIFGTTLDSKTQSLLIVNNATNVVIKVCEFQFCNDPFLGVYYHKNNKSWMESEFRVYSSANNCTFEYVSQPFLMDLEGKQGNFKNLREFVFKNIDGYFNIYSKHTPINLVRDLPQGFSALEPLVDLPIGINITRFQTLLALHRSYLTPGDSSSGWTAGAAAYYVGYLQPRTFLLKYNENGTITDAVDCALDPLSETKCTLKSFTVEKGIYQTSNFRVQPTESIVRFPNITNLCPFGEVFNATRFASVYAWNRKRISNCVADYSVLYNSASFSTFKCYGVSPTKLNDLCFTNVYADSFVIRGDEVRQIAPGQTGKIADYNYKLPDDFTGCVIAWNSNNLDSKVGGNYNYLYRLFRKSNLKPFERDISTEIYQAGSTPCNGVEGFNCYFPLQSYGFQPTNGVGYQPYRVVVLSFELLHAPATVCGPKKSTNLVKNKCVNFNFNGLTGTGVLTESNKKFLPFQQFGRDIADTTDAVRDPQTLEILDITPCSFGGVSVITPGTNTSNQVAVLYQGVNCTEVPVAIHADQLTPTWRVYSTGSNVFQTRAGCLIGAEHVNNSYECDIPIGAGICASYQTQTNSPRRARSVASQSIIAYTMSLGAENSVAYSNNSIAIPTNFTISVTTEILPVSMTKTSVDCTMYICGDSTECSNLLLQYGSFCTQLNRALTGIAVEQDKNTQEVFAQVKQIYKTPPIKDFGGFNFSQILPDPSKPSKRSFIEDLLFNKVTLADAGFIKQYGDCLGDIAARDLICAQKFNGLTVLPPLLTDEMIAQYTSALLAGTITSGWTFGAGAALQIPFAMQMAYRFNGIGVTQNVLYENQKLIANQFNSAIGKIQDSLSSTASALGKLQDVVNQNAQALNTLVKCLSSNFGAISSVLNDILSRLDKVEAEVQIDRLITGRLQCLQTYVTQQLIRAAEIRASANLAATKMSECVLGQSKRVDFCGKGYHLMSFPQSAPHGVVFLHVTYVPAQEKNFTTAPAICHDGKAHFPREGVFVSNGTHWFVTQRNFYEPQIITTDNTFVSGNCDVVIGIVNNTVYDPLQPELDSGGGGSDIDPYKEFGSSYQLLNFLPLDFFPDLNALVDTATALYEEELTGREHCSPHHTAIRQALVCWDELTKLIAWMSSNITSEQVRTIIVNHVNDTWGLKVRQSLWFHLSCLTFGQHTVQEFLVSFGVWIRTPAPYRPPNAPILSTLPEHTVIC

SEQ ID NO: 11351 - protein, 1301 aa, Artificial Sequence
  SARS-CoV-2/Belgium/BA-02291/2020__EPI_ISL_415159 spike protein (1-1147)(Q965C_S1003C) WhcAg construct
MFVFLVLLPLVSSQCVNLTTRTQLPPAYTNSFTRGVYYPDKVFRSSVLHSTQDLFLPFFSNVTWFHAIHVSGTNGTKRFDNPVLPFNDGVYFASTEKSNIIRGWIFGTTLDSKTQSLLIVNNATNVVIKVCEFQFCNDPFLGVYYHKNNKSWMESEFRVYSSANNCTFEYVSQPFLMDLEGKQGNFKNLREFVFKNIDGYFKIYSKHTPINLVRDLPQGFSALEPLVDLPIGINITRFQTLLALHRSYLTPGDSSSGWTAGAAAYYVGYLQPRTFLLKYNENGTITDAVDCALDPLSETKCTLKSFTVEKGIYQTSNFRVQPTESIVRFPNITNLCPFGEVFNATRFASVYAWNRKRISNCVADYSVLYNSASFSTFKCYGVSPTKLNDLCFTNVYADSFVIRGDEVRQIAPGQTGKIADYNYKLPDDFTGCVIAWNSNNLDSKVGGNYNYLYRLFRRSNLKPFERDISTEIYQAGSTPCNGVEGFNCYFPLQSYGFQPTNGVGYQPYRVVVLSFELLPAPATVCGPKKSTNLVKNKCVNFNFNGLTGTGVLTESNKKFLPFQQFGRDIADTTDAVRDPQTLEILDITPCSFGGVSVITPGTNTSNQVAVLYQGVNCTEVPVAIHADQLTPTWRVYSTGSNVFQTRAGCLIGAEHVNNSYECDIPIGAGICASYQTQTNSPRRARSVASQSIIAYTMSLGAENSVAYSNNSIAIPTNFTISVTTEILPVSMTKTSVDCTMYICGDSTECSNLLLQYGSFCTQLNRALTGIAVEQDKNTQEVFAQVKQIYKTPPIKDFGGFNFSQILPDPSKPSKRSFIEDLLFNKVTLADAGFIKQYGDCLGDIAARDLICAQKFNGLTVLPPLLTDEMIAQYTSALLAGTITSGWTFGAGAALQIPFAMQMAYRFNGIGVTQNVLYENQKLIANQFNSAIGKIQDSLSSAAPALGKLQDVVNQNAQALNTLVKCLSSNFGAISSVLNDILSRLDKVEAEVQIDRLITGRLQCLQTYVTQQLIRAAEIRASANLAATKMSECVLGQSKRVDFCGKGYHLMSFPQSAPHGVVFLHVTYVPAQEKNFTTAPAICHDGKAHFPREGVFVSNGTHWFVTQRNFYEPQIITTDNTFVSGNCDVVIGIVNNTVYDPLQPELDSGGGGSDIDPYKEFGSSYQLLNFLPLDFFPDLNALVDTATALYEEELTGREHCSPHHTAIRQALVCWDELTKLIAWMSSNITSEQVRTIIVNHVNDTWGLKVRQSLWFHLSCLTFGQHTVQEFLVSFGVWIRTPAPYRPPNAPILSTLPEHTVIC

SEQ ID NO: 11352 - protein, 1301 aa, Artificial Sequence
  SARS-CoV-2/USA/WA8-UW5/2020__EPI_ISL_413486 spike protein (1-1147)(Q965C_S1003C) WhcAg construct
MFVFLVLLPLVSSQCVNLTTRTQLPPAYTNSFTRGVYYPDKVFRSSVLHSTQDLFLPFFSNVTWFHAIHVSGTNGTKRFDNPVLPFNDGVYFASTEKSNIIRGWIFGTTLDSKTQSLLIVNNATNVVIKVCEFQFCNDPFLGVYYHKNNKSWMESEFRVYSSANNCTFEYVSQPFLMDLEGKQGNFKNLREFVFKNIDGYFKIYSKHTPINLVRDLPQGFSALEPLVDLPIGINITRFQTLLALHRSYLTPGDSSSGWTAGAAAYYVGYLQPRTFLLKYNENGTITDAVDCALDPLSETKCTLKSFTVEKGIYQTSNFRVQPTESIVRFPNITNLCPFGEVFNATRFASVYAWNRKRISNCVADYSVLYNSASFSTFKCYGVSPTKLNDLCFTNVYADSFVIRGDEVRQIAPGQTGKIADYNYKLPDDFTGCVIAWNSNNLDSKVGGNYNYLYRLFRKSNLKPFERDISTEIYQAGSTPCNGVEGFNCYFPLQSYGFQPTNGVGYQPYRVVVLSFELLHAPATVCGPKKSTNLVKNKCVNFNFNGLTGTGVLTESNKKFLPFQQFGRDIADTTDAVRDPQTLEILDITPCSFGGVSVITPGTNTSNQVAVLYQDVNCTEVPVAIHADQLTPTWRVYSTGSNVFQTRAGCLIGAEYVNNSYECDIPIGAGICASYQTQTNSPRRARSVASQSIIAYTMSLGAENSVAYSNNSIAIPTNFTISVTTEILPVSMTKTSVDCTMYICGDSTECSNLLLQYGSFCTQLNRALTGIAVEQDKNTQEVFAQVKQIYKTPPIKDFGGFNFSQILPDPSKPSKRSFIEDLLFNKVTLADAGFIKQYGDCLGDIAARDLICAQKFNGLTVLPPLLTDEMIAQYTSALLAGTITSGWTFGAGAALQIPFAMQMAYRFNGIGVTQNVLYENQKLIANQFNSAIGKIQDSLSSTASALGKLQDVVNQNAQALNTLVKCLSSNFGAISSVLNDILSRLDKVEAEVQIDRLITGRLQCLQTYVTQQLIRAAEIRASANLAATKMSECVLGQSKRVDFCGKGYHLMSFPQSAPHGVVFLHVTYVPAQEKNFTTAPAICHDGKAHFPREGVFVSNGTHWFVTQRNFYEPQIITTDNTFVSGNCDVVIGIVNNTVYDPLQPELDSGGGGSDIDPYKEFGSSYQLLNFLPLDFFPDLNALVDTATALYEEELTGREHCSPHHTAIRQALVCWDELTKLIAWMSSNITSEQVRTIIVNHVNDTWGLKVRQSLWFHLSCLTFGQHTVQEFLVSFGVWIRTPAPYRPPNAPILSTLPEHTVIC

SEQ ID NO: 11353 - protein, 1301 aa, Artificial Sequence
  SARS-CoV-2/England/20102000506/2020__EPI_ISL_415147 spike protein (1-1147)(Q965C_S1003C) WhcAg construct
MFVFLVLLPLVSSQCVNLTTRTQLPPAYTNSFTRGVYYPDKVFRSSVLHSTQDLFLPFFSNVTWFHAIHVSGTNGTKRFDNPVLPFNDGVYFASTEKSNIIRGWIFGTTLDSKTQSLLIVNNATNVVIKVCEFQFCNDPFLGVYYHKNNKSWMESEFRVYSSANNCTFEYVSQPFLMDLEGKQGNFKNLREFVFKNIDGYFKIYSKHTPINLVRDLPQGFSALEPLVDLPIGINITRFQTLLALHRSYLTPGDSSSGWTAGAAAYYVGYLQPRTFLLKYNENGTITDAVDCALDPLSETKCTLKSFTVEKGIYQTSNFRVQPTESIVRFPNITNLCPFGEVFNATRFASVYAWNRKRISNCVADYSVLYNSASFSTFKCYGVSPTKLNDLCFTNVYADSFVIRGDEVRQIAPGQTGKIADYNYKLPDDFTGCVIAWNSNNLDSKVGGNYNYLYRLFRKSNLKPFERDISTEIYQAGSTPCNGVEGFNCYFPLQSYGFQPTNGVGYQPYRVVVLSFELLHAPATVCGPKKSTNLVKNKCVNFNFNGLTGTGVLTESNKKFLPFQQFGRDIADTTDAVRDPQTLEILDITPCSFGGVSVITPGTNTSNQVAVLYQGVNCTEVPVAIHADQLTPTWRVYSTGSNVFQTRAGCLIGAEHVNNSYECDIPIGAGICASYQTQTNSPRRARSVASQSIIAYTMSLGAENSVAYSNNSIAIPTNFTISVTTEILPVSMTKTSVDCTMYICGDSTECSNLLLQYGSFCTQLNRALTGIAVEQDKNTQEVFAQVKQIYKTPPIKDFGGFNFSQILPDPSKPSKRSFIEDLLFNKVTLADAGFIKQYGYCLGDIAARDLICAQKFNGLTVLPPLLTDEMIAQYTSALLAGTITSGWTFGAGAALQIPFAMQMAYRFNGIGVTQNVLYENQKLIANQFNSAIGKIQDSLSSTASALGKLQDVVNQNAQALNTLVKCLSSNFGAISSVLNDILSRLDKVEAEVQIDRLITGRLQCLQTYVTQQLIRAAEIRASANLAATKMSECVLGQSKRVDFCGKGYHLMSFPQSAPHGVVFLHVTYVPAQEKNFTTAPAICHDGKAHFPREGVFVSNGTHWFVTQRNFYEPQIITTDNTFVSGNCDVVIGIVNNTVYDPLQPELDSGGGGSDIDPYKEFGSSYQLLNFLPLDFFPDLNALVDTATALYEEELTGREHCSPHHTAIRQALVCWDELTKLIAWMSSNITSEQVRTIIVNHVNDTWGLKVRQSLWFHLSCLTFGQHTVQEFLVSFGVWIRTPAPYRPPNAPILSTLPEHTVIC

SEQ ID NO: 11354 - protein, 1301 aa, Artificial Sequence
  SARS-CoV-2/Belgium/VAG-03013/2020__EPI_ISL_415155 spike protein (1-1147)(Q965C_S1003C) WhcAg construct
MFVFLVLLPLVSSQCVNLTTRTQLPPAYTNSFTRGVYYPDKVFRSSVLHSTQDLFLPFFSNVTWFHAIHVSGTNGTKRFDNPVLPFNDGVYFASTEKSNIIRGWIFGTTLDSKTQSLLIVNNATNVVIKVCEFQFCNDPFLGVYYHKNNKSWMESEFRVYSSANNCTFEYVSQPFLMDLEGKQGNFKNLREFVFKNIDGYFKIYSKHTPINLVRDLPQGFSALEPLVDLPIGINITRFQTLLALHRSYLTPGDSSSGWTAGAAAYYVGYLQPRTFLLKYNENGTITDAVDCALDPLSETKCTLKSFTVEKGIYQTSNFRVQPTESIVRFPNITNLCPFGEVFNATRFASVYAWNRKRISNCVADYSVLYNSASFSTFKCYGVSPTKLNDLCFTNVYADSFVIRGDEVRQIAPGQTGKIADYNYKLPDDFTGCVIAWNSNNLDSKVGGNYNYLYRLFRKSNLKPFERDISTEIYQAGSTPCNGVEGFNCYFPLQSYGFQPTNGVGYQPYRVVVLSFELLHAPATVCGPKKSTNLVKNKCVNFNFNGLTGTGVLTESNKKFLPFQQFGRDIADTTDAVRDPQTLEILDITPCSFGGVSVITPGTNTSNQVAVLYQGVNCTEVPVAIHADQLTPTWRVYSTGSNVFQTRAGCLIGAEHVNNSYECDIPIGAGICASYQTQTNSPRRARSVASQSIIAYTMSLGAENSVAYSNNSIAIPTNFTISVTTEILPVSMTKTSVDCTMYICGDSTECSNLLLQYGSFCTQLNRALTGIAVEQDKNTQEVFAQVKQIYKTPPIKDFGGFNFSQILPDPSKPSKRSFIEDLLFNKVTLADAGFIKQYGDCLGDIAARDLICAQKFNGLTVLPPLLTDEMIAQYTSALLAGTITSGWTFGAGAALQIPFAMQMAYRFNGIGVTQNVLYENQKLIANQFNSAIGKIQDSLSSTATALGKLQDVVNQNAQALNTLVKCLSSNFGAISSVLNDILSRLDKVEAEVQIDRLITGRLQCLQTYVTQQLIRAAEIRASANLAATKMSECVLGQSKRVDFCGKGYHLMSFPQSAPHGVVFLHVTYVPAQEKNFTTAPAICHDGKAHFPREGVFVSNGTHWFVTQRNFYEPQIITTDNTFVSGNCDVVIGIVNNTVYDPLQPELDSGGGGSDIDPYKEFGSSYQLLNFLPLDFFPDLNALVDTATALYEEELTGREHCSPHHTAIRQALVCWDELTKLIAWMSSNITSEQVRTIIVNHVNDTWGLKVRQSLWFHLSCLTFGQHTVQEFLVSFGVWIRTPAPYRPPNAPILSTLPEHTVIC

SEQ ID NO: 11355 - protein, 1301 aa, Artificial Sequence
  SARS-CoV-2/Belgium/BC-03016/2020__EPI_ISL_415157 spike protein (1-1147)(Q965C_S1003C) WhcAg construct
MFVFLVLLPLVSSQCVNLTTRTQLPPAYTNSFTRGVYYPDKVFRSSVLHSTQDLFLPFFSNVTWFHAIHVSGTNGTKRFDNPVLPFNDGVYFASTEKSNIIRGWIFGTTLDSKTQSLLIVNNATNVVIKVCEFQFCNDPFLGVYYHKNNKSWMESEFRVYSSANNCTFEYVSQPFLMDLEGKQGNFKNLREFVFKNIDGYFKIYSKHTPINLVRDLPQGFSALEPLVDLPIGINITRFQTLLALHRSYLTPGDSSSGWTAGAAAYYVGYLQPRTFLLKYNENGTITDAVDCALDPLSETKCTLKSFTVEKGIYQTSNFRVQPTESIVRFPNITNLCPFGEVFNATRFASVYAWNRKRISNCVADYSVLYNSASFSTFKCYGVSPTKLNDLCFTNVYADSFVIRGDEVRQIAPGQTGKIADYNYKLPDDFTGCVIAWNSNNLDSKVGGNYNYLYRLFRKSNLKPFERDISTEIYQAGSTPCNGVEGFNCYFPLQSYGFQPTNGVGYQPYRVVVLSFELLHAPATVCGPKKSTNLVKNKCVNFNFNGLTGTGVLTESNKKFLPFQQFGRDIADTTDAVRDPQTLEILDITPCSFGGVSVITPGTNTSNQVAVLYQGVNCTEVPVAIHADQLTPTWRVYSTGSNVFQTRAGCLIGAEHVNNSYECDIPIGAGICASYQTQTNSPRRARSVASQSIIAYTMSLGAENSVAYSNNSIAIPTNFTISVTTEILPVSMTKTSVDCTMYICGDSTECSNLLLQYGSFCTQLNRALTGIAVEQDKNTQEVFAQVKQIYKTPPIKDFGGFNFSQILPDPSKPSKRSFIEDLLFNKVTLADAGFIKQYGDCLGDIAARDLICAQKFNGLTVLPPLLTDEMIAQYTSALLAGTITSGWTFGAGAALQIPFAMQMAYRFNGIGVTQNVLYENQKLIANQFNSAIGKIQDSLSSTAPALGKLQDVVNQNAQALNTLVKCLSSNFGAISSVLNDILSRLDKVEAEVQIDRLITGRLQCLQTYVTQQLIRAAEIRASANLAATKMSECVLGQSKRVDFCGKGYHLMSFPQSAPHGVVFLHVTYVPAQEKNFTTAPAICHDGKAHFPREGVFVSNGTHWFVTQRNFYEPQIITTDNTFVSGNCDVVIGIVNNTVYDPLQPELDSGGGGSDIDPYKEFGSSYQLLNFLPLDFFPDLNALVDTATALYEEELTGREHCSPHHTAIRQALVCWDELTKLIAWMSSNITSEQVRTIIVNHVNDTWGLKVRQSLWFHLSCLTFGQHTVQEFLVSFGVWIRTPAPYRPPNAPILSTLPEHTVIC

SEQ ID NO: 11356 - protein, 1301 aa, Artificial Sequence
  SARS-CoV-2/Germany/BavPat3/2020__EPI_ISL_414521 spike protein (1-1147)(Q965C_S1003C) WhcAg construct
MFVFLVLLPLVSSQCVNLTTRTQLPPAYTNSFTRGVYYPDKVFRSSVLHSTQDLFLPFFSNVTWFHAIHVSGTNGTKRFDNPVLPFNDGVYFASTEKSNIIRGWIFGTTLDSKTQSLLIVNNATNVVIKVCEFQFCNDPFLGVYYHKNNKSWMESEFRVYSSANNCTFEYVSQPFLMDLEGKQGNFKNLREFVFKNIDGYFKIYSKHTPINLVRDLPQGFSALEPLVDLPIGINITRFQTLLALHRSYLTPGDSSSGWTAGAAAYYVGYLQPRTFLLKYNENGTITDAVDCALDPLSETKCTLKSFTVEKGIYQTSNFRVQPTESIVRFPNITNLCPFGEVFNATRFASVYAWNRKRISNCVADYSVLYNSASFSTFKCYGVSPTKLNDLCFTNVYADSFVIRGDEVRQIAPGQTGKIADYNYKLPDDFTGCVIAWNSNNLDSKVGGNYNYLYRLFRKSNLKPFERDISTEIYQAGSTPCNGVEGFNCYFPLQSYGFQPTNGVGYQPYRVVVLSFELLHAPATVCGPKKSTNLVKNKCVNFNFNGLTGTGVLTESNKKFLPFQQFGRDIADTTDAVRDPQTLEILDITPCSFGGVSVITPGTNTSNQVAVLYQDVNCTEVPVAIHADQLTPTWRVYSTGSNVFQTRAGCLIGAEHVNNSYECDIPIGAGICASYQTQTNSPRRARSVASQSIIAYTMSLGAENSVAYSNNSIAIPTNFTISVTTEILPVSMTKTSVDCTMYICGDSTECSNLLLQYGSFCTQLNRALTGIAVEQDKNTQQVFAQVKQIYKTPPIKDFGGFNFSQILPDPSKPSKRSFIEDLLFNKVTLADAGFIKQYGDCLGDIAARDLICAQKFNGLTVLPPLLTDEMIAQYTSALLAGTITSGWTFGAGAALQIPFAMQMAYRFNGIGVTQNVLYENQKLIANQFNSAIGKIQDSLSSTASALGKLQDVVNQNAQALNTLVKCLSSNFGAISSVLNDILSRLDKVEAEVQIDRLITGRLQCLQTYVTQQLIRAAEIRASANLAATKMSECVLGQSKRVDFCGKGYHLMSFPQSAPHGVVFLHVTYVPAQEKNFTTAPAICHDGKAHFPREGVFVSNGTHWFVTQRNFYEPQIITTDNTFVSGNCDVVIGIVNNTVYDPLQPELDSGGGGSDIDPYKEFGSSYQLLNFLPLDFFPDLNALVDTATALYEEELTGREHCSPHHTAIRQALVCWDELTKLIAWMSSNITSEQVRTIIVNHVNDTWGLKVRQSLWFHLSCLTFGQHTVQEFLVSFGVWIRTPAPYRPPNAPILSTLPEHTVIC

SEQ ID NO: 11357 - protein, 1301 aa, Artificial Sequence
  SARS-CoV-2/France/HF1805/2020__EPI_ISL_414628 spike protein (1-1147)(Q965C_S1003C) WhcAg construct
MFVFLVLLPLVSSQCVNLTTRTQLPPAYTNSFTRGVYYPDKVFRSSVLHSTQDLFLPFFSNVTWFHAIHVSGTNGTKRFDNPVLPFNDGVYFASTEKSNIIRGWIFGTTLDSKTQSLLIVNNATNVVIKVCEFQFCNDPFLGVYYHKNNKSWMESEFRVYSSANNCTFEYVSQPFLMDLEGKQGNFKNLREFVFKNIDGYFKIYSKHTPINLVRDLPQGFSALEPLVDLPIGINITRFQTLLALHRSYLTPGDSSSGWTAGAAAYYVGYLQPRTFLLKYNENGTITDAVDCALDPLSETKCTLKSFTVEKGIYQTSNFRVQPTESIVRFPNITNLCPFGEVFNATRFASVYAWNRKRISNCVADYSVLYNSASFSTFKCYGVSPTKLNDLCFTNVYADSFVIRGDEVRQIAPGQTGKIADYNYKLPDDFTGCVIAWNSNNLDSKVGGNYNYLYRLFRKSNLKPFERDISTEIYQAGSTPCNGVEGFNCYFPLQSYGFQPTNGVGYQPYRVVVLSFELLHAPATVCGPKKSTNLVKNKCVNFNFNGLTGTGVLTESNKKFLPFQQFGRDIADTTDAVRDPQTLEILDITPCSFGGVSVITPGTNTSNQVAVLYQGVNCTEVPVAIHADQLTPTWRVYSTGSNVFQTRAGCLIGAEHVNNSYECDIPIGAGICASYQTQTNSPRRARSVASQSIIAYTMSLGAENSVAYSNNSIAIPTNFTISVTTEILPVSMTKTSVDCTMYICGDSTECSNLLLQYGSFCTQLNRALTGIAVEQDKNTQEVFAQVKQIYKTPPIKDFGGFNFSQILPDPSKPSKRSFIEDLLFNKVTLADAGFIKQYGDCLGDIAARDLICAQKFNGLTVLPPLLTDEMIAQYTSALLAGTITSGWTFGAGAALQIPFAMQMAYRFNGIGVTQNVLYENQKLIANQFNSAIGKIQDSLSSTASALGKLQDVVNQNAQALNTLVKCLSSNFGAISSVLNDILSRLDKVEAEVQIDRLITGRLQCLQTYVTQQLIRAAEIRASANLAATKMSECVLGQSKRVDFCGKGYHLMSFPQSAPHGVVFLHVTYVPAQEKNFTTAPAICHDGKAHFPREGVFVSNGTHWFVTQRNFYEPQIITTDNTFVSGNCDVVIGVVNNTVYDPLQPELDSGGGGSDIDPYKEFGSSYQLLNFLPLDFFPDLNALVDTATALYEEELTGREHCSPHHTAIRQALVCWDELTKLIAWMSSNITSEQVRTIIVNHVNDTWGLKVRQSLWFHLSCLTFGQHTVQEFLVSFGVWIRTPAPYRPPNAPILSTLPEHTVIC

SEQ ID NO: 11358 - protein, 1301 aa, Artificial Sequence
  SARS-CoV-2/Netherlands/ZuidHolland_9/2020__EPI_ISL_414445 spike protein (1-1147)(Q965C_S1003C) WhcAg construct
MFVFLVLLPLVSSQCVNLTTRTQLPPAYTNSFTRGVYYPDKVFRSSVLHSTQDLFLPFFSNVTWFHAIHVSGTNGTKRFDNPVLPFNDGVYFASTEKSNIIRGWIFGTTLDSKTQSLLIVNNATNVVIKVCEFQFCNDPFLGVYYHKNNKSWMESEFRVYSSANNCTFEYVSQPFLMDLEGKQGNFKNLREFVFKNIDGYFKIYSKHTPINLVRDLPQGFSALEPLVDLPIGINITRFQTLLALHRSYLTPGDSSSGWTAGAAAYYVGYLQPRTFLLKYNENGTITDAVDCALDPLSETKCTLKSFTVEKGIYQTSNFRVQPTESIVRFPNITNLCPFGEVFNATRFASVYAWNRKRISNCVADYSVLYNSASFSTFKCYGVSPTKLNDLCFTNVYADSFVIRGDEVRQIAPGQTGKIADYNYKLPDDFTGCVIAWNSNNLDSKVGGNYNYLYRLFRKSNLKPFERDISTEIYQAGSTPCNGVEGFNCYFPLQSYGFQPTNGVGYQPYRVVVLSFELLHAPATVCGPKKSTNLVKNKCVNFNFNGLTGTGVLTESNKKFLPFQQFGRDIADTTDAVRDPQTLEILDITPCSFGGVSVITPGTNTSNQVAVLYQGVNCTEVPVAIHADQLTPTWRVYSTGSNVFQTRAGCLIGAEHVNNSYECDIPIGAGICASYQTQTNSPRRARSVASQSIIAYTMSLGAENSVAYSNNSIAIPTNFTISVTTEILPVSMTKTSVDCTMYICGDSTECSNLLLQYGSFCTQLNRALTGIAVEQDKNTQEVFAQVKQIYKTPPIKDFGGFNFSQILPDPSKPSKRSFIEDLLFNKVTLADAGFIKQYGDCLGDIAARDLICVQKFNGLTVLPPLLTDEMIAQYTSALLAGTITSGWTFGAGAALQIPFAMQMAYRFNGIGVTQNVLYENQKLIANQFNSAIGKIQDSLSSTASALGKLQDVVNQNAQALNTLVKCLSSNFGAISSVLNDILSRLDKVEAEVQIDRLITGRLQCLQTYVTQQLIRAAEIRASANLAATKMSECVLGQSKRVDFCGKGYHLMSFPQSAPHGVVFLHVTYVPAQEKNFTTAPAICHDGKAHFPREGVFVSNGTHWFVTQRNFYEPQIITTDNTFVSGNCDVVIGIVNNTVYDPLQPELDSGGGGSDIDPYKEFGSSYQLLNFLPLDFFPDLNALVDTATALYEEELTGREHCSPHHTAIRQALVCWDELTKLIAWMSSNITSEQVRTIIVNHVNDTWGLKVRQSLWFHLSCLTFGQHTVQEFLVSFGVWIRTPAPYRPPNAPILSTLPEHTVIC

SEQ ID NO: 11359 - protein, 1301 aa, Artificial Sequence
  SARS-CoV-2/Finland/FIN03032020A/2020__EPI_ISL_413602 spike protein (1-1147)(Q965C_S1003C) WhcAg construct
MFVFLVLLPLVSSQCVNLTTRTQLPPAYTNSFTRGVYYPDKVFRSSVLHSTQDLFLPFFSNVTWFHAIHVSGTNGTKRFDNPVLPFNDGVYFASTEKSNIIRGWIFGTTLDSKTQSLLIVNNATNVVIKVCEFQFCNDPFLGVYYHKNNKSWMESEFRVYSSANNCTFEYVSQPFLMDLEGKQGNFKNLREFVFKNIDGYFKIYSKHTPINLVRDLPQGFSALEPLVDLPIGINITRFQTLLALHRSYLTPGDSSSGWTAGAAAYYVGYLQPRTFLLKYNENGTITDAVDCALDPLSETKCTLKSFTVEKGIYQTSNFRVQPTESIVRFPNITNLCPFGEVFNATRFASVYAWNRKRISNCVADYSVLYNSASFSTFKCYGVSPTKLNDLCFTNVYADSFVIRGDEVRQIAPGQTGKIADYNYKLPDDFTGCVISWNSNNLDSKVGGNYNYLYRLFRKSNLKPFERDISTEIYQAGSTPCNGVEGFNCYFPLQSYGFQPTNGVGYQPYRVVVLSFELLHAPATVCGPKKSTNLVKNKCVNFNFNGLTGTGVLTESNKKFLPFQQFGRDIADTTDAVRDPQTLEILDITPCSFGGVSVITPGTNTSNQVAVLYQGVNCTEVPVAIHADQLTPTWRVYSTGSNVFQTRAGCLIGAEHVNNSYECDIPIGAGICASYQTQTNSPRRARSVASQSIIAYTMSLGAENSVAYSNNSIAIPTNFTISVTTEILPVSMTKTSVDCTMYICGDSTECSNLLLQYGSFCTQLNRALTGIAVEQDKNTQEVFAQVKQIYKTPPIKDFGGFNFSQILPDPSKPSKRSFIEDLLFNKVTLADAGFIKQYGDCLGDIAARDLICAQKFNGLTVLPPLLTDEMIAQYTSALLAGTITSGWTFGAGAALQIPFAMQMAYRFNGIGVTQNVLYENQKLIANQFNSAIGKIQDSLSSTASALGKLQDVVNQNAQALNTLVKCLSSNFGAISSVLNDILSRLDKVEAEVQIDRLITGRLQCLQTYVTQQLIRAAEIRASANLAATKMSECVLGQSKRVDFCGKGYHLMSFPQSAPHGVVFLHVTYVPAQEKNFTTAPAICHDGKAHFPREGVFVSNGTHWFVTQRNFYEPQIITTDNTFVSGNCDVVIGIVNNTVYDPLQPELDSGGGGSDIDPYKEFGSSYQLLNFLPLDFFPDLNALVDTATALYEEELTGREHCSPHHTAIRQALVCWDELTKLIAWMSSNITSEQVRTIIVNHVNDTWGLKVRQSLWFHLSCLTFGQHTVQEFLVSFGVWIRTPAPYRPPNAPILSTLPEHTVIC

SEQ ID NO: 11360 - protein, 1301 aa, Artificial Sequence
  SARS-CoV-2/France/GE1977/2020__EPI_ISL_414632 spike protein (1-1147)(Q965C_S1003C) WhcAg construct
MFVFLVLLPLVSSQCVNLTTRTQLPPAYTNSFTRGVYYPDKVFRSSVLHSTQDLFLPFFSNVTWFHAIHVSGTNGTKRFDNPVLPFNDGVYFASTEKSNIIRGWIFGTTLDSKTQSLLIVNNATNVVIKVCEFQFCNDPFLGVYYHKNNKSWMESEFRVYSSANNCTFEYVSQPFLMDLEGKQGNFKNLREFVFKNIDGYFKIYSKHTPINLVRDLPQGFSALEPLVDLPIGINITRFQTLLALHRSYLTPGDSSSGWTAGAAAYYVGYLQPRTFLLKYNENGTITDAVDCALDPLSETKCTLKSFTVEKGIYQTSNFRVQPTESIVRFPNITNLCPFGEVFNATRFASVYAWNRKRISNCVADYSVLYNSASFSTFKCYGVSPTKLNDLCFTNVYADSFVIRGDEVRQIAPGQTGKIADYNYKLPDDFTGCVIAWNSNNLDSKVGGNYNYLYRLFRKSNLKPFERDISTEIYQAGSTPCNGVEGFNCYFPLQSYGFQPTNGVGYQPYRVVVLSFELLHAPATVCGPKKSTNLVKNKCVNFNFNGLTGTGVLTESNKKFLPFQQFGRDIADTTDAVRDPQTLEILDITPCSFGGVSVITPGTNTSNQVAVLYQGVNCTEVPVAIHADQLTPTWRVYSTGSNVFQTRAGCLIGAEHVNNSYECDIPIGAGICASYQTQTNSPRRARSVASQSIIAYTMSLGAENSVAYSNNSIAIPTNFTISVTTEILPVSMTKTSVDCTMYICGDSTECSNLLLQYGSFCTQLNRALTGIAVEQDKNTQEVFAQVKQIYKTPPIKDFGGFNFSQILPDPSKPSKRSFIEDLLFNKVTLADAGFIKQYGDCLGDIAARDLICAQKFNGLTVLPPLLTDEMIAQYTSALLAGTITSGWTFGAGAALQIPFAMQMAYRFNGIGVTQNVLYENQKLIANQFNSAIGKIQDSLFSTASALGKLQDVVNQNAQALNTLVKCLSSNFGAISSVLNDILSRLDKVEAEVQIDRLITGRLQCLQTYVTQQLIRAAEIRASANLAATKMSECVLGQSKRVDFCGKGYHLMSFPQSAPHGVVFLHVTYVPAQEKNFTTAPAICHDGKAHFPREGVFVSNGTHWFVTQRNFYEPQIITTDNTFVSGNCDVVIGIVNNTVYDPLQPELDSGGGGSDIDPYKEFGSSYQLLNFLPLDFFPDLNALVDTATALYEEELTGREHCSPHHTAIRQALVCWDELTKLIAWMSSNITSEQVRTIIVNHVNDTWGLKVRQSLWFHLSCLTFGQHTVQEFLVSFGVWIRTPAPYRPPNAPILSTLPEHTVIC

SEQ ID NO: 11361 - protein, 1301 aa, Artificial Sequence
  SARS-CoV-2/Finland/FIN-313/2020__EPI_ISL_414641 spike protein (1-1147)(Q965C_S1003C) WhcAg construct
MFVFLVLLPLVSSQCVNLTTRTQLPPAYTNSFTRGVYYPDKVFRSSVLHSTQDLFLPFFSNVTWFHAIHVSGTNGTKRFDNPVLPFNDGVYFASTEKSNIIRGWIFGTTLDSKTQSLLIVNNATNVVIKVCEFQFCNDPFLGVYYHKNNKSWMESEFRVYSSANNCTFEYVSQPFLMDLEGKQGNFKNLREFVFKNIDGYFKIYSKHTPINLVRDLPQGFSALEPLVDLPIGINITRFKTLLALHRSYLTPGDSSSGWTAGAAAYYVGYLQPRTFLLKYNENGTITDAVDCALDPLSETKCTLKSFTVEKGIYQTSNFRVQPTESIVRFPNITNLCPFGEVFNATRFASVYAWNRKRISNCVADYSVLYNSASFSTFKCYGVSPTKLNDLCFTNVYADSFVIRGDEVRQIAPGQTGKIADYNYKLPDDFTGCVIAWNSNNLDSKVGGNYNYLYRLFRKSNLKPFERDISTEIYQAGSTPCNGVEGFNCYFPLQSYGFQPTNGVGYQPYRVVVLSFELLHAPATVCGPKKSTNLVKNKCVNFNFNGLTGTGVLTESNKKFLPFQQFGRDIADTTDAVRDPQTLEILDITPCSFGGVSVITPGTNTSNQVAVLYQGVNCTEVPVAIHADQLTPTWRVYSTGSNVFQTRAGCLIGAEHVNNSYECDIPIGAGICASYQTQTNSPRRARSVASQSIIAYTMSLGAENSVAYSNNSIAIPTNFTISVTTEILPVSMTKTSVDCTMYICGDSTECSNLLLQYGSFCTQLNRALTGIAVEQDKNTQEVFAQVKQIYKTPPIKDFGGFNFSQILPDPSKPSKRSFIEDLLFNKVTLADAGFIKQYGDCLGDIAARDLICAQKFNGLTVLPPLLTDEMIAQYTSALLAGTITSGWTFGAGAALQIPFAMQMAYRFNGIGVTQNVLYENQKLIANQFNSAIGKIQDSLSSTASALGKLQDVVNQNAQALNTLVKCLSSNFGAISSVLNDILSRLDKVEAEVQIDRLITGRLQCLQTYVTQQLIRAAEIRASANLAATKMSECVLGQSKRVDFCGKGYHLMSFPQSAPHGVVFLHVTYVPAQEKNFTTAPAICHDGKAHFPREGVFVSNGTHWFVTQRNFYEPQIITTDNTFVSGNCDVVIGIVNNTVYDPLQPELDSGGGGSDIDPYKEFGSSYQLLNFLPLDFFPDLNALVDTATALYEEELTGREHCSPHHTAIRQALVCWDELTKLIAWMSSNITSEQVRTIIVNHVNDTWGLKVRQSLWFHLSCLTFGQHTVQEFLVSFGVWIRTPAPYRPPNAPILSTLPEHTVIC

SEQ ID NO: 11362 - protein, 1301 aa, Artificial Sequence
  SARS-CoV-2/Netherlands/ZuidHolland_2/2020__EPI_ISL_414556 spike protein (1-1147)(Q965C_S1003C) WhcAg construct
MFVFLVLLPLVSSQCVNLTTRTQLPPAYTNSFTRGVYYPDKVFRSSVLHSTQDLFLPFFSNVTWFHAIHVSGTNGTKRFDNPVLPFNDGVYFASTEKSNIIRGWIFGTTLDSKTQSLLIVNNATNVVIKVCEFQFCNDPFLGVYYHKNNKSWMESEFRVYSSANNCTFEYVSQPFLMDLEGKQGNFKNLREFVFKNIDGYFKIYSKHTPINLVRDLPQGFSALEPLVDLPIGINITRFQTLLALHRSYLTPGDSSSGWTAGAAAYYVGYLQPRTFLLKYNENGTITDAVDCALDPLSETKCTLKSFTVEKGIYQTSNFRVQPTESIVRFPNITNLCPFGEVFNATRFASVYAWNRKRISNCVADYSVLYNSASFSTFKCYGVSPTKLNDLCFTNVYADSFVIRGDEVRQIAPGQTGKIADYNYKLPDDFTGCVIAWNSNNLDSKVGGNYNYLYRLFRKSNLKPFERDISTEIYQAGSTPCNGVEGFNCYFPLQSYGFQPTNGVGYQPYRVVVLSFELLHAPATVCGPKKSTNLVKNKCVNFNFNGLTGTGVLTESNKKFLPFQQFGRDIADTTDAVRDPQTLEILDITPCSFGGVSVITPGTNTSNQVAVLYQGVNCTEVPVAIHADQLTPTWRVYSTGSNVFQTRAGCLIGAEHVNNSYECDIPIGAGICASYQTQTNSPRRARSVASQSIIAYTMSLGAENSVAYSNNSIAIPTNFTISVTTEILPVSMTKTSVDCTMYICGDSTECSNLLLQYGSFCTQLNRALTGIALEQDKNTQEVFAQVKQIYKTPPIKDFGGFNFSQILPDPSKPSKRSFIEDLLFNKVTLADAGFIKQYGDCLGDIAARDLICAQKFNGLTVLPPLLTDEMIAQYTSALLAGTITSGWTFGAGAALQIPFAMQMAYRFNGIGVTQNVLYENQKLIANQFNSAIGKIQDSLSSTASALGKLQDVVNQNAQALNTLVKCLSSNFGAISSVLNDILSRLDKVEAEVQIDRLITGRLQCLQTYVTQQLIRAAEIRASANLAATKMSECVLGQSKRVDFCGKGYHLMSFPQSAPHGVVFLHVTYVPAQEKNFTTAPAICHDGKAHFPREGVFVSNGTHWFVTQRNFYEPQIITTDNTFVSGNCDVVIGIVNNTVYDPLQPELDSGGGGSDIDPYKEFGSSYQLLNFLPLDFFPDLNALVDTATALYEEELTGREHCSPHHTAIRQALVCWDELTKLIAWMSSNITSEQVRTIIVNHVNDTWGLKVRQSLWFHLSCLTFGQHTVQEFLVSFGVWIRTPAPYRPPNAPILSTLPEHTVIC

SEQ ID NO: 11363 - protein, 1301 aa, Artificial Sequence
  SARS-CoV-2/USA/WA-UW31/2020__EPI_ISL_414618 spike protein (1-1147)(Q965C_S1003C) WhcAg construct
MFVFLVLLPLVSSQCVNLTTRTQLPPAYTNSFTRGVYYPDKVFRSSVLHSTQDLFLPFFSNVTWFHAIHVSGTNGTKRFDNPVLPFNDGVYFASTEKSNIIRGWIFGTTLDSKTQSLLIVNNATNVVIKVCEFQFCNDPFLGVYYHKNNKSWMESEFRVYSSANNCTFEYVSQPFLMDLEGKQGNFKNLREFVFKNIDGYFKIYSKHTPINLVRDLPQGFSALEPLVDLPIGINITRFQTLLALHRSYLTPGDSSSGWTAGAAAYYVGYLQPRTFLLKYNENGTITDAVDCALDPLSETKCTLKSFTVEKGIYQTSNFRVQPTESIVRFPNITNLCPFGEVFNATRFASVYAWNRKRISNCVADYSVLYNSASFSTFKCYGVSPTKLNDLCFTNVYADSFVIRGDEVRQIAPGQTGKIADYNYKLPDDFTGCVIAWNSNNLDSKVGGNYNYLYRLFRKSNLKPFERDISTEIYQAGSTPCNGAEGFNCYFPLQSYGFQPTNGVGYQPYRVVVLSFELLHAPATVCGPKKSTNLVKNKCVNFNFNGLTGTGVLTESNKKFLPFQQFGRDIADTTDAVRDPQTLEILDITPCSFGGVSVITPGTNTSNQVAVLYQDVNCTEVPVAIHADQLTPTWRVYSTGSNVFQTRAGCLIGAEHVNNSYECDIPIGAGICASYQTQTNSPRRARSVASQSIIAYTMSLGAENSVAYSNNSIAIPTNFTISVTTEILPVSMTKTSVDCTMYICGDSTECSNLLLQYGSFCTQLNRALTGIAVEQDKNTQEVFAQVKQIYKTPPIKDFGGFNFSQILPDPSKPSKRSFIEDLLFNKVTLADAGFIKQYGDCLGDIAARDLICAQKFNGLTVLPPLLTDEMIAQYTSALLAGTITSGWTFGAGAALQIPFAMQMAYRFNGIGVTQNVLYENQKLIANQFNSAIGKIQDSLSSTASALGKLQDVVNQNAQALNTLVKCLSSNFGAISSVLNDILSRLDKVEAEVQIDRLITGRLQCLQTYVTQQLIRAAEIRASANLAATKMSECVLGQSKRVDFCGKGYHLMSFPQSAPHGVVFLHVTYVPAQEKNFTTAPAICHDGKAHFPREGVFVSNGTHWFVTQRNFYEPQIITTDNTFVSGNCDVVIGIVNNTVYDPLQPELDSGGGGSDIDPYKEFGSSYQLLNFLPLDFFPDLNALVDTATALYEEELTGREHCSPHHTAIRQALVCWDELTKLIAWMSSNITSEQVRTIIVNHVNDTWGLKVRQSLWFHLSCLTFGQHTVQEFLVSFGVWIRTPAPYRPPNAPILSTLPEHTVIC

SEQ ID NO: 11364 - protein, 1301 aa, Artificial Sequence
  SARS-CoV-2/South Korea/SNU01/2020__EPI_ISL_411929 spike protein (1-1147)(Q965C_S1003C) WhcAg construct
MFVFLVLLPLVSSQCVNLTTRTQLPPAYTNSFTRGVYYPDKVFRSSVLHSTQDLFLPFFSNVTWFHAIHVSGTNGTKRFDNPVLPFNDGVYFASTEKSNIIRGWIFGTTLDSKTQSLLIVNNATNVVIKVCEFQFCNDPFLGVYYHKNNKSWMESEFRVYSSANNCTFEYVSQPFLMDLEGKQGNFKNLREFVFKNIDGYFKIYSKHTPINLVRDLPQGFWALEPLVDLPIGINITRFQTLLALHRSYLTPGDSSSGWTAGAAAYYVGYLQPRTFLLKYNENGTITDAVDCALDPLSETKCTLKSFTVEKGIYQTSNFRVQPTESIVRFPNITNLCPFGEVFNATRFASVYAWNRKRISNCVADYSVLYNSASFSTFKCYGVSPTKLNDLCFTNVYADSFVIRGDEVRQIAPGQTGKIADYNYKLPDDFTGCVIAWNSNNLDSKVGGNYNYLYRLFRKSNLKPFERDISTEIYQAGSTPCNGVEGFNCYFPLQSYGFQPTNGVGYQPYRVVVLSFELLHAPATVCGPKKSTNLVKNKCVNFNFNGLTGTGVLTESNKKFLPFQQFGRDIADTTDAVRDPQTLEILDITPCSFGGVSVITPGTNTSNQVAVLYQDVNCTEVPVAIHADQLTPTWRVYSTGSNVFQTRAGCLIGAEHVNNSYECDIPIGAGICASYQTQTNSPRRARSVASQSIIAYTMSLGAENSVAYSNNSIAIPTNFTISVTTEILPVSMTKTSVDCTMYICGDSTECSNLLLQYGSFCTQLNRALTGIAVEQDKNTQEVFAQVKQIYKTPPIKDFGGFNFSQILPDPSKPSKRSFIEDLLFNKVTLADAGFIKQYGDCLGDIAARDLICAQKFNGLTVLPPLLTDEMIAQYTSALLAGTITSGWTFGAGAALQIPFAMQMAYRFNGIGVTQNVLYENQKLIANQFNSAIGKIQDSLSSTASALGKLQDVVNQNAQALNTLVKCLSSNFGAISSVLNDILSRLDKVEAEVQIDRLITGRLQCLQTYVTQQLIRAAEIRASANLAATKMSECVLGQSKRVDFCGKGYHLMSFPQSAPHGVVFLHVTYVPAQEKNFTTAPAICHDGKAHFPREGVFVSNGTHWFVTQRNFYEPQIITTDNTFVSGNCDVVIGIVNNTVYDPLQPELDSGGGGSDIDPYKEFGSSYQLLNFLPLDFFPDLNALVDTATALYEEELTGREHCSPHHTAIRQALVCWDELTKLIAWMSSNITSEQVRTIIVNHVNDTWGLKVRQSLWFHLSCLTFGQHTVQEFLVSFGVWIRTPAPYRPPNAPILSTLPEHTVIC

SEQ ID NO: 11365 - protein, 1301 aa, Artificial Sequence
  SARS-CoV-2/China/WF0004/2020__EPI_ISL_413694 spike protein (1-1147)(Q965C_S1003C) WhcAg construct
MFVFLVLLPLVSSQCVNLTTRTQLPPAYTNSFTRGVYYPDKVFRSSVLHSTQDLFLPFFSNVTWFHAIHVSGTNGTKRFDNPVLPFNDGVYFASTEKSNIIRGWIFGTTLDSKTQSLLIVNNATNVVIKVCEFQFCNDPFLGVYYHKNNKSWTESEFRVYSSANNCTFEYVSQPFLMDLEGKQGNFKNLREFVFKNIDGYFKIYSKHTPINLVRDLPQGFSALEPLVDLPIGINITRFQTLLALHRSYLTPGDSSSGWTAGAAAYYVGYLQPRTFLLKYNENGTITDAVDCALDPLSETKCTLKSFTVEKGIYQTSNFRVQPTESIVRFPNITNLCPFGEVFNATRFASVYAWNRKRISNCVADYSVLYNSASFSTFKCYGVSPTKLNDLCFTNVYADSFVIRGDEVRQIAPGQTGKIADYNYKLPDDFTGCVIAWNSNNLDSKVGGNYNYLYRLFRKSNLKPFERDISTEIYQAGSTPCNGVEGFNCYFPLQSYGFQPTNGVGYQPYRVVVLSFELLHAPATVCGPKKSTNLVKNKCVNFNFNGLTGTGVLTESNKKFLPFQQFGRDIADTTDAVRDPQTLEILDITPCSFGGVSVITPGTNTSNQVAVLYQDVNCTEVPVAIHADQLTPTWRVYSTGSNVFQTRAGCLIGAEHVNNSYECDIPIGAGICASYQTQTNSPRRARSVASQSIIAYTMSLGAENSVAYSNNSIAIPTNFTISVTTEILPVSMTKTSVDCTMYICGDSTECSNLLLQYGSFCTQLNRALTGIAVEQDKNTQEVFAQVKQIYKTPPIKDFGGFNFSQILPDPSKPSKRSFIEDLLFNKVTLADAGFIKQYGDCLGDIAARDLICAQKFNGLTVLPPLLTDEMIAQYTSALLAGTITSGWTFGAGAALQIPFAMQMAYRFNGIGVTQNVLYENQKLIANQFNSAIGKIQDSLSSTASALGKLQDVVNQNAQALNTLVKCLSSNFGAISSVLNDILSRLDKVEAEVQIDRLITGRLQCLQTYVTQQLIRAAEIRASANLAATKMSECVLGQSKRFDFCGKGYHLMSFPQSAPHGVVFLHVTYVPAQEKNFTTAPAICHDGKAHFPREGVFVSNGTHWFVTQRNFYEPQIITTDNTFVSGNCDVVIGIVNNTVYDPLQPELDSGGGGSDIDPYKEFGSSYQLLNFLPLDFFPDLNALVDTATALYEEELTGREHCSPHHTAIRQALVCWDELTKLIAWMSSNITSEQVRTIIVNHVNDTWGLKVRQSLWFHLSCLTFGQHTVQEFLVSFGVWIRTPAPYRPPNAPILSTLPEHTVIC

SEQ ID NO: 11366 - protein, 1301 aa, Artificial Sequence
  SARS-CoV-2/China/WF0028/2020__EPI_ISL_413791 spike protein (1-1147)(Q965C_S1003C) WhcAg construct
MFVFLVLLPLVSSQCVNLTTRTQLPPAYTNSFTRGVYYPDKVFRSSVLHSTQDLFLPFFSNVTWFHAIHVSGTNGTKRFDNPVLPFNDGVYFASTEKSNIIRGWIFGTTLDSKTQSLLIVNNATNVVIKVCEFQFCNDPFLGVYYHKNNKSWMESEFRVYSSANNCTFEYVSQPFLMDLEGKQGNFKNLREFVFKNIDGYFKIYSKHTPINLVRDLPQGFSALEPLVDLPIGINITRFQTLLALHRSYLTPGDSSSGWTAGAAAYYVGYLQPRTFLLKYNENGTITDAVDCALDPLSETKCTLKSFTVEKGIYQTSNFRVQPTESIVRFPNITNLCPFGEVFNATRFASVYAWNRKRISNCVADYSVLYNSASFSTFKCYGVSPTKLNDLCFTNVYADSFVIRGDEVRQIAPGQTGKIADYNYKLPDDFTGCVIAWNSNNLDSKVGGNYNYLYRLFRKSNLKPFERDISTEIYQAGSTPCNGVEGFNCYFPLQSYGFQPTNGVGYQPYRVVVLSFELLHAPATVCGPKKSTNLVKNKCVNFNFNGLTGTGVLTESNKKFLPFQQFGRDIADTTDAVRDPQTLEILDITPCSFGGVSVITPGTNTSNQVAVLYQDVNCTEVPVAIHADQLTPTWRVYSTGSNVFQTRAGCLIGAEHVNNSYECDIPIGAGICASYQTQTNSPRRARSVASQSIIAYTMSLGAENSVAYSNNSIAIPTNFTISVTTEILPVSMTKTSVDCTMYICGDSTECSNLLLQYGSFCTQLNRALTGIAVEQDKNTQEVFAQVKQIYKTPPIKDFGGFNFSQILPDPSKPSKRSFIEDLLFNKVTLADAGFIKQYGDCLGDIAARDLICAQKFNGLTVLPPLLTDEMIAQYTSALLAGTITSGWTFGAGAALQIPFAMQMAYRFNGIGVTQNVLYENQKLIANQFNSAIGKIQDSLSSTASALGKLQDVVNQNAQALNTLVKCLSSNFGAISSVLNDILSRLDKVEAEVQIDRLITGRLQCLQTYVTQQLIRAAEIRASANLAATKMSECVLGQSKRVDFCGKGYHLMSFPQSAPHGVVFLHVTYVPAQEKNFTTAPAICHDGKAHFPREGVFVSNGTHWFVTQRNFYEPQIITTDNTFVSGNCDVVIGIVNNTVYDPLQPELESGGGGSDIDPYKEFGSSYQLLNFLPLDFFPDLNALVDTATALYEEELTGREHCSPHHTAIRQALVCWDELTKLIAWMSSNITSEQVRTIIVNHVNDTWGLKVRQSLWFHLSCLTFGQHTVQEFLVSFGVWIRTPAPYRPPNAPILSTLPEHTVIC

SEQ ID NO: 11367 - protein, 1301 aa, Artificial Sequence
  SARS-CoV-2/2019-nCoV/USA-CruiseA-18/2020__MT159716.1 spike protein (1-1147)(Q965C_S1003C) WhcAg construct
MFVFLVLLPLVSSQCVNLTTRTQLPPAYTNSFTRGVYYPDKVFRSSVLHSTQDLFLPFFSNVTWFHAIHVSGTNGTKRFDNPVLPFNDGVYFASTEKSNIIRGWIFGTTLDSKTQSLLIVNNATNVVIKVCEFQFCNDPFLGVYYHKNNKSWMESELRVYSSANNCTFEYVSQPFLMDLEGKQGNFKNLREFVFKNIDGYFKIYSKHTPINLVRDLPQGFSALEPLVDLPIGINITRFQTLLALHRSYLTPGDSSSGWTAGAAAYYVGYLQPRTFLLKYNENGTITDAVDCALDPLSETKCTLKSFTVEKGIYQTSNFRVQPTESIVRFPNITNLCPFGEVFNATRFASVYAWNRKRISNCVADYSVLYNSASFSTFKCYGVSPTKLNDLCFTNVYADSFVIRGDEVRQIAPGQTGKIADYNYKLPDDFTGCVIAWNSNNLDSKVGGNYNYLYRLFRKSNLKPFERDISTEIYQAGSTPCNGVEGFNCYFPLQSYGFQPTNGVGYQPYRVVVLSFELLHAPATVCGPKKSTNLVKNKCVNFNFNGLTGTGVLTESNKKFLPFQQFGRDIADTTDAVRDPQTLEILDITPCSFGGVSVITPGTNTSNQVAVLYQDVNCTEVPVAIHADQLTPTWRVYSTGSNVFQTRAGCLIGAEHVNNSYECDIPIGAGICASYQTQTNSPRRARSVASQSIIAYTMSLGAENSVAYSNNSIAIPTNFTISVTTEILPVSMTKTSVDCTMYICGDSTECSNLLLQYGSFCTQLNRALTGIAVEQDKNTQEVFAQVKQIYKTPPIKDFGGFNFSQILPDPSKPSKRSFIEDLLFNKVTLADAGFIKQYGDCLGDIAARDLICAQKFNGLTVLPPLLTDEMIAQYTSALLAGTITSGWTFGAGAALQIPFAMQMAYRFNGIGVTQNVLYENQKLIANQFNSAIGKIQDSLSSTASALGKLQDVVNQNAQALNTLVKCLSSNFGAISSVLNDILSRLDKVEAEVQIDRLITGRLQCLQTYVTQQLIRAAEIRASANLAATKMSECVLGQSKRVDFCGKGYHLMSFPQSAPHGVVFLHVTYVPAQEKNFTTAPAICHDGKAHFPREGVFVSNGTHWFVTQRNFYEPQIITTDNTFVSGNCDVVIGIVNNTVYDPLQPELDSGGGGSDIDPYKEFGSSYQLLNFLPLDFFPDLNALVDTATALYEEELTGREHCSPHHTAIRQALVCWDELTKLIAWMSSNITSEQVRTIIVNHVNDTWGLKVRQSLWFHLSCLTFGQHTVQEFLVSFGVWIRTPAPYRPPNAPILSTLPEHTVIC

SEQ ID NO: 11368 - protein, 1301 aa, Artificial Sequence
  SARS-CoV-2/SARS-CoV-2/Yunnan-01/human/2020/CHN__MT049951.1 spike protein (1-1147)(Q965C_S1003C) WhcAg construct
MFVFLVLLPLVSSQCVNLTTRTQLPPANTNSFTRGVYYPDKVFRSSVLHSTQDLFLPFFSNVTWFHAIHVSGTNGTKRFDNPVLPFNDGVYFASTEKSNIIRGWIFGTTLDSKTQSLLIVNNATNVVIKVCEFQFCNDPFLGVYYHKNNKSWMESEFRVYSSANNCTFEYVSQPFLMDLEGKQGNFKNLREFVFKNIDGYFKIYSKHTPINLVRDLPQGFSALEPLVDLPIGINITRFQTLLALHRSYLTPGDSSSGWTAGAAAYYVGYLQPRTFLLKYNENGTITDAVDCALDPLSETKCTLKSFTVEKGIYQTSNFRVQPTESIVRFPNITNLCPFGEVFNATRFASVYAWNRKRISNCVADYSVLYNSASFSTFKCYGVSPTKLNDLCFTNVYADSFVIRGDEVRQIAPGQTGKIADYNYKLPDDFTGCVIAWNSNNLDSKVGGNYNYLYRLFRKSNLKPFERDISTEIYQAGSTPCNGVEGFNCYFPLQSYGFQPTNGVGYQPYRVVVLSFELLHAPATVCGPKKSTNLVKNKCVNFNFNGLTGTGVLTESNKKFLPFQQFGRDIADTTDAVRDPQTLEILDITPCSFGGVSVITPGTNTSNQVAVLYQDVNCTEVPVAIHADQLTPTWRVYSTGSNVFQTRAGCLIGAEHVNNSYECDIPIGAGICASYQTQTNSPRRARSVASQSIIAYTMSLGAENSVAYSNNSIAIPTNFTISVTTEILPVSMTKTSVDCTMYICGDSTECSNLLLQYGSFCTQLNRALTGIAVEQDKNTQEVFAQVKQIYKTPPIKDFGGFNFSQILPDPSKPSKRSFIEDLLFNKVTLADAGFIKQYGDCLGDIAARDLICAQKFNGLTVLPPLLTDEMIAQYTSALLAGTITSGWTFGAGAALQIPFAMQMAYRFNGIGVTQNVLYENQKLIANQFNSAIGKIQDSLSSTASALGKLQDVVNQNAQALNTLVKCLSSNFGAISSVLNDILSRLDKVEAEVQIDRLITGRLQCLQTYVTQQLIRAAEIRASANLAATKMSECVLGQSKRVDFCGKGYHLMSFPQSAPHGVVFLHVTYVPAQEKNFTTAPAICHDGKAHFPREGVFVSNGTHWFVTQRNFYEPQIITTDNTFVSGNCDVVIGIVNNTVYDPLQPELDSGGGGSDIDPYKEFGSSYQLLNFLPLDFFPDLNALVDTATALYEEELTGREHCSPHHTAIRQALVCWDELTKLIAWMSSNITSEQVRTIIVNHVNDTWGLKVRQSLWFHLSCLTFGQHTVQEFLVSFGVWIRTPAPYRPPNAPILSTLPEHTVIC

SEQ ID NO: 11369 - protein, 1301 aa, Artificial Sequence
  SARS-CoV-2/USA/WA-UW292/2020__EPI_ISL_418077 spike protein (1-1147)(Q965C_S1003C) WhcAg construct
MFVFLVLLPLVSSQCVNLTTRTQLPPAYTNSFTRGVYYPDKVFRSSVLHSTQDLFLPFFSNVTWFHAIHVSGTNGTKRFDNPVLPFNDGVYFASTEKSNIIRGWIFGTTLDSKTQSLLIVNNATNVVIKVCEFQFCNDPFLGVYYHKNNKSWMESEFRVYSSANNCTFEYVSQPFLMDLEGKQGNFKNLREFVFKNIDGYFKIYSKHTPINLVRDLPQGFSALEPLVDLPIGINITRFQTLLALHRSYLTPGDSSSGWTAGAAAYYVGYLQPRTFLLKYNENGTITDAVDCALDPLSETKCTLKSFTVEKGIYQTSNFRVQPTESIVRFPNITNLCPFGEVFNATRFASVYAWNRKRISNCVADYSVLYNSASFSTFKCYGVSPTKLNDLCFTNVYADSFVIRGDEVRQIAPGQTGKIADYNYKLPDDFTGCVIAWNSNNLDSKVGGNYNYLYRLFRKSNLKPFERDISTEIYQASSTPCNGVEGFNCYFPLQSYGFQPTNGVGYQPYRVVVLSFELLHAPATVCGPKKSTNLVKNKCVNFNFNGLTGTGVLTESNKKFLPFQQFGRDIADTTDAVRDPQTLEILDITPCSFGGVSVITPGTNTSNQVAVLYQDVNCTEVPVAIHADQLTPTWRVYSTGSNVFQTRAGCLIGAEHVNNSYECDIPIGAGICASYQTQTNSPRRARSVASQSIIAYTMSLGAENSVAYSNNSIAIPTNFTISVTTEILPVSMTKTSVDCTMYICGDSTECSNLLLQYGSFCTQLNRALTGIAVEQDKNTQEVFAQVKQIYKTPPIKDFGGFNFSQILPDPSKPSKRSFIEDLLFNKVTLADAGFIKQYGDCLGDIAARDLICAQKFNGLTVLPPLLTDEMIAQYTSALLAGTITSGWTFGAGAALQIPFAMQMAYRFNGIGVTQNVLYENQKLIANQFNSAIGKIQDSLSSTASALGKLQDVVNQNAQALNTLVKCLSSNFGAISSVLNDILSRLDKVEAEVQIDRLITGRLQCLQTYVTQQLIRAAEIRASANLAATKMSECVLGQSKRVDFCGKGYHLMSFPQSAPHGVVFLHVTYVPAQEKNFTTAPAICHDGKAHFPREGVFVSNGTHWFVTQRNFYEPQIITTDNTFVSGNCDVVIGIVNNTVYDPLQPELDSGGGGSDIDPYKEFGSSYQLLNFLPLDFFPDLNALVDTATALYEEELTGREHCSPHHTAIRQALVCWDELTKLIAWMSSNITSEQVRTIIVNHVNDTWGLKVRQSLWFHLSCLTFGQHTVQEFLVSFGVWIRTPAPYRPPNAPILSTLPEHTVIC

SEQ ID NO: 11370 - protein, 1301 aa, Artificial Sequence
  SARS-CoV-2/Iceland/192/2020__EPI_ISL_417819 spike protein (1-1147)(Q965C_S1003C) WhcAg construct
MFVFFVLLPLVSSQCVNLTTRTQLPPAYTNSFTRGVYYPDKVFRSSVLHSTQDLFLPFFSNVTWFHAIHVSGTNGTKRFDNPVLPFNDGVYFASTEKSNIIRGWIFGTTLDSKTQSLLIVNNATNVVIKVCEFQFCNDPFLGVYYHKNNKSWMESEFRVYSSANNCTFEYVSQPFLMDLEGKQGNFKNLREFVFKNIDGYFKIYSKHTPINLVRDLPQGFSALEPLVDLPIGINITRFQTLLALHRSYLTPGDSSSGWTAGAAAYYVGYLQPRTFLLKYNENGTITDAVDCALDPLSETKCTLKSFTVEKGIYQTSNFRVQPTESIVRFPNITNLCPFGEVFNATRFASVYAWNRKRISNCVADYSVLYNSASFSTFKCYGVSPTKLNDLCFTNVYADSFVIRGDEVRQIAPGQTGKIADYNYKLPDDFTGCVIAWNSNNLDSKVGGNYNYLYRLFRKSNLKPFERDISTEIYQAGSTPCNGVEGFNCYFPLQSYGFQPTNGVGYQPYRVVVLSFELLHAPATVCGPKKSTNLVKNKCVNFNFNGLTGTGVLTESNKKFLPFQQFGRDIADTTDAVRDPQTLEILDITPCSFGGVSVITPGTNTSNQVAVLYQGVNCTEVPVAIHADQLTPTWRVYSTGSNVFQTRAGCLIGAEHVNNSYECDIPIGAGICASYQTQTNSPRRARSVASQSIIAYTMSLGAENSVAYSNNSIAIPTNFTISVTTEILPVSMTKTSVDCTMYICGDSTECSNLLLQYGSFCTQLNRALTGIAVEQDKNTQEVFAQVKQIYKTPPIKDFGGFNFSQILPDPSKPSKRSFIEDLLFNKVTLADAGFIKQYGDCLGDIAARDLICAQKFNGLTVLPPLLTDEMIAQYTSALLAGTITSGWTFGAGAALQIPFAMQMAYRFNGIGVTQNVLYENQKLIANQFNSAIGKIQDSLSSTASALGKLQDVVNQNAQALNTLVKCLSSNFGAISSVLNDILSRLDKVEAEVQIDRLITGRLQCLQTYVTQQLIRAAEIRASANLAATKMSECVLGQSKRVDFCGKGYHLMSFPQSAPHGVVFLHVTYVPAQEKNFTTAPAICHDGKAHFPREGVFVSNGTHWFVTQRNFYEPQIITTDNTFVSGNCDVVIGIVNNTVYDPLQPELDSGGGGSDIDPYKEFGSSYQLLNFLPLDFFPDLNALVDTATALYEEELTGREHCSPHHTAIRQALVCWDELTKLIAWMSSNITSEQVRTIIVNHVNDTWGLKVRQSLWFHLSCLTFGQHTVQEFLVSFGVWIRTPAPYRPPNAPILSTLPEHTVIC

SEQ ID NO: 11371 - protein, 1301 aa, Artificial Sequence
  SARS-CoV-2/Belgium/ULG-6939/2020__EPI_ISL_417020 spike protein (1-1147)(Q965C_S1003C) WhcAg construct
MFVFLVLLPLVSSQCVNLTTRTQLPPAYTNSFTRGVYYPDKVFRSSVLHSTQDLFLPFFSNVTWFHAIHVSGTNGTKRFDNPVLPFNDGVYFASTEKSNIIRGWIFGTTLDSKTQSLLIVNNATNVVIKVCEFQFCNDPFLGVYYHKNNKSWMESEFRVYSSANNCTFEYVSQPFLMDLEGKQGNFKNLREFVFKNIDGYFKIYSKHTPINLVRDLPQGFSALEPLVDLPIGINITRFQTLLALHRSYLTPGDSSSGWTAGAAAYYVGYLQPRTFLLKYNENGTITDAVDCALDPLSETKCTLKSFTVEKGIYQTSNFRVQPTESIVRFPNITNLCPFGEVFNATRFASVYAWNRKRISNCVADYSVLYNSASFSTFKCYGVSPTKLNDLCFTNVYADSFVIRGDEVRQIAPGQTGKIADYNYKLPDDFTGCVIAWNSNNLDSKVGGNYNYLYRLFRKSNLKPFERDISTEIYQAGSTPCNGVEGFNCYFPLQSYGFQPTNGVGYQPYRVVVLSFELLHAPATVCGPKKSTNLVKNKCVNFNFNGLTGTGVLTESNKKFLPFQQFGRDIADTTDAVRDPQTLEILDITPCSFGGVSVITPGTNTSNQVAVLYQGVNCTEVPVAIHADQLTPTWRVYSTGSNVFQTRAGCLIGAEHVNNSYECDIPIGAGICASYQTQTNSPRRARSVASQSIIAYTMSLGAENSVVYSNNSIAIPTNFTISVTTEILPVSMTKTSVDCTMYICGDSTECSNLLLQYGSFCTQLNRALTGIAVEQDKNTQEVFAQVKQIYKTPPIKDFGGFNFSQILPDPSKPSKRSFIEDLLFNKVTLADAGFIKQYGDCLGDIAARDLICAQKFNGLTVLPPLLTDEMIAQYTSALLAGTITSGWTFGAGAALQIPFAMQMAYRFNGIGVTQNVLYENQKLIANQFNSAIGKIQDSLSSTASALGKLQDVVNQNAQALNTLVKCLSSNFGAISSVLNDILSRLDKVEAEVQIDRLITGRLQCLQTYVTQQLIRAAEIRASANLAATKMSECVLGQSKRVDFCGKGYHLMSFPQSAPHGVVFLHVTYVPAQEKNFTTAPAICHDGKAHFPREGVFVSNGTHWFVTQRNFYEPQIITTDNTFVSGNCDVVIGIVNNTVYDPLQPELDSGGGGSDIDPYKEFGSSYQLLNFLPLDFFPDLNALVDTATALYEEELTGREHCSPHHTAIRQALVCWDELTKLIAWMSSNITSEQVRTIIVNHVNDTWGLKVRQSLWFHLSCLTFGQHTVQEFLVSFGVWIRTPAPYRPPNAPILSTLPEHTVIC

SEQ ID NO: 11372 - protein, 1301 aa, Artificial Sequence
  SARS-CoV-2/France/HF2496/2020__EPI_ISL_418231 spike protein (1-1147)(Q965C_S1003C) WhcAg construct
MFVFLVLLPLVSSQCVNLTTRTQLPPAYTNSFTRGVYYPDKVFRSSVLHSTQDLFLPFFSNVTWFHAIHVSGTNGTKRFDNPVLPFNDGVYFASTEKSNIIRGWIFGTTLDSKTQSLLIVNNATNVVIKVCEFQFCNDPFLGVYYHKNNKSWMESEFRVYSSANNCTFEYVSQPFLMDLEGKQGNFKNLREFVFKNIDGYFKIYSKHTPINLVRDLPQGFSALEPLVDLPIGINITRFQTLLALHRSYLTPGDSSSGWTAGAAAYYVGYLQPRTFLLKYNENGTITDAVDCALDPLSETKCTLKSFTVEKGIYQTSNFRVQPTESIVRFPNITNLCPFGEVFNATRFASVYAWNRKRISNCVADYSVLYNSASFSTFKCYGVSPTKLNDLCFTNVYADSFVIRGDEVRQIAPGQTGKIADYNYKLPDDFTGCVIAWNSNNLDSKVGGNYNYLYRLFRKSNLKPFERDISTEIYQAGSTPCNGVEGFNCYFPLQSYGFQPTNGVGYQPYRVVVLSFELLHAPATVCGPKKSTNLVKNKCVNFNFNGLTGTGVLTESNKKFLPFQQFGRDIADTTDAVRDPQTLEILDITPCSFGGVSVITPGTNTSNQVAVLYQGVNCTEVPVAIHADQLTPTWRVYSTGSNVFQTRAGCLIGAEHVNNSYECDIPIGAGICASYQTQTNSPRRARSVASQSIIAYTMSLGAENSVAYSNNSIAIPTNFTISVTTEILPVSMTKTSVDCTMYICGDSTECSNLLLQYGSFCTQLNRALTGIAVEQDKNTQEVFAQVKQIYKTPPIKDFGGFNFSQILPDPSKPSKRSFIEDLLFNKVTLADAGFIKQYGDCLGDIVARDLICAQKFNGLTVLPPLLTDEMIAQYTSALLAGTITSGWTFGAGAALQIPFAMQMAYRFNGIGVTQNVLYENQKLIANQFNSAIGKIQDSLSSTASALGKLQDVVNQNAQALNTLVKCLSSNFGAISSVLNDILSRLDKVEAEVQIDRLITGRLQCLQTYVTQQLIRAAEIRASANLAATKMSECVLGQSKRVDFCGKGYHLMSFPQSAPHGVVFLHVTYVPAQEKNFTTAPAICHDGKAHFPREGVFVSNGTHWFVTQRNFYEPQIITTDNTFVSGNCDVVIGIVNNTVYDPLQPELDSGGGGSDIDPYKEFGSSYQLLNFLPLDFFPDLNALVDTATALYEEELTGREHCSPHHTAIRQALVCWDELTKLIAWMSSNITSEQVRTIIVNHVNDTWGLKVRQSLWFHLSCLTFGQHTVQEFLVSFGVWIRTPAPYRPPNAPILSTLPEHTVIC

SEQ ID NO: 11373 - protein, 1301 aa, Artificial Sequence
  SARS-CoV-2/USA/WA-UW291/2020__EPI_ISL_418076 spike protein (1-1147)(Q965C_S1003C) WhcAg construct
MFVFLVLLPLVSSQCVNLTTRTQLPPAYTNSFTRGVYYPDKVFRSSVLHSTQDLFLPFFSNVTWFHAIHVSGTNGTKRFDNPVLPFNDGVYFASTEKSNIIRGWIFGTTLDSKTQSLLIVNNATNVVIKVCEFQFCNDPFLGVYYHKNNKSWMESEFRVYSSANNCTFEYVSQPFLMDLEGKQGNFKNLREFVFKNIDGYFKIYSKHTPINLVRDLPQGFSALEPLVDLPIGINITRFQTLLALHRSYLTPGDSSSGWTAGAAAYYVGYLQPRTFLLKYNENGTITDAVDCALDPLSETKCTLKSFTVEKGIYQTSNFRVQPTESIVRFPNITNLCPFGEVFNATRFASVYAWNRKRISNCVADYSVLYNSASFSTFKCYGVSPTKLNDLCFTNVYADSFVIRGDEVRQIAPGQTGKIADYNYKLPDDFTGCVIAWNSNNLDSKVGGNYNYLYRLFRKSNLKPFERDISTEIYQAGSTPCNGVEGFNCYFPLQSYGFQPTNGVGYQPYRVVVLSFELLHAPATVCGPKKSTNLVKNKCVNFNFNGLTGTGVLTESNKKFLPFQQFGRDIADTTDAVRDPQTLEILDITPCSFGGVSVITPGTNTSNQVAVLYQGVNCTEVPVAIHADQLTPTWRVYSTGSNVFQTRAGCLIGAEHVNNSYECDIPIGAGICASYQTQTNSPRRARSVASQSIIAYTMSLGAENSVAYSNNSIAIPTNFTISVTTEILPVSMTKTSVDCTMYICGDSTECSNLLLQYGSFCTQLNRALTGIAVEQDKNTQEVFAQVKQIYKTPPIKDFGGFNFSQILPDPSKPSKRSFIEDLLFNKVTLADAGFIKQYGDCLGDIAARDLICAQKFNGLTVLPPLLTDEMIAQYTSALLAGTITSGWTFGAGAALQIPFAMQMAYRFNGIGVTQNVLYENQKLIANQFNSAIGKIQYSLSSTASALGKLQDVVNQNAQALNTLVKCLSSNFGAISSVLNDILSRLDKVEAEVQIDRLITGRLQCLQTYVTQQLIRAAEIRASANLAATKMSECVLGQSKRVDFCGKGYHLMSFPQSAPHGVVFLHVTYVPAQEKNFTTAPAICHDGKAHFPREGVFVSNGTHWFVTQRNFYEPQIITTDNTFVSGNCDVVIGIVNNTVYDPLQPELDSGGGGSDIDPYKEFGSSYQLLNFLPLDFFPDLNALVDTATALYEEELTGREHCSPHHTAIRQALVCWDELTKLIAWMSSNITSEQVRTIIVNHVNDTWGLKVRQSLWFHLSCLTFGQHTVQEFLVSFGVWIRTPAPYRPPNAPILSTLPEHTVIC

SEQ ID NO: 11374 - protein, 1301 aa, Artificial Sequence; identical to SEQ ID NO: 11337
  SARS-CoV-2/Portugal/PT0034/2020__EPI_ISL_418019 spike protein (1-1147)(Q965C_S1003C) WhcAg construct

SEQ ID NO: 11375 - protein, 1301 aa, Artificial Sequence; identical to SEQ ID NO: 11329
  SARS-CoV-2/Iceland/202/2020__EPI_ISL_417750 spike protein (1-1147)(Q965C_S1003C) WhcAg construct

SEQ ID NO: 11376 - protein, 1301 aa, Artificial Sequence
  SARS-CoV-2/USA/WA-UW261/2020__EPI_ISL_418046 spike protein (1-1147)(Q965C_S1003C) WhcAg construct
MFVFLVLLPLVSSQCVNLTTRTQLPPAYTNSFTRGVYYPDKVFRSSVLHSTQDLFLPFFSNVTWFHAIHVSGTNGTKRFDNPVLPFNDGVYFASTEKSNIIRGWIFGTTLDSKTQSLLIVNNATNVVIKVCEFQFCNDPFLGVYYHKNNKSWMESEFRVYSSANNCTFEYVSQPFLMDLEGKQGNFKNLREFVFKNIDGYFKIYSKHTPINLVRDLPQGFSALEPLVDLPIGINITRFQTLLALHRSYLTPGDSSSGWTAGAAAYYVGYLQPRTFLLKYNENGTITDAVDCALDPLSETKCTLKSFTVEKGIYQTSNFRVQPTESIVRFPNITNLCPFGEVFNATRFTSVYAWNRKRISNCVADYSVLYNSASFSTFKCYGVSPTKLNDLCFTNVYADSFVIRGDEVRQIAPGQTGKIADYNYKLPDDFTGCVIAWNSNNLDSKVGGNYNYLYRLFRKSNLKPFERDISTEIYQAGSTPCNGVEGFNCYFPLQSYGFQPTNGVGYQPYRVVVLSFELLHAPATVCGPKKSTNLVKNKCVNFNFNGLTGTGVLTESNKKFLPFQQFGRDIADTTDAVRDPQTLEILDITPCSFGGVSVITPGTNTSNQVAVLYQDVNCTEVPVAIHADQLTPTWRVYSTGSNVFQTRAGCLIGAEHVNNSYECDIPIGAGICASYQTQTNSPRRARSVASQSIIAYTMSLGAENSVAYSNNSIAIPTNFTISVTTEILPVSMTKTSVDCTMYICGDSTECSNLLLQYGSFCTQLNRALTGIAVEQDKNTQEVFAQVKQIYKTPPIKDFGGFNFSQILPDPSKPSKRSFIEDLLFNKVTLADAGFIKQYGDCLGDIAARDLICAQKFNGLTVLPPLLTDEMIAQYTSALLAGTITSGWTFGAGAALQIPFAMQMAYRFNGIGVTQNVLYENQKLIANQFNSAIGKIQDSLSSTASALGKLQDVVNQNAQALNTLVKCLSSNFGAISSVLNDILSRLDKVEAEVQIDRLITGRLQCLQTYVTQQLIRAAEIRASANLAATKMSECVLGQSKRVDFCGKGYHLMSFPQSAPHGVVFLHVTYVPAQEKNFTTAPAICHDGKAHFPREGVFVSNGTHWFVTQRNFYEPQIITTDNTFVSGNCDVVIGIVNNTVYDPLQPELDSGGGGSDIDPYKEFGSSYQLLNFLPLDFFPDLNALVDTATALYEEELTGREHCSPHHTAIRQALVCWDELTKLIAWMSSNITSEQVRTIIVNHVNDTWGLKVRQSLWFHLSCLTFGQHTVQEFLVSFGVWIRTPAPYRPPNAPILSTLPEHTVIC

SEQ ID NO: 11377 - protein, 1301 aa, Artificial Sequence
  SARS-CoV-2/Portugal/PT0035/2020__EPI_ISL_418020 spike protein (1-1147)(Q965C_S1003C) WhcAg construct
MFVFLVLLPLVSSQCVNLTTRTQLPPAYTNSFTRGVYYPDKVFRSSVLHSTQDLFLPFFSNVTWFHAIHVSGTNGTKRFDNPVLPFNDGVYFASTEKSNIIRGWIFGTTLDSKTQSLLIVNNATNVVIKVCEFQFCNDPFLGVYYHKNNKSWMESEFRVYSSANNCTFEYVSQPFLMDLEGKQGNFKNLREFVFKNIDGYFKIYSKHTPINLVRDLPQGFSALEPLVDLPIGINITRFQTLLALHRSYLTPGDSSSGWTAGAAAYYVGYLQPRTFLLKYNENGTITDAVDCALDPLSETKCTLKSFTVEKGIYQTSNFRVQPTESIVRFPNITNLCPFGEVFNATRFASVYAWNRKRISNCVADYSVLYNSASFSTFKCYGVSPTKLNDLCFTNVYADSFVIRGDEVRQIAPGQTGKIADYNYKLPDDFTGCVIAWNSNNLDSKVGGNYNYLYRLFRKSNLKPFERDISTEIYQAGSTPCNGVEGFNCYFPLQSYGFQPTNGVGYQPYRVVVLSFELLHAPATVCGPKKSTNLVKNKCVNFNFNGLTGTGVLTESNKKFLPFQQFGRDIADTTDAVRDPQTLEILDITPCSFGGVSVITPGTNTSNQVAVLYQDVNCTEVPVAIHADQLTPTWRVYSTGSNVFQTRAGCLIGAEHVNNSYECDIPIGAGICASYQTQTNSPRRARSVASQSIIAYTMSLGAENSVAYSNNSIAIPTNFTISVTTEILPVSMTKTSVDCTMYICGDSTECSNLLLQYGSFCTQLNRALTGIAVEQDKNTQEVFAQVKQIYKTPPIKDFGGFNFSQILPDPSKPSKRSFIEDLLFNKVTLADAGFIKQYGDCLGDISARDLICAQKFNGLTVLPPLLTDEMIAQYTSALLAGTITSGWTFGAGAALQIPFAMQMAYRFNGIGVTQNVLYENQKLIANQFNSAIGKIQDSLSSTASALGKLQDVVNQNAQALNTLVKCLSSNFGAISSVLNDILSRLDKVEAEVQIDRLITGRLQCLQTYVTQQLIRAAEIRASANLAATKMSECVLGQSKRVDFCGKGYHLMSFPQSAPHGVVFLHVTYVPAQEKNFTTAPAICHDGKAHFPREGVFVSNGTHWFVTQRNFYEPQIITTDNTFVSGNCDVVIGIVNNTVYDPLQPELDSGGGGSDIDPYKEFGSSYQLLNFLPLDFFPDLNALVDTATALYEEELTGREHCSPHHTAIRQALVCWDELTKLIAWMSSNITSEQVRTIIVNHVNDTWGLKVRQSLWFHLSCLTFGQHTVQEFLVSFGVWIRTPAPYRPPNAPILSTLPEHTVIC

SEQ ID NO: 11378 - protein, 1301 aa, Artificial Sequence
  SARS-CoV-2/USA/NY-NYUMC7/2020__EPI_ISL_418192 spike protein (1-1147)(Q965C_S1003C) WhcAg construct
MFVFLVLLPLVSSQCVNLTTRTQLPPAYTNSFTRGVYYPDKVFRSSVLHSTQDLFLPFFSNVTWFHAIHVSGTNGTKRFDNPVLPFNDGVYFASTEKSNIIRGWIFGTTLDSKTQSLLIVNNATNVVIKVCEFQFCNDPFLGVYHHKNNKSWMESEFRVYSSANNCTFEYVSQPFLMDLEGKQGNFKNLREFVFKNIDGYFKIYSKHTPINLVRDLPQGFSALEPLVDLPIGINITRFQTLLALHRSYLTPGDSSSGWTAGAAAYYVGYLQPRTFLLKYNENGTITDAVDCALDPLSETKCTLKSFTVEKGIYQTSNFRVQPTESIVRFPNITNLCPFGEVFNATRFASVYAWNRKRISNCVADYSVLYNSASFSTFKCYGVSPTKLNDLCFTNVYADSFVIRGDEVRQIAPGQTGKIADYNYKLPDDFTGCVIAWNSNNLDSKVGGNYNYLYRLFRKSNLKPFERDISTEIYQAGSTPCNGVEGFNCYFPLQSYGFQPTNGVGYQPYRVVVLSFELLHAPATVCGPKKSTNLVKNKCVNFNFNGLTGTGVLTESNKKFLPFQQFGRDIADTTDAVRDPQTLEILDITPCSFGGVSVITPGTNTSNQVAVLYQGVNCTEVPVAIHADQLTPTWRVYSTGSNVFQTRAGCLIGAEHVNNSYECDIPIGAGICASYQTQTNSPRRARSVASQSIIAYTMSLGAENSVAYSNNSIAIPTNFTISVTTEILPVSMTKTSVDCTMYICGDSTECSNLLLQYGSFCTQLNRALTGIAVEQDKNTQEVFAQVKQIYKTPPIKDFGGFNFSQILPDPSKPSKRSFIEDLLFNKVTLADAGFIKQYGDCLGDIAARDLICAQKFNGLTVLPPLLTDEMIAQYTSALLAGTITSGWTFGAGAALQIPFAMQMAYRFNGIGVTQNVLYENQKLIANQFNSAIGKIQDSLSSTASALGKLQDVVNQNAQALNTLVKCLSSNFGAISSVLNDILSRLDKVEAEVQIDRLITGRLQCLQTYVTQQLIRAAEIRASANLAATKMSECVLGQSKRVDFCGKGYHLMSFPQSAPHGVVFLHVTYVPAQEKNFTTAPAICHDGKAHFPREGVFVSNGTHWFVTQRNFYEPQIITTDNTFVSGNCDVVIGIVNNTVYDPLQPELDSGGGGSDIDPYKEFGSSYQLLNFLPLDFFPDLNALVDTATALYEEELTGREHCSPHHTAIRQALVCWDELTKLIAWMSSNITSEQVRTIIVNHVNDTWGLKVRQSLWFHLSCLTFGQHTVQEFLVSFGVWIRTPAPYRPPNAPILSTLPEHTVIC

SEQ ID NO: 11379 - protein, 1301 aa, Artificial Sequence
  SARS-CoV-2/Iceland/189/2020__EPI_ISL_417709 spike protein (1-1147)(Q965C_S1003C) WhcAg construct
MFVFLVLLPLVSSQCVNLTTRTQLPPAYTNSFTRGVYYPDKVFRSSVLHSTQDLFLPFFSNVTWFHAIHVSGTNGTKRFDNPVLPFNDGVYFASTEKSNIIRGWIFGTTLDSKTQSLLIVNNATNVVIKVCEFQFCNDPFLGVYYHKNNKSWMESEFRVYSSANNCTFEYVSQPFLMDLEGKQGNFKNLREFVFKNIDGYFKIYSKHTPINLVRDLPQGFSALEPLVDLPIGINITRFQTLLALHRSYLTPGDSSSGWTAGAAAYYVGYLQPRTFLLKYNENGTITDAVDCALDPLSETKCTLKSFTVEKGIYQTSNFRVQPTESIVRFPNITNLCPFGEVFNATRFASVYAWNRKRISNCVADYSVLYNSASFSTFKCYGVSPTKLNDLCFTNVYADSFVIRGDEVRQIAPGQTGKIADYNYKLPDDFTGCVIAWNSNNLDSKVGGNYNYLYRLFRKSNLKPFERDISTEIYQAGSTPCNGVEGFNCYFPLQSYGFQPTNGVGYQPYRVVVLSFELLHAPATVCGPKKSTNLVKNKCVNFNFNGLTGTGVLTESNKKFLPFQQFGRDIADTTDAVRDPQTLEILDITPCSFGGVSVITPGTNTSNQVAVLYQGVNCTEVPVAIHADQLTPTWRVYSTGSNVFQTRAGCLIGAEHVNNSYECDIPIGAGICASYQTQTNSPRRARSVASQSIIAYTMSLGAENSVAYSNNSIAIPTNFTISVTTEILPVSMTKTSVDCTMYICGDSTECSNLLLQYGSFCTQLNRALTGIAVEQDKNTQEVFAQVKQIYKTPPIKDFGGFNFSQILPDPSKPSKRSFIEDLLFNKVTLADAGFTKQYGDCLGDIAARDLICAQKFNGLTVLPPLLTDEMIAQYTSALLAGTITSGWTFGAGAALQIPFAMQMAYRFNGIGVTQNVLYENQKLIANQFNSAIGKIQDSLSSTASALGKLQDVVNQNAQALNTLVKCLSSNFGAISSVLNDILSRLDKVEAEVQIDRLITGRLQCLQTYVTQQLIRAAEIRASANLAATKMSECVLGQSKRVDFCGKGYHLMSFPQSAPHGVVFLHVTYVPAQEKNFTTAPAICHDGKAHFPREGVFVSNGTHWFVTQRNFYEPQIITTDNTFVSGNCDVVIGIVNNTVYDPLQPELDSGGGGSDIDPYKEFGSSYQLLNFLPLDFFPDLNALVDTATALYEEELTGREHCSPHHTAIRQALVCWDELTKLIAWMSSNITSEQVRTIIVNHVNDTWGLKVRQSLWFHLSCLTFGQHTVQEFLVSFGVWIRTPAPYRPPNAPILSTLPEHTVIC

SEQ ID NO: 11380 - protein, 1301 aa, Artificial Sequence
  SARS-CoV-2/Australia/NSW56/2020__EPI_ISL_417408 spike protein (1-1147)(Q965C_S1003C) WhcAg construct
MFVFLVLLPLVSSQCVNLTTRTQLPPAYTNSFTRGVYYPDKVFRSSVLHSTQDLFLPFFSNVTWFHAIHVSGTNGTKRFDNPVLPFNDGVYFASTEKSNIIRGWIFGTTLDSKTQSLLIVNNATNVVIKVCEFQFCNDPFLGVYYHKNNKSWMESEFRVYSSANNCTFEYVSQPFLMDLEGKQGNFKNLREFVFKNIDGYFKIYSKHTPINLVRDLPQGFSALEPLVDLPIGINITRFQTLLALHRSYLTPGDSSSGWTAGAAAYYVGYLQPRTFLLKYNENGTITDAVDCALDPLSETKCTLKSFTVEKGIYQTSNFRVQPTESIVRFPNITNLCPFGEVFNATRFASVYAWNRKRISNCVADYSVLYNSASFSTFKCYGVSPTKLNDLCFTNVYADSFVIRGDEVRQIAPGQTGKIADYNYKLPDDFTGCVIAWNSNNLDSKVGGNYNYLYRLFRKSNLKPFERDISTEIYQAGSTPCNGVEGFNCYFPLQSYGFQPTNGVGYQPYRVVVLSFELLHAPATVCGPKKSTNLVKNKCVNFNFNGLTGTGVLTESNKKFLPFQQFGRDIADTTDAVRDPQTLEILDITPCSFGGVSVITPGTNTSNQVAVLYQDVNCTEVPVAIHADQLTPTWRVYSTGSNVFQTRAGCLIGAEHVNNSYECDIPIGAGICASYQTQTNSPRRARSVASQSIIAYTMSLGAENSVAYSNNSIAIPTNFTISVTTEILPVSMTKTSVDCTMYICGDSTECSNLLLQYGSFCTQLNRALTGIAVEQDKNTQEVFAQVKQIYKTPPIKDFGGFNFSQILPDSSKPSKRSFIEDLLFNKVTLADAGFIKQYGDCLGDIAARDLICAQKFNGLTVLPPLLTDEMIAQYTSALLAGTITSGWTFGAGAALQIPFAMQMAYRFNGIGVTQNVLYENQKLIANQFNSAIGKIQDSLSSTASALGKLQDVVNQNAQALNTLVKCLSSNFGAISSVLNDILSRLDKVEAEVQIDRLITGRLQCLQTYVTQQLIRAAEIRASANLAATKMSECVLGQSKRVDFCGKGYHLMSFPQSAPHGVVFLHVTYVPAQEKNFTTAPAICHDGKAHFPREGVFVSNGTHWFVTQRNFYEPQIITTDNTFVSGNCDVVIGIVNNTVYDPLQPELDSGGGGSDIDPYKEFGSSYQLLNFLPLDFFPDLNALVDTATALYEEELTGREHCSPHHTAIRQALVCWDELTKLIAWMSSNITSEQVRTIIVNHVNDTWGLKVRQSLWFHLSCLTFGQHTVQEFLVSFGVWIRTPAPYRPPNAPILSTLPEHTVIC

SEQ ID NO: 11381 - protein, 1301 aa, Artificial Sequence
  SARS-CoV-2/Iceland/280/2020__EPI_ISL_417608 spike protein (1-1147)(Q965C_S1003C) WhcAg construct
MFVFLVLLPLVSSQCVNLTTRTQLPPAYTNSFTRGVYYPDKVFRSSVLHSTQDLFLPFFSNVTWFHAIHVSGTNGTKRFDNPVLPFNDGVYFASTEKSNIIRGWIFGTTLDSKTQSLLIVNNATNVVIKVCEFQFCNDPFLGVYYHKNNKSWMESEFRVYSSANNCTFEYVSQPFLMDLEGKQGNFKNLREFVFKNIDGYFKIYSKHTPINLVRDLPQGFSALEPLVDLPIGINITRFQTLLALHRSYLTPGDSSSGWTAGAAAYYVGYLQPRTFLLKYNENGTITDAVDCALDPLSETKCTLKSFTVEKGIYQTSNFRVQPTESIVRFPNITNLCPFGEVFNATRFASVYAWNRKRISNCVADYSVLYNSASFSTFKCYGVSPTKLNDLCFTNVYADSFVIRGDEVRQIAPGQTGKIADYNYKLPDDFTGCVIAWNSNNLDSKVGGNYNYLYRLFRKSNLKPFERDISTEIYQAGSTPCNGVEGFNCYFPLQSYGFQPTNGVGYQPYRVVVLSFELLHAPATVCGPKKSTNLVKNKCVNFNFNGLTGTGVLTESNKKFLPFQQFGRDIADTTDAVRDPQTLEILDITPCSFGGVSVITPGTNTSNQVAVLYQGVNCTEVPVAIHADQLTPTWRVYSTGSNVFQTRAGCLIGAEHVNNSYECDIPIGAGICASYHTQTNSPRRARSVASQSIIAYTMSLGAENSVAYSNNSIAIPTNFTISVTTEILPVSMTKTSVDCTMYICGDSTECSNLLLQYGSFCTQLNRALTGIAVEQDKNTQEVFAQVKQIYKTPPIKDFGGFNFSQILPDPSKPSKRSFIEDLLFNKVTLADAGFIKQYGDCLGDIAARDLICAQKFNGLTVLPPLLTDEMIAQYTSALLAGTITSGWTFGAGAALQIPFAMQMAYRFNGIGVTQNVLYENQKLIANQFNSAIGKIQDSLSSTASALGKLQDVVNQNAQALNTLVKCLSSNFGAISSVLNDILSRLDKVEAEVQIDRLITGRLQCLQTYVTQQLIRAAEIRASANLAATKMSECVLGQSKRVDFCGKGYHLMSFPQSAPHGVVFLHVTYVPAQEKNFTTAPAICHDGKAHFPREGVFVSNGTHWFVTQRNFYEPQIITTDNTFVSGNCDVVIGIVNNTVYDPLQPELDSGGGGSDIDPYKEFGSSYQLLNFLPLDFFPDLNALVDTATALYEEELTGREHCSPHHTAIRQALVCWDELTKLIAWMSSNITSEQVRTIIVNHVNDTWGLKVRQSLWFHLSCLTFGQHTVQEFLVSFGVWIRTPAPYRPPNAPILSTLPEHTVIC

SEQ ID NO: 11382 - protein, 1301 aa, Artificial Sequence; identical to SEQ ID NO: 11337
  SARS-CoV-2/Iceland/247/2020__EPI_ISL_417575 spike protein (1-1147)(Q965C_S1003C) WhcAg construct

SEQ ID NO: 11383 - protein, 1301 aa, Artificial Sequence
  SARS-CoV-2/Iceland/238/2020__EPI_ISL_417566 spike protein (1-1147)(Q965C_S1003C) WhcAg construct
MFVFLVLLPLVSSQCVNLTTRTQLPPAYTNSFTRGVYYPDKVFRSSVLHSTQDLFLPFFSNVTWFHAIHVSGTNGTKRFDNPVLPFNDGVYFASTEKSNIIRGWIFGTTLDSKTQSLLIVNNATNVVIKVCEFQFCNDPFLGVYYHKNNKSWMESEFRVYSSANNCTFEYVSQPFLMDLEGKQGNFKNLREFVFKNIDGYFKIYSKHTPINLVRDLPQGFSALEPLVDLPIGINITRFQTLLALHRSYLTPGDSSSGWTAGAAAYYVGYLQPRTFLLKYNENGTITDAVDCALDPLSETKCTLKSFTVEKGIYQTSNFRVQPTESIVRFPNITNLCPFGEVFNATRFASVYAWNRKRISNCVADYSVLYNSASFSTFKCYGVSPTKLNDLCFTNVYADSFVIRGDEVRQIAPGQTGKIADYNYKLPDDFTGCVIAWNSNNLDSKVGGNYNYLYRLFRKSNLKPFERDISTEIYQAGSTPCNGVEGFNCYFPLQSYGFQPTNGVGYQPYRVVVLSFELLHAPATVCGPKKSTNLVKNKCVNFNFNGLTGTGVLTESNKKFLPFQQFGRDIADTTDAVRDPQTLEILDITPCSFGGVSVITPGTNTSNQVAVLYQGVNCTEVPVAIHADQLTPTWRVYSTGSNVFQTRAGCLIGAEHVNNSYECDIPIGAGICASYQTQTNSPRRARSVASQSIIAYTMSLGAENSVAYSNNSIAIPTNFTISVTTEILPVSMTKTSVDCTMYICGDSTECSNLLLQYGSFCTQLNRALTGIAVEQDKNTQEVFAQVKQIYKTPPIKDFGGFNFSQILPDPSKPSKRSFIEDLLFNKVTLADVGFIKQYGDCLGDIAARDLICAQKFNGLTVLPPLLTDEMIAQYTSALLAGTITSGWTFGAGAALQIPFAMQMAYRFNGIGVTQNVLYENQKLIANQFNSAIGKIQDSLSSTASALGKLQDVVNQNAQALNTLVKCLSSNFGAISSVLNDILSRLDKVEAEVQIDRLITGRLQCLQTYVTQQLIRAAEIRASANLAATKMSECVLGQSKRVDFCGKGYHLMSFPQSAPHGVVFLHVTYVPAQEKNFTTAPAICHDGKAHFPREGVFVSNGTHWFVTQRNFYEPQIITTDNTFVSGNCDVVIGIVNNTVYDPLQPELDSGGGGSDIDPYKEFGSSYQLLNFLPLDFFPDLNALVDTATALYEEELTGREHCSPHHTAIRQALVCWDELTKLIAWMSSNITSEQVRTIIVNHVNDTWGLKVRQSLWFHLSCLTFGQHTVQEFLVSFGVWIRTPAPYRPPNAPILSTLPEHTVIC

SEQ ID NO: 11384 - protein, 1301 aa, Artificial Sequence
  SARS-CoV-2/Greece/16/2020__EPI_ISL_418265 spike protein (1-1147)(Q965C_S1003C) WhcAg construct
MFVFLVLLPLVSSQCVNLTTRTQLPPAYTNSFTRGVYYPDKVFRSSVLHSTQDLFLPFFSNVTWFHAIHVSGTNGTKRFDNPVLPFNDGVYFASTEKSNIIRGWIFGTTLDSKTQSLLIVNNATNVVIKVCEFQFCNDPFLGVYYHKNNKSWMESEFRVYSSANNCTFEYVSQPFLMDLEGKQGNFKNLREFVFKNVDGYFKIYSKHTPINLVRDLPQGFSALEPLVDLPIGINITRFQTLLALHRSYLTPGDSSSGWTAGAAAYYVGYLQPRTFLLKYNENGTITDAVDCALDPLSETKCTLKSFTVEKGIYQTSNFRVQPTESIVRFPNITNLCPFGEVFNATRFASVYAWNRKRISNCVADYSVLYNSASFSTFKCYGVSPTKLNDLCFTNVYADSFVIRGDEVRQIAPGQTGKIADYNYKLPDDFTGCVIAWNSNNLDSKVGGNYNYLYRLFRKSNLKPFERDISTEIYQAGSTPCNGVEGFNCYFPLQSYGFQPTNGVGYQPYRVVVLSFELLHAPATVCGPKKSTNLVKNKCVNFNFNGLTGTGVLTESNKKFLPFQQFGRDIADTTDAVRDPQTLEILDITPCSFGGVSVITPGTNTSNQVAVLYQDVNCTEVPVAIHADQLTPTWRVYSTGSNVFQTRAGCLIGAEHVNNSYECDIPIGAGICASYQTQTNSPRRARSVASQSIIAYTMSLGAENSVAYSNNSIAIPTNFTISVTTEILPVSMTKTSVDCTMYICGDSTECSNLLLQYGSFCTQLNRALTGIAVEQDKNTQEVFAQVKQIYKTPPIKDFGGFNFSQILPDPSKPSKRSFIEDLLFNKVTLADAGFIKQYGDCLGDIAARDLICAQKFNGLTVLPPLLTDEMIAQYTSALLAGTITSGWTFGAGAALQIPFAMQMAYRFNGIGVTQNVLYENQKLIANQFNSAIGKIQDSLSSTASALGKLQDVVNQNAQALNTLVKCLSSNFGAISSVLNDILSRLDKVEAEVQIDRLITGRLQCLQTYVTQQLIRAAEIRASANLAATKMSECVLGQSKRVDFCGKGYHLMSFPQSAPHGVVFLHVTYVPAQEKNFTTAPAICHDGKAHFPREGVFVSNGTHWFVTQRNFYEPQIITTDNTFVSGNCDVVIGIVNNTVYDPLQPELDSGGGGSDIDPYKEFGSSYQLLNFLPLDFFPDLNALVDTATALYEEELTGREHCSPHHTAIRQALVCWDELTKLIAWMSSNITSEQVRTIIVNHVNDTWGLKVRQSLWFHLSCLTFGQHTVQEFLVSFGVWIRTPAPYRPPNAPILSTLPEHTVIC

SEQ ID NO: 11385 - protein, 1301 aa, Artificial Sequence
  SARS-CoV-2/Iceland/319/2020__EPI_ISL_417648 spike protein (1-1147)(Q965C_S1003C) WhcAg construct
MFVFLVLLPLVSSQCVNLTTRTQLPPAYTNSFTRGVYYPDKVFRSSVLHSTQDLFLPFFSNVTWFHAIHVSGTNGTKRFDNPVLPFNDGVYFASTEKSNIIRGWIFGTTLDSKTQSLLIVNNATNVVIKVCEFQFCNDPFLGVYYHKNNKSWMESEFRVYSSANNCTFEYVSQPFLIDLEGKQGNFKNLREFVFKNIDGYFKIYSKHTPINLVRDLPQGFSALEPLVDLPIGINITRFQTLLALHRSYLTPGDSSSGWTAGAAAYYVGYLQPRTFLLKYNENGTITDAVDCALDPLSETKCTLKSFTVEKGIYQTSNFRVQPTESIVRFPNITNLCPFGEVFNATRFASVYAWNRKRISNCVADYSVLYNSASFSTFKCYGVSPTKLNDLCFTNVYADSFVIRGDEVRQIAPGQTGKIADYNYKLPDDFTGCVIAWNSNNLDSKVGGNYNYLYRLFRKSNLKPFERDISTEIYQAGSTPCNGVEGFNCYFPLQSYGFQPTNGVGYQPYRVVVLSFELLHAPATVCGPKKSTNLVKNKCVNFNFNGLTGTGVLTESNKKFLPFQQFGRDIADTTDAVRDPQTLEILDITPCSFGGVSVITPGTNTSNQVAVLYQGVNCTEVPVAIHADQLTPTWRVYSTGSNVFQTRAGCLIGAEHVNNSYECDIPIGAGICASYQTQTNSPRRARSVASQSIIAYTMSLGAENSVAYSNNSIAIPTNFTISVTTEILPVSMTKTSVDCTMYICGDSTECSNLLLQYGSFCTQLNRALTGIAVEQDKNTQEVFAQVKQIYKTPPIKDFGGFNFSQILPDPSKPSKRSFIEDLLFNKVTLADAGFIKQYGDCLGDIAARDLICAQKFNGLTVLPPLLTDEMIAQYTSALLAGTITSGWTFGAGAALQIPFAMQMAYRFNGIGVTQNVLYENQKLIANQFNSAIGKIQDSLSSTASALGKLQDVVNQNAQALNTLVKCLSSNFGAISSVLNDILSRLDKVEAEVQIDRLITGRLQCLQTYVTQQLIRAAEIRASANLAATKMSECVLGQSKRVDFCGKGYHLMSFPQSAPHGVVFLHVTYVPAQEKNFTTAPAICHDGKAHFPREGVFVSNGTHWFVTQRNFYEPQIITTDNTFVSGNCDVVIGIVNNTVYDPLQPELDSGGGGSDIDPYKEFGSSYQLLNFLPLDFFPDLNALVDTATALYEEELTGREHCSPHHTAIRQALVCWDELTKLIAWMSSNITSEQVRTIIVNHVNDTWGLKVRQSLWFHLSCLTFGQHTVQEFLVSFGVWIRTPAPYRPPNAPILSTLPEHTVIC

SEQ ID NO: 11386 - protein, 1301 aa, Artificial Sequence
  SARS-CoV-2/Congo/94/2020__EPI_ISL_417947 spike protein (1-1147)(Q965C_S1003C) WhcAg construct
MFVFLVLLPLVSSQCVNLTTRTQLPPAYTNSFTRGVYYPDKVFRSSVLHSTQDLFLPFFSNVTWFHAIHVSGTNGTKRFDNPVLPFNDGVYFASTEKSNIIRGWIFGTTLDSKTQSLLIVNNATNVVIKVCEFQFCNDPFLGVYYHKNNKSWMESEFRVYSSANNCTFEYVSQPFLMDLEGKQGNFKNLREFVFKNIDGYFKIYSKHTPINLVRDLPQGFSALEPLVDLPIGINITRFQTLLALHRSYLTPGDSSSGWTAGAAAYYVGYLQPRTFLLKYNENGTITDAVDCALDPLSETKCTLKSFTVEKGIYQTSNFRVQPTESIVRFPNITNLCPFGEVFNATRFASVYAWNRKRISNCVADYSVLYNSASFSTFKCYGVSPTKLNDLCFTNVYADSFVIRGDEVRQIAPGQTGKIADYNYKLPDDFTGCVIAWNSNNLDSKVGGNYNYLYRLFRKSNLKPFERDISTEIYQAGSTPCNGVEGFNCYFPLQSYGFQPTNGVGYQPYRVVVLSFELLHAPATVCGPKKSTNLVKNKCVNFNFNGLTGTGVLTESNKKFLPFQQFGRDIADTTDAVRDPQTLEILDITPCSFGGVSVITPGTNTSNQVAVLYQGVNCTEVPVAIHADQLTPTWRVYSTGSNVFQTRAGCLIGAEHVNNSYECDIPIGAGICASYQTQTNSPRRARSVASQSIIAYTMSLGAENSVAYSNNSIAIPTNFTISVTTEILPVSMTKTSVDCTMYICGDSTECSNLLLQYGSFCTQLNRALTGIAVEQDKNTQEVFAQVKQIYKTPPIKDFGGFNFSQILPDPSKPSKRSFIEDILFNKVTLADAGFIKQYGDCLGDIAARDLICAQKFNGLTVLPPLLTDEMIAQYTSALLAGTITSGWTFGAGAALQIPFAMQMAYRFNGIGVTQNVLYENQKLIANQFNSAIGKIQDSLSSTASALGKLQDVVNQNAQALNTLVKCLSSNFGAISSVLNDILSRLDKVEAEVQIDRLITGRLQCLQTYVTQQLIRAAEIRASANLAATKMSECVLGQSKRVDFCGKGYHLMSFPQSAPHGVVFLHVTYVPAQEKNFTTAPAICHDGKAHFPREGVFVSNGTHWFVTQRNFYEPQIITTDNTFVSGNCDVVIGIVNNTVYDPLQPELDSGGGGSDIDPYKEFGSSYQLLNFLPLDFFPDLNALVDTATALYEEELTGREHCSPHHTAIRQALVCWDELTKLIAWMSSNITSEQVRTIIVNHVNDTWGLKVRQSLWFHLSCLTFGQHTVQEFLVSFGVWIRTPAPYRPPNAPILSTLPEHTVIC

SEQ ID NO: 11387 - protein, 1301 aa, Artificial Sequence
  SARS-CoV-2/Congo/158/2020__EPI_ISL_417950 spike protein (1-1147)(Q965C_S1003C) WhcAg construct
MFVFLVLLPLVSSQCVNLTTRTQLPPAYTNSFTRGVYYPDKVFRSSVLHSTQDLFLPFFSNVTWFHAIHVSGTNGTKRFDNPVLPFNDGVYFASTEKSNIIRGWIFGTTLDSKTQSLLIVNNATNVVIKVCEFQFCNDPFLGVYYHKNNKSWMESEFRVYSSANNCTFEYVSQPFLMDLEGKQGNFKNLREFVFKNIDGYFKIYSKHTPINLVRDLPQGFSALEPLVDLPIGINITRFQTLLALHRSYLTPGDSSSGWTAGAAAYYVGYLQPRTFLLKYNENGTITDAVDCALDPLSETKCTLKSFTVEKGIYQTSNFRVQPTESIVRFPNITNLCPFGEVFNATRFASVYAWNRKRISNCVADYSVLYNSASFSTFKCYGVSPTKLNDLCFTNVYADSFVIRGDEVRQIAPGQTGKIADYNYKLPDDFTGCVIAWNSNNLDSKVGGNYNYLYRLFRKSNLKPFERDISTEIYQAGSTPCNGVEGFNCYFPLQSYGFQPTNGVGYQPYRVVVLSFELLHAPATVCGPKKSTNLVKNKCVNFNFNGLTGTGVLTESNKKFLPFQQFGRDIADTTDAVRDPQTLEILDITPCSFGGVSVITPGTNTSNQVAVLYQDVNCTEVPVAIHADQLTPTWRVYSTGSNVFQTRAGCLIGAEHVNNSYECDIPIGAGICASYQTQTNSPRRARSVASQSIIAYTMSLGAENSVAYSNNSIAIPTNFTISVTTEILPVSMTKTSVDCTMYICGDSTECSNLLLQYGSFCTQLNRALTGIAVEQDKNTQEVFAQVKQIYKTPPIKDFGGFNFSQILPDPSKPSKRSFIEDLLFNKVTLADAGFIKQYGDCLGDIAARDLICAQKFNGLTVLPPLLTDEMIAQYTSALLAGTITSGWTFGAGAALQIPFAMQMAYRFNGIGVTQNVLYENQKLIANQFNSAIGKIQDSLSSTASALGKLQDVVNQNAQALNTLVKCLSSNFGAISSVLNDILSRLDKVEAEVQIDRLITGRLQCLQTYVTQQLIRAAEIRASANLAATKMSECVLGQSKRVDFCGKGYHLMSFPQSAPHGVVFLHVTYVPAQEKNFTTAPAICHDGKAHFPREGVFVSNGTHWFVTQRNFYEPQIITTDNTFLSGNCDVVIGIVNNTVYDPLQPELDSGGGGSDIDPYKEFGSSYQLLNFLPLDFFPDLNALVDTATALYEEELTGREHCSPHHTAIRQALVCWDELTKLIAWMSSNITSEQVRTIIVNHVNDTWGLKVRQSLWFHLSCLTFGQHTVQEFLVSFGVWIRTPAPYRPPNAPILSTLPEHTVIC

SEQ ID NO: 11388 - protein, 1301 aa, Artificial Sequence
  SARS-CoV-2/USA/UT-00034/2020__EPI_ISL_417977 spike protein (1-1147)(Q965C_S1003C) WhcAg construct
MFVFLVLLPLVSSQCVNLTTRTQLPPAYTNSFTRGVYYPDKVFRSSVLHSTQDLFLPFFSNVTWFHAIHVSGTNGTKRFDNPVLPFNDGVYFASTEKSNIIRGWIFGTTLDSKTQSLLIVNNATNVVIKVCEFQFCNDPFLGVYYYKNNKSWMESEFRVYSSANNCTFEYVSQPFLMDLEGKQGNFKNLREFVFKNIDGYFKIYSKHTPINLVRDLPQGFSALEPLVDLPIGINITRFQTLLALHRSYLTPGDSSSGWTAGAAAYYVGYLQPRTFLLKYNENGTITDAVDCALDPLSETKCTLKSFTVEKGIYQTSNFRVQPTESIVRFPNITNLCPFGEVFNATRFASVYAWNRKRISNCVADYSVLYNSASFSTFKCYGVSPTKLNDLCFTNVYADSFVIRGDEVRQIAPGQTGKIADYNYKLPDDFTGCVIAWNSNNLDSKVGGNYNYLYRLFRKSNLKPFERDISTEIYQAGSTPCNGVEGFNCYFPLQSYGFQPTNGVGYQPYRVVVLSFELLHAPATVCGPKKSTNLVKNKCVNFNFNGLTGTGVLTESNKKFLPFQQFGRDIADTTDAVRDPQTLEILDITPCSFGGVSVITPGTNTSNQVAVLYQGVNCTEVPVAIHADQLTPTWRVYSTGSNVFQTRAGCLIGAEHVNNSYECDIPIGAGICASYQTQTNSPRRARSVASQSIIAYTMSLGAENSVAYSNNSIAIPTNFTISVTTEILPVSMTKTSVDCTMYICGDSTECSNLLLQYGSFCTQLNRALTGIAVEQDKNTQEVFAQVKQIYKTPPIKDFGGFNFSQILPDPSKPSKRSFIEDLLFNKVTLADAGFIKQYGDCLGDIAARDLICAQKFNGLTVLPPLLTDEMIAQYTSALLAGTITSGWTFGAGAALQIPFAMQMAYRFNGIGVTQNVLYENQKLIANQFNSAIGKIQDSLSSTASALGKLQDVVNQNAQALNTLVKCLSSNFGAISSVLNDILSRLDKVEAEVQIDRLITGRLQCLQTYVTQQLIRAAEIRASANLAATKMSECVLGQSKRVDFCGKGYHLMSFPQSAPHGVVFLHVTYVPAQEKNFTTAPAICHDGKAHFPREGVFVSNGTHWFVTQRNFYEPQIITTDNTFVSGNCDVVIGIVNNTVYDPLQPELDSGGGGSDIDPYKEFGSSYQLLNFLPLDFFPDLNALVDTATALYEEELTGREHCSPHHTAIRQALVCWDELTKLIAWMSSNITSEQVRTIIVNHVNDTWGLKVRQSLWFHLSCLTFGQHTVQEFLVSFGVWIRTPAPYRPPNAPILSTLPEHTVIC

SEQ ID NO: 11389 - protein, 1301 aa, Artificial Sequence
  SARS-CoV-2/USA/UT-00033/2020__EPI_ISL_417976 spike protein (1-1147)(Q965C_S1003C) WhcAg construct
MFVFLVLLPLVSSQCVNLTTRTQLPPAYTNSFTRGVYYPDKVFRSSVLHSTQDLFLPFFSNVTWFHAIHVSGTNGTKRFDNPVLPFNDGVYFASTEKSNIIRGWIFGTTLDSKTQSLLIVNNATNVVIKVCEFQFCNDPFLGVYYHKNNKSWMESEFRVYSSANNCTFEYVSQPFLMDLEGKQGNFKNLREFVFKNIDGYFKIYSKHTPINLVRDLPQGFSALEPLVDLPIGINITRFQTLLALHRSYLTPGDSSSGLTAGAAAYYVGYLQPRTFLLKYNENGTITDAVDCALDPLSETKCTLKSFTVEKGIYQTSNFRVQPTESIVRFPNITNLCPFGEVFNATRFASVYAWNRKRISNCVADYSVLYNSASFSTFKCYGVSPTKLNDLCFTNVYADSFVIRGDEVRQIAPGQTGKIADYNYKLPDDFTGCVIAWNSNNLDSKVGGNYNYLYRLFRKSNLKPFERDISTEIYQAGSTPCNGVEGFNCYFPLQSYGFQPTNGVGYQPYRVVVLSFELLHAPATVCGPKKSTNLVKNKCVNFNFNGLTGTGVLTESNKKFLPFQQFGRDIADTTDAVRDPQTLEILDITPCSFGGVSVITPGTNTSNQVAVLYQGVNCTEVPVAIHADQLTPTWRVYSTGSNVFQTRAGCLIGAEHVNNSYECDIPIGAGICASYQTQTNSPRRARSVASQSIIAYTMSLGAENSVAYSNNSIAIPTNFTISVTTEILPVSMTKTSVDCTMYICGDSTECSNLLLQYGSFCTQLNRALTGIAVEQDKNTQEVFAQVKQIYKTPPIKDFGGFNFSQILPDPSKPSKRSFIEDLLFNKVTLADAGFIKQYGDCLGDIAARDLICAQKFNGLTVLPPLLTDEMIAQYTSALLAGTITSGWTFGAGAALQIPFAMQMAYRFNGIGVTQNVLYENQKLIANQFNSAIGKIQDSLSSTASALGKLQDVVNQNAQALNTLVKCLSSNFGAISSVLNDILSRLDKVEAEVQIDRLITGRLQCLQTYVTQQLIRAAEIRASANLAATKMSECVLGQSKRVDFCGKGYHLMSFPQSAPHGVVFLHVTYVPAQEKNFTTAPAICHDGKAHFPREGVFVSNGTHWFVTQRNFYEPQIITTDNTFVSGNCDVVIGIVNNTVYDPLQPELDSGGGGSDIDPYKEFGSSYQLLNFLPLDFFPDLNALVDTATALYEEELTGREHCSPHHTAIRQALVCWDELTKLIAWMSSNITSEQVRTIIVNHVNDTWGLKVRQSLWFHLSCLTFGQHTVQEFLVSFGVWIRTPAPYRPPNAPILSTLPEHTVIC

SEQ ID NO: 11390 - protein, 1301 aa, Artificial Sequence
  SARS-CoV-2/USA/WI-13/2020__EPI_ISL_417516 spike protein (1-1147)(Q965C_S1003C) WhcAg construct
MFVFLVLLPLVSSQCVNLTTRTQLPPAYTNSFTRGVYYPDKVFRSSVLHSTQDLFLPFFSNVTWFHAIHVSGTNGTKRFDNPVLPFNDGVYFASTEKSNIIRGWIFGTTLDSKTQSLLIVNNATNVVIKVCEFQFCNDPFLGVYYHKNNKSWMESEFRVYSSANNCTFEYVSQPFLMDLEGKQGNFKNLREFVFKNIDGYFKIYSKHTPINLVRDLPQGFSALEPLVDLPIGINITRFQTLLALHRSYLTPGDSSSGWTAGAAAYYVGYLQPRTFLLKYNENGTITDAVDCALDPLSETKCTLKSFTVEKGIYQTSNFRVLPTESIVRFPNITNLCPFGEVFNATRFASVYAWNRKRISNCVADYSVLYNSASFSTFKCYGVSPTKLNDLCFTNVYADSFVIRGDEVRQIAPGQTGKIADYNYKLPDDFTGCVIAWNSNNLDSKVGGNYNYLYRLFRKSNLKPFERDISTEIYQAGSTPCNGVEGFNCYFPLQSYGFQPTNGVGYQPYRVVVLSFELLHAPATVCGPKKSTNLVKNKCVNFNFNGLTGTGVLTESNKKFLPFQQFGRDIADTTDAVRDPQTLEILDITPCSFGGVSVITPGTNTSNQVAVLYQGVNCTEVPVAIHADQLTPTWRVYSTGSNVFQTRAGCLIGAEHVNNSYECDIPIGAGICASYQTQTNSPRRARSVASQSIIAYTMSLGAENSVAYSNNSIAIPTNFTISVTTEILPVSMTKTSVDCTMYICGDSTECSNLLLQYGSFCTQLNRALTGIAVEQDKNTQEVFAQVKQIYKTPPIKDFGGFNFSQILPDPSKPSKRSFIEDLLFNKVTLADAGFIKQYGDCLGDIAARDLICAQKFNGLTVLPPLLTDEMIAQYTSALLAGTITSGWTFGAGAALQIPFAMQMAYRFNGIGVTQNVLYENQKLIANQFNSAIGKIQDSLSSTASALGKLQDVVNQNAQALNTLVKCLSSNFGAISSVLNDILSRLDKVEAEVQIDRLITGRLQCLQTYVTQQLIRAAEIRASANLAATKMSECVLGQSKRVDFCGKGYHLMSFPQSAPHGVVFLHVTYVPAQEKNFTTAPAICHDGKAHFPREGVFVSNGTHWFVTQRNFYEPQIITTDNTFVSGNCDVVIGIVNNTVYDPLQPELDSGGGGSDIDPYKEFGSSYQLLNFLPLDFFPDLNALVDTATALYEEELTGREHCSPHHTAIRQALVCWDELTKLIAWMSSNITSEQVRTIIVNHVNDTWGLKVRQSLWFHLSCLTFGQHTVQEFLVSFGVWIRTPAPYRPPNAPILSTLPEHTVIC

SEQ ID NO: 11391 - protein, 1300 aa, Artificial Sequence
  SARS-CoV-2/India/1-27/2020__EPI_ISL_413522 spike protein (1-1146)(Q964C_S1002C) WhcAg construct
MFVFLVLLPLVSSQCVNLTTRTQLPPAYTNSFTRGVYYPDKVFRSSVLHSTQDLFLPFFSNVTWFHAIHVSGTNGTKRFDNPVLPFNDGVYFASTEKSNIIRGWIFGTTLDSKTQSLLIVNNATNVVIKVCEFQFCNDPFLGVYHKNNKSWMESEFRVYSSANNCTFEYVSQPFLMDLEGKQGNFKNLREFVFKNIDGYFKIYSKHTPINLVRDLPQGFSALEPLVDLPIGINITRFQTLLALHRSYLTPGDSSSGWTAGAAAYYVGYLQPRTFLLKYNENGTITDAVDCALDPLSETKCTLKSFTVEKGIYQTSNFRVQPTESIVRFPNITNLCPFGEVFNATRFASVYAWNRKRISNCVADYSVLYNSASFSTFKCYGVSPTKLNDLCFTNVYADSFVIRGDEVIQIAPGQTGKIADYNYKLPDDFTGCVIAWNSNNLDSKVGGNYNYLYRLFRKSNLKPFERDISTEIYQAGSTPCNGVEGFNCYFPLQSYGFQPTNGVGYQPYRVVVLSFELLHAPATVCGPKKSTNLVKNKCVNFNFNGLTGTGVLTESNKKFLPFQQFGRDIADTTDAVRDPQTLEILDITPCSFGGVSVITPGTNTSNQVAVLYQDVNCTEVPVAIHADQLTPTWRVYSTGSNVFQTRAGCLIGAEHVNNSYECDIPIGAGICASYQTQTNSPRRARSVASQSIIAYTMSLGAENSVAYSNNSIAIPTNFTISVTTEILPVSMTKTSVDCTMYICGDSTECSNLLLQYGSFCTQLNRALTGIAVEQDKNTQEVFAQVKQIYKTPPIKDFGGFNFSQILPDPSKPSKRSFIEDLLFNKVTLADAGFIKQYGDCLGDIAARDLICAQKFNGLTVLPPLLTDEMIAQYTSALLAGTITSGWTFGAGAALQIPFAMQMAYRFNGIGVTQNVLYENQKLIANQFNSAIGKIQDSLSSTASALGKLQDVVNQNAQALNTLVKCLSSNFGAISSVLNDILSRLDKVEAEVQIDRLITGRLQCLQTYVTQQLIRAAEIRASANLAATKMSECVLGQSKRVDFCGKGYHLMSFPQSAPHGVVFLHVTYVPAQEKNFTTAPAICHDGKAHFPREGVFVSNGTHWFVTQRNFYEPQIITTDNTFVSGNCDVVIGIVNNTVYDPLQPELDSGGGGSDIDPYKEFGSSYQLLNFLPLDFFPDLNALVDTATALYEEELTGREHCSPHHTAIRQALVCWDELTKLIAWMSSNITSEQVRTIIVNHVNDTWGLKVRQSLWFHLSCLTFGQHTVQEFLVSFGVWIRTPAPYRPPNAPILSTLPEHTVIC

SEQ ID NO: 11392 - protein, 1295 aa, Artificial Sequence
  SARS-CoV-2/pangolin/Guangxi/P4L/2017__EPI_ISL_410538 spike protein (1-1141)(Q959C_S997C) WhcAg construct
MFVFLFVLPLVSSQCVNLTTRTGIPPGYTNSSTRGVYYPDKVFRSSILHLTQDLFLPFFSNVTWFNTINYQGGFKKFDNPVLPFNDGVYFASTEKSNIIRGWIFGTTLDARTQSLLIVNNATNVVIKVCEFQFCTDPFLGVYYHNNNKTWVENEFRVYSSANNCTFEYISQPFLMDLEGKQGNFKNLREFVFKNVDGYFKIYSKHTPIDLVRDLPRGFAALEPLVDLPIGINITRFQTLLALHRSYLTPGNLESGWTTGAAAYYVGYLQQRTFLLSYNQNGTITDAVDCSLDPLSETKCTLKSLTVEKGIYQTSNFRVQPTISIVRFPNITNLCPFGEVFNASKFASVYAWNRKRISNCVADYSVLYNSTSFSTFKCYGVSPTKLNDLCFTNVYADSFVVKGDEVRQIAPGQTGVIADYNYKLPDDFTGCVIAWNSVKQDALTGGNYGYLYRLFRKSKLKPFERDISTEIYQAGSTPCNGQVGLNCYYPLERYGFHPTTGVNYQPFRVVVLSFELLNGPATVCGPKLSTTLVKDKCVNFNFNGLTGTGVLTTSKKQFLPFQQFGRDISDTTDAVRDPQTLEILDITPCSFGGVSVITPGTNTSNQVAVLYQDVNCTEVPMAIHAEQLTPAWRVYSAGANVFQTRAGCLVGAEHVNNSYECDIPVGAGICASYHSMSSLRSVNQRSIIAYTMSLGAENSVAYSNNSIAIPTNFTISVTTEILPVSMTKTSVDCTMYICGDSIECSNLLLQYGSFCTQLNRALTGIAVEQDKNTQEVFAQVKQIYKTPPIKDFGGFNFSQILPDPSKPSKRSFIEDLLFNKVTLADAGFIKQYGDCLGDIAARDLICAQKFNGLTVLPPLLTDEMIAQYTSALLAGTITSGWTFGAGAALQIPFAMQMAYRFNGIGVTQNVLYENQKLIANQFNSAIGKIQDSLSSTASALGKLQDVVNQNAQALNTLVKCLSSNFGAISSVLNDILSRLDKVEAEVQIDRLITGRLQCLQTYVTQQLIRAAEIRASANLAATKMSECVLGQSKRVDFCGKGYHLMSFPQSAPHGVVFLHVTYVPAQEKNFTTAPAICHEGKAHFPREGVFVSNGTHWFITQRNFYEPQIITTDNTFVSGSCDVVIGIVNNTVYDPLQPELDSGGGGSDIDPYKEFGSSYQLLNFLPLDFFPDLNALVDTATALYEEELTGREHCSPHHTAIRQALVCWDELTKLIAWMSSNITSEQVRTIIVNHVNDTWGLKVRQSLWFHLSCLTFGQHTVQEFLVSFGVWIRTPAPYRPPNAPILSTLPEHTVIC

SEQ ID NO: 11393 - protein, 1295 aa, Artificial Sequence
  SARS-CoV-2/pangolin/Guangxi/P5L/2017__EPI_ISL_410540 spike protein (1-1141)(Q959C_S997C) WhcAg construct
MFVFLFVLPLVSSQCVNLTTRTGIPPGYTNSSTRGVYYPDKVFRSSILHLTQDLFLPFFSNVTWFNTINYQGGFKKFDNPVLPFNDGVYFASTEKSNIIRGWIFGTTLDARTQSLLIVNNATNVVIKVCEFQFCTDPFLGVYYHNNNKTWVENEFRVYSSANNCTFEYISQPFLMDLEGKQGNFKNLREFVFKNVDGYFKIYSKHTPIDLVRDLPRGFAALEPLVDLPIGINITRFQTLLALHRSYLTPGKLESGWTTGAAAYYVGYLQQRTFLLSYNQNGTITDAVDCSLDPLSETKCTLKSLTVEKGIYQTSNFRVQPTISIVRFPNITNLCPFGEVFNASKFASVYAWNRKRISNCVADYSVLYNSTSFSTFKCYGVSPTKLNDLCFTNVYADSFVVKGDEVRQIAPGQTGVIADYNYKLPDDFTGCVIAWNSVKQDALTGGNYGYLYRLFRKSKLKPFERDISTEIYQAGSTPCNGQVGLNCYYPLERYGFHPTTGVNYQPFRVVVLSFELLNGPATVCGPKLSTTLVKDKCVNFNFNGLTGTGVLTTSKKQFLPFQQFGRDISDTTDAVRDPQTLEILDITPCSFGGVSVITPGTNTSNQVAVLYQDVNCTEVPMAIHAEQLTPAWRVYSAGANVFQTRAGCLVGAEHVNNSYECDIPVGAGICASYHSMSSFRSVNQRSIIAYTMSLGAENSVAYSNNSIAIPTNFTISVTTEILPVSMTKTSVDCTMYICGDSIECSNLLLQYGSFCTQLNRALTGIAVEQDKNTQEVFAQVKQIYKTPPIKDFGGFNFSQILPDPSKPSKRSFIEDLLFNKVTLADAGFIKQYGDCLGDIAARDLICAQKFNGLTVLPPLLTDEMIAQYTSALLAGTITSGWTFGAGAALQIPFAMQMAYRFNGIGVTQNVLYENQKLIANQFNSAIGKIQDSLSSTASALGKLQDVVNQNAQALNTLVKCLSSNFGAISSVLNDILSRLDKVEAEVQIDRLITGRLQCLQTYVTQQLIRAAEIRASANLAATKMSECVLGQSKRVDFCGKGYHLMSFPQSAPHGVVFLHVTYVPAQEKNFTTAPAICHEGKAHFPREGVFVSNGTHWFITQRNFYEPQIITTDNTFVSGSCDVVIGIVNNTVYDPLQPELDSGGGGSDIDPYKEFGSSYQLLNFLPLDFFPDLNALVDTATALYEEELTGREHCSPHHTAIRQALVCWDELTKLIAWMSSNITSEQVRTIIVNHVNDTWGLKVRQSLWFHLSCLTFGQHTVQEFLVSFGVWIRTPAPYRPPNAPILSTLPEHTVIC

SEQ ID NO: 11394 - protein, 1295 aa, Artificial Sequence
  SARS-CoV-2/pangolin/Guangxi/P5E/2017__EPI_ISL_410541 spike protein (1-1141)(Q959C_S997C) WhcAg construct
MFVFLFVLPLVSSQCVNLTTRTGIPPGYTNSSTRGVYYPDKVFRSSILHLTQDLFLPFFSNVTWFNTITYQGGSKKFDNPVLPFNDGVYFASTEKSNIIRGWIFGTTLDARTQSLLIVNNATNVVIKVCEFQFCTDPFLGVYYHNNNKTWVENEFRVYSSANNCTFEYISQPFLMDLEGKQGNFKNLREFVFKNVDGYFKIYSKHTPIDLVRDLPRGFAALEPLVDLPIGINITRFQTLLALHRSYLTPGKLESGWTTGAAAYYVGYLQQRTFLLSYNQNGTITDAVDCSLDPLSETKCTLKSLTVEKGIYQTSNFRVQPTISIVRFPNITNLCPFGEVFNASKFASVYAWNRKRISNCVADYSVLYNSTSFSTFKCYGVSPTKLNDLCFTNVYADSFVVKGDEVRQIAPGQTGVIADYNYKLPDDFTGCVIAWNSVKQDALTGDNYGYLYRLFRKSKLKPFERDISTEIYQAGSTPCNGQVGLNCYYPLERYGFHPTTGVNYQPFRVVVLSFELLNGPATVCGPKLSTTLVKDKCVNFNFNGLTGTGVLTTSKKQFLPFQQFGRDISDTTDAVRDPQTLEILDITPCSFGGVSVITPGTNTSNQVAVLYQDVNCTEVPMAIHAEQLTPAWRVYSAGANVFQTRAGCLVGAEHVNNSYECDIPVGAGICASYHSMSSFRSVNQRSIIAYTMSLGAENSVAYSNNSIAIPTNFTISVTTEILPVSMTKTSVDCTMYICGDSIECSNLLLQYGSFCTQLNRALTGIAVEQDKNTQEVFAQVKQIYKTPPIKDFGGFNFSQILPDPSKPSKRSFIEDLLFNKVTLADAGFIKQYGDCLGDIAARDLICAQKFNGLTVLPPLLTDEMIAQYTSALLAGTITSGWTFGAGAALQIPFAMQMAYRFNGIGVTQNVLYENQKLIANQFNSAIGKIQDSLSSTASALGKLQDVVNQNAQALNTLVKCLSSNFGAISSVLNDILSRLDKVEAEVQIDRLITGRLQCLQTYVTQQLIRAAEIRASANLAATKMSECVLGQSKRVDFCGKGYHLMSFPQSAPHGVVFLHVTYVPAQEKNFTTAPAICHEGKAHFPREGVFVSNGTHWFITQRNFYEPQIITTDNTFVSGSCDVVIGIVNNTVYDPLQPELDSGGGGSDIDPYKEFGSSYQLLNFLPLDFFPDLNALVDTATALYEEELTGREHCSPHHTAIRQALVCWDELTKLIAWMSSNITSEQVRTIIVNHVNDTWGLKVRQSLWFHLSCLTFGQHTVQEFLVSFGVWIRTPAPYRPPNAPILSTLPEHTVIC

SEQ ID NO: 11395 - protein, 1293 aa, Artificial Sequence
  SARS-CoV-2/pangolin/Guangxi/P1E/2017__EPI_ISL_410539 spike protein (1-1139)(Q957C_S995C) WhcAg construct
MFVFLFVLPLVSSQCVNLTTRTGIQPGYTNSSTRGVYYPDKVFRSSILHLTQDLFLPFFSNVTWFNTINYQGGFKKFDNPVLPFNDGVYFASTEKSNIIRGWIFGTTLDARTQSLLIVNNATNVVIKVCEFQFCTDPFLGVYYHNNNKTWVENEFRVYSSANNCTFEYISQPFLMDLEGKQGNFKNLREFVFKNVDGYFKIYSKHTPIDLVRDLPRGFAALEPLVDLPIGINITRFQTLLALHRSYLTPGKLESGWTTGAAAYYVGYLQQRTFLLSYNQNGTITDAVDCSLDPLSETKCTLKSLTVEKGIYQTSNFRVQPTISIVRFPNITNLCPFGEVFNASKFASVYAWNRKRISNCVADYSVLYNSTSFSTFKCYGVSPTKLNDLCFTNVYADSFVVKGDEVRQIAPGQTGVIADYNYKLPDDFTGCVIAWNSVKQDALTGGNYLYRLFRKSKLKPFERDISTEIYQAGSTPCNGQVGLNCYYPLERYGFHPTTGVNYQPFRVVVLSFELLNGPATVCGPKLSTTLVKDKCVNFNFNGLTGTGVLTTSKKQFLPFQQFGRDISDTTDAVRDPQTLEILDITPCSFGGVSVITPGTNTSNQVAVLYQDVNCTEVPMAIHAEQLTPAWRVYSAGANVFQTRAGCLVGAEHVNNSYECDIPVGAGICASYHSMSSLRSVNQRSIIAYTMSLGAENSVAYSNNSIAIPTNFTISVTTEILPVSMTKTSVDCTMYICGDSIECSNLLLQYGSFCTQLNRALTGIAVEQDKNTQEVFAQVKQIYKTPPIKDFGGFNFSQILPDPSKPSKRSFIEDLLFNKVTLADAGFIKQYGDCLGDIAARDLICAQKFNGLTVLPPLLTDEMIAQYTSALLAGTITSGWTFGAGAALQIPFAMQMAYRFNGIGVTQNVLYENQKLIANQFNSAIGKIQDSLSSTASALGKLQDVVNQNAQALNTLVKCLSSNFGAISSVLNDILSRLDKVEAEVQIDRLITGRLQCLQTYVTQQLIRAAEIRASANLAATKMSECVLGQSKRVDFCGKGYHLMSFPQSAPHGVVFLHVTYVPAQEKNFTTAPAICHEGKAHFPREGVFVSNGTHWFITQRNFYEPQIITTDNTFVSGSCDVVIGIVNNTVYDPLQPELDSGGGGSDIDPYKEFGSSYQLLNFLPLDFFPDLNALVDTATALYEEELTGREHCSPHHTAIRQALVCWDELTKLIAWMSSNITSEQVRTIIVNHVNDTWGLKVRQSLWFHLSCLTFGQHTVQEFLVSFGVWIRTPAPYRPPNAPILSTLPEHTVIC

SEQ ID NO: 11396 - protein, 1301 aa, Artificial Sequence
  SARS-CoV-2/Wuhan/WIV05/2019__EPI_ISL_402128 spike protein (1-1147)(F970C_G999C) WhcAg construct
MFVFLVLLPLVSSQCVNLTTRTQLPPAYTNSFTRGVYYPDKVFRSSVLHSTQDLFLPFFSNVTWFHAIHVSGTNGTKRFDNPVLPFNDGVYFASTEKSNIIRGWIFGTTLDSKTQSLLIVNNATNVVIKVCEFQFCNDPFLGVYYHKNNKSWMESEFRVYSSANNCTFEYVSQPFLMDLEGKQGNFKNLREFVFKNIDGYFKIYSKHTPINLVRDLPQGFSALEPLVDLPIGINITRFQTLLALHRSYLTPGDSSSGWTAGAAAYYVGYLQPRTFLLKYNENGTITDAVDCALDPLSETKCTLKSFTVEKGIYQTSNFRVQPTESIVRFPNITNLCPFGEVFNATRFASVYAWNRKRISNCVADYSVLYNSASFSTFKCYGVSPTKLNDLCFTNVYADSFVIRGDEVRQIAPGQTGKIADYNYKLPDDFTGCVIAWNSNNLDSKVGGNYNYLYRLFRKSNLKPFERDISTEIYQAGSTPCNGVEGFNCYFPLQSYGFQPTNGVGYQPYRVVVLSFELLHAPATVCGPKKSTNLVKNKCVNFNFNGLTGTGVLTESNKKFLPFQQFGRDIADTTDAVRDPQTLEILDITPCSFGGVSVITPGTNTSNQVAVLYQDVNCTEVPVAIHADQLTPTWRVYSTGSNVFQTRAGCLIGAEHVNNSYECDIPIGAGICASYQTQTNSPRRARSVASQSIIAYTMSLGAENSVAYSNNSIAIPTNFTISVTTEILPVSMTKTSVDCTMYICGDSTECSNLLLQYGSFCTQLNRALTGIAVEQDKNTQEVFAQVKQIYKTPPIKDFGGFNFSQILPDPSKPSKRSFIEDLLFNKVTLADAGFIKQYGDCLGDIAARDLICAQKFNGLTVLPPLLTDEMIAQYTSALLAGTITSGWTFGAGAALQIPFAMQMAYRFNGIGVTQNVLYENQKLIANQFNSAIGKIQDSLSSTASALGKLQDVVNQNAQALNTLVKQLSSNCGAISSVLNDILSRLDKVEAEVQIDRLITCRLQSLQTYVTQQLIRAAEIRASANLAATKMSECVLGQSKRVDFCGKGYHLMSFPQSAPHGVVFLHVTYVPAQEKNFTTAPAICHDGKAHFPREGVFVSNGTHWFVTQRNFYEPQIITTDNTFVSGNCDVVIGIVNNTVYDPLQPELDSGGGGSDIDPYKEFGSSYQLLNFLPLDFFPDLNALVDTATALYEEELTGREHCSPHHTAIRQALVCWDELTKLIAWMSSNITSEQVRTIIVNHVNDTWGLKVRQSLWFHLSCLTFGQHTVQEFLVSFGVWIRTPAPYRPPNAPILSTLPEHTVIC

SEQ ID NO: 11397 - protein, 1297 aa, Artificial Sequence
  SARS-CoV-2/bat/Yunnan/RaTG13/2013__EPI_ISL_402131 spike protein (1-1143)(F966C_G995C) WhcAg construct
MFVFLVLLPLVSSQCVNLTTRTQLPPAYTNSSTRGVYYPDKVFRSSVLHLTQDLFLPFFSNVTWFHAIHVSGTNGIKRFDNPVLPFNDGVYFASTEKSNIIRGWIFGTTLDSKTQSLLIVNNATNVVIKVCEFQFCNDPFLGVYYHKNNKSWMESEFRVYSSANNCTFEYVSQPFLMDLEGKQGNFKNLREFVFKNIDGYFKIYSKHTPINLVRDLPPGFSALEPLVDLPIGINITRFQTLLALHRSYLTPGDSSSGWTAGAAAYYVGYLQPRTFLLKYNENGTITDAVDCALDPLSETKCTLKSFTVEKGIYQTSNFRVQPTDSIVRFPNITNLCPFGEVFNATTFASVYAWNRKRISNCVADYSVLYNSTSFSTFKCYGVSPTKLNDLCFTNVYADSFVITGDEVRQIAPGQTGKIADYNYKLPDDFTGCVIAWNSKHIDAKEGGNFNYLYRLFRKANLKPFERDISTEIYQAGSKPCNGQTGLNCYYPLYRYGFYPTDGVGHQPYRVVVLSFELLNAPATVCGPKKSTNLVKNKCVNFNFNGLTGTGVLTESNKKFLPFQQFGRDIADTTDAVRDPQTLEILDITPCSFGGVSVITPGTNASNQVAVLYQDVNCTEVPVAIHADQLTPTWRVYSTGSNVFQTRAGCLIGAEHVNNSYECDIPIGAGICASYQTQTNSRSVASQSIIAYTMSLGAENSVAYSNNSIAIPTNFTISVTTEILPVSMTKTSVDCTMYICGDSTECSNLLLQYGSFCTQLNRALTGIAVEQDKNTQEVFAQVKQIYKTPPIKDFGGFNFSQILPDPSKPSKRSFIEDLLFNKVTLADAGFIKQYGDCLGDIAARDLICAQKFNGLTVLPPLLTDEMIAQYTSALLAGTITSGWTFGAGAALQIPFAMQMAYRFNGIGVTQNVLYENQKLIANQFNSAIGKIQDSLSSTASALGKLQDVVNQNAQALNTLVKQLSSNCGAISSVLNDILSRLDKVEAEVQIDRLITCRLQSLQTYVTQQLIRAAEIRASANLAATKMSECVLGQSKRVDFCGKGYHLMSFPQSAPHGVVFLHVTYVPAQEKNFTTAPAICHDGKAHFPREGVFVSNGTHWFVTQRNFYEPQIITTDNTFVSGSCDVVIGIVNNTVYDPLQPELDSGGGGSDIDPYKEFGSSYQLLNFLPLDFFPDLNALVDTATALYEEELTGREHCSPHHTAIRQALVCWDELTKLIAWMSSNITSEQVRTIIVNHVNDTWGLKVRQSLWFHLSCLTFGQHTVQEFLVSFGVWIRTPAPYRPPNAPILSTLPEHTVIC

SEQ ID NO: 11398 - protein, 1301 aa, Artificial Sequence
  SARS-CoV-2/Wuhan/HBCDC-HB-01/2019__EPI_ISL_402132 spike protein (1-1147)(F970C_G999C) WhcAg construct
MFVFLVLLPLVSSQCVNLTTRTQLPPAYTNSITRGVYYPDKVFRSSVLHSTQDLFLPFFSNVTWFHAIHVSGTNGTKRFDNPVLPFNDGVYFASTEKSNIIRGWIFGTTLDSKTQSLLIVNNATNVVIKVCEFQFCNDPFLGVYYHKNNKSWMESEFRVYSSANNCTFEYVSQPFLMDLEGKQGNFKNLREFVFKNIDGYFKIYSKHTPINLVRDLPQGFSALEPLVDLPIGINITRFQTLLALHRSYLTPGDSSSGWTAGAAAYYVGYLQPRTFLLKYNENGTITDAVDCALDPLSETKCTLKSFTVEKGIYQTSNFRVQPTESIVRFPNITNLCPFGEVFNATRFASVYAWNRKRISNCVADYSVLYNSASFSTFKCYGVSPTKLNDLCFTNVYADSFVIRGDEVRQIAPGQTGKIADYNYKLPDDFTGCVIAWNSNNLDSKVGGNYNYLYRLFRKSNLKPFERDISTEIYQAGSTPCNGVEGFNCYFPLQSYGFQPTNGVGYQPYRVVVLSFELLHAPATVCGPKKSTNLVKNKCVNFNFNGLTGTGVLTESNKKFLPFQQFGRDIADTTDAVRDPQTLEILDITPCSFGGVSVITPGTNTSNQVAVLYQDVNCTEVPVAIHADQLTPTWRVYSTGSNVFQTRAGCLIGAEHVNNSYECDIPIGAGICASYQTQTNSPRRARSVASQSIIAYTMSLGAENSVAYSNNSIAIPTNFTISVTTEILPVSMTKTSVDCTMYICGDSTECSNLLLQYGSFCTQLNRALTGIAVEQDKNTQEVFAQVKQIYKTPPIKDFGGFNFSQILPDPSKPSKRSFIEDLLFNKVTLADAGFIKQYGDCLGDIAARDLICAQKFNGLTVLPPLLTDEMIAQYTSALLAGTITSGWTFGAGAALQIPFAMQMAYRFNGIGVTQNVLYENQKLIANQFNSAIGKIQDSLSSTASALGKLQDVVNQNAQALNTLVKQLSSNCGAISSVLNDILSRLDKVEAEVQIDRLITCRLQSLQTYVTQQLIRAAEIRASANLAATKMSECVLGQSKRVDFCGKGYHLMSFPQSAPHGVVFLHVTYVPAQEKNFTTAPAICHDGKAHFPREGVFVSNGTHWFVTQRNFYEPQIITTDNTFVSGNCDVVIGIVNNTVYDPLQPELDSGGGGSDIDPYKEFGSSYQLLNFLPLDFFPDLNALVDTATALYEEELTGREHCSPHHTAIRQALVCWDELTKLIAWMSSNITSEQVRTIIVNHVNDTWGLKVRQSLWFHLSCLTFGQHTVQEFLVSFGVWIRTPAPYRPPNAPILSTLPEHTVIC

SEQ ID NO: 11399 - protein, 1301 aa, Artificial Sequence
  SARS-CoV-2/Guangdong/20SF028/2020__EPI_ISL_403936 spike protein (1-1147)(F970C_G999C) WhcAg construct
MFVFLVLLPLVSSQCVNLTTRTQLPPAYTNSFTRGVYYPDKVFRSSVLYSTQDLFLPFFSNVTWFHAIHVSGTNGTKRFDNPVLPFNDGVYFASTEKSNIIRGWIFGTTLDSKTQSLLIVNNATNVVIKVCEFQFCNDPFLGVYYHKNNKSWMESEFRVYSSANNCTFEYVSQPFLMDLEGKQGNFKNLREFVFKNIDGYFKIYSKHTPINLVRDLPQGFSALEPLVDLPIGINITRFQTLLALHRSYLTPGDSSSGWTAGAAAYYVGYLQPRTFLLKYNENGTITDAVDCALDPLSETKCTLKSFTVEKGIYQTSNFRVQPTESIVRFPNITNLCPFGEVFNATRFASVYAWNRKRISNCVADYSVLYNSASFSTFKCYGVSPTKLNDLCFTNVYADSFVIRGDEVRQIAPGQTGKIADYNYKLPDDFTGCVIAWNSNNLDSKVGGNYNYLYRLFRKSNLKPFERDISTEIYQAGSTPCNGVEGFNCYFPLQSYGFQPTNGVGYQPYRVVVLSFELLHAPATVCGPKKSTNLVKNKCVNFNFNGLTGTGVLTESNKKFLPFQQFGRDIADTTDAVRDPQTLEILDITPCSFGGVSVITPGTNTSNQVAVLYQDVNCTEVPVAIHADQLTPTWRVYSTGSNVFQTRAGCLIGAEHVNNSYECDIPIGAGICASYQTQTNSPRRARSVASQSIIAYTMSLGAENSVAYSNNSIAIPTNFTISVTTEILPVSMTKTSVDCTMYICGDSTECSNLLLQYGSFCTQLNRALTGIAVEQDKNTQEVFAQVKQIYKTPPIKDFGGFNFSQILPDPSKPSKRSFIEDLLFNKVTLADAGFIKQYGDCLGDIAARDLICAQKFNGLTVLPPLLTDEMIAQYTSALLAGTITSGWTFGAGAALQIPFAMQMAYRFNGIGVTQNVLYENQKLIANQFNSAIGKIQDSLSSTASALGKLQDVVNQNAQALNTLVKQLSSNCGAISSVLNDILSRLDKVEAEVQIDRLITCRLQSLQTYVTQQLIRAAEIRASANLAATKMSECVLGQSKRVDFCGKGYHLMSFPQSAPHGVVFLHVTYVPAQEKNFTTAPAICHDGKAHFPREGVFVSNGTHWFVTQRNFYEPQIITTDNTFVSGNCDVVIGIVNNTVYDPLQPELDSGGGGSDIDPYKEFGSSYQLLNFLPLDFFPDLNALVDTATALYEEELTGREHCSPHHTAIRQALVCWDELTKLIAWMSSNITSEQVRTIIVNHVNDTWGLKVRQSLWFHLSCLTFGQHTVQEFLVSFGVWIRTPAPYRPPNAPILSTLPEHTVIC

SEQ ID NO: 11400 - protein, 1301 aa, Artificial Sequence
  SARS-CoV-2/Shenzhen/SZTH-001/2020__EPI_ISL_406592 spike protein (1-1147)(F970C_G999C) WhcAg construct
MFVFLVLLPLVSSQCVNLTTRTQLPPAYTNSFTRGVYYPDKVFRSSVLHSTQDLFLPFFSNVTWFHAIHVSGTNGTKRFDNPVLPFNDGVYFASTEKSNIIRGWIFGTTLDSKTQSLLIVNNATNVVIKVCEFQFCNDPFLGVYYHKNNKSWMESEFRVYSSANNCTFEYVSQPFLMDLEGKQGNFKNLREFVFKNIDGYFKIYSKHTPINLVRDLPQGFSALEPLVDLPIGINITRFQTLLALHRSYLTPGDSSSGWTAGAAAYYVGYLQPRTFLLKYNENGTITDAVDCALDPLSETKCTLKSFTVEKGIYQTSNFRVQPTESIVRFPNITNLCPFGEVFNATRFASVYAWNRKRISNCVADYSVLYNSASFSTFKCYGVSPTKLNDLCFTNVYADSFVIRGDEVRQIAPGQTGKIADYNYKLPDDFTGCVIAWNSNNLDSKVGGNYNYLYRLFRKSNLKPFERDISTEIYQAGSTPCNGVEGFNCYFPLQSYGFQPTNGVGYQPYRVVVLSFELLHAPATVCGPKKSTNLVKNKCVNFNFNGLTGTGVLTESNKKFLPFQQFGRDIADTTDAVRDPQTLEILDITPCSFGGVSVITPGTNTSNQVAVLYQDVNCTEVPVAIHADQLTPTWRVYSTGSNVFQTRAGCLIGAEHVNNSYECDIPIGAGICASYQTQTNSPRRARSVASQSIIAYTMSLGAENSVAYSNNSIAIPTNFTISVTTEILPVSMTKTSVDCTMYICGDSTECSNLLLQYGSFCTQLNRALTGIAVEQDKNTQEVFAQVKQIYKTPPIKDFGGFNFSQILPDPSKPSKRSFIEDLLFNKVTLADAGFIKQYGDCLGDIAARDLICAQKFNGLTVLPPLLTDEMIAQYTSALLAGTITSGWTFGAGAALQIPFAMQMAYRFNGIGVTQNVLYENQKLIANQFNSAIGKIQDSLSSTASALGKLQDVVNQNAQALNTLVKQLSSNCGAISSVLNDILSRLDKVEAEVQIDRLITCRLQSLQTYVTQQLIRAAEIRASANLAATKMSECVLGQSKRVDFCGKGYHLMSFPQSAPHGVVFLHVTYVPAQEKNFTTAPAICHDGKAHFPREGVFVSNGTHWFVTQRNFYEPQIITTDNTFVSGNCDVLIGIVNNTVYDPLQPELDSGGGGSDIDPYKEFGSSYQLLNFLPLDFFPDLNALVDTATALYEEELTGREHCSPHHTAIRQALVCWDELTKLIAWMSSNITSEQVRTIIVNHVNDTWGLKVRQSLWFHLSCLTFGQHTVQEFLVSFGVWIRTPAPYRPPNAPILSTLPEHTVIC

SEQ ID NO: 11401 - protein, 1301 aa, Artificial Sequence
  SARS-CoV-2/Shenzhen/SZTH-004/2020__EPI_ISL_406595 spike protein (1-1147)(F970C_G999C) WhcAg construct
MFVFLVLLPLVSSQCVNLTTRTQLPPAYTNSFTRGVYYPDKVFRSSVLHSTQDLFLPFFSNVTWFHAIHVSGTNGTKRFDNPVLPFNDGVYFASTEKSNIIRGWIFGTTLDSKTQSLLIVNNATNVVIKVCEFQFCNDPFLGVYYHKNNKSWMESEFRVYSSANNCTFEYVSQPFLMDLEGKQGNFKNLREFVFKNIDGYFKIYSKHTPINLVRDLPQGFSALEPLVDLPIGINITRFQTLLALHRSYLTPGDSSSGWTAGAAAYYVGYLQPRTFLLKYNENGTITDAVDCALDPLSETKCTLKSFTVEKGIYQTSNFRVQPTESIVRFPNITNLCPFGEVFNATRFASVYAWDRKRISNCVAYYSVLYNSASFSTFKCYGVSPTKLNDLCFTNVYADSFVIRGDEVRQIAPGQTGKIADYNYKLPDDFTGCVIAWNSNNLDSKVGGNYNYLYRLFRKSNLKPFERDISTEIYQAGSTPCNGVEGFNCYFPLQSYGFQPTNGVGYQPYRVVVLSFELLHAPATVCGPKKSTNLVKNKCVNFNFNGLTGTGVLTESNKKFLPFQQFGRDIADTTDAVRDPQTLEILDITPCSFGGVSVITPGTNTSNQVAVLYQDVNCTEVPVAIHADQLTPTWRVYSTGSNVFQTRAGCLIGAEHVNNSYECDIPIGAGICASYQTQTNSPRRARSVASQSIIAYTMSLGAENSVAYSNNSIAIPTNFTISVTTEILPVSMTKTSVDCTMYICGDSTECSNLLLQYGSFCTQLNRALTGIAVEQDKNTQEVFAQVKQIYKTPPIKDFGGFNFSQILPDPSKPSKRSFIEDLLFNKVTLADAGFIKQYGDCLGDIAARDLICAQKFNGLTVLPPLLTDEMIAQYTSALLAGTITSGWTFGAGAALQIPFAMQMAYRFNGIGVTQNVLYENQKLIANQFNSAIGKIQDSLSSTASALGKLQDVVNQNAQALNTLVKQLSSNCGAISSVLNDILSRLDKVEAEVQIDRLITCRLQSLQTYVTQQLIRAAEIRASANLAATKMSECVLGQSKRVDFCGKGYHLMSFPQSAPHGVVFLHVTYVPAQEKNFTTAPAICHDGKAHFPREGVFVSNGTHWFVTQRNFYEPQIITTDNTFVSGNCDVVIGIVNNTVYDPLQPELDSGGGGSDIDPYKEFGSSYQLLNFLPLDFFPDLNALVDTATALYEEELTGREHCSPHHTAIRQALVCWDELTKLIAWMSSNITSEQVRTIIVNHVNDTWGLKVRQSLWFHLSCLTFGQHTVQEFLVSFGVWIRTPAPYRPPNAPILSTLPEHTVIC

SEQ ID NO: 11402 - protein, 1301 aa, Artificial Sequence
  SARS-CoV-2/France/IDF0372/2020__EPI_ISL_406596 spike protein (1-1147)(F970C_G999C) WhcAg construct
MFVFLVLLPLVSSQCVNLTTRTQLPPAYTNSFTRGVYYPDKVFRSSVLHSTQDLFLPFFSNVTWFHAIHVSGTNGTKRFDNPVLPFNDGVYFASTEKSNIIRGWIFGTTLDSKTQSLLIVNNATNVVIKVCEFQFCNDPFLGVYYHKNNKSWMESEFRVYSSANNCTFEYVSQPFLMDLEGKQGNFKNLREFVFKNIDGYFKIYSKHTPINLVRDLPQGFSALEPLVDLPIGINITRFQTLLALHRSYLTPGDSSSGWTAGAAAYYVGYLQPRTFLLKYNENGTITDAVDCALDPLSETKCTLKSFTVEKGIYQTSNFRVQPTESIVRFPNITNLCPFGEVFNATRFASVYAWNRKRISNCVADYSFLYNSASFSTFKCYGVSPTKLNDLCFTNVYADSFVIRGDEVRQIAPGQTGKIADYNYKLPDDFTGCVIAWNSNNLDSKVGGNYNYLYRLFRKSNLKPFERDISTEIYQAGSTPCNGVEGFNCYFPLQSYGFQPTNGVGYQPYRVVVLSFELLHAPATVCGPKKSTNLVKNKCVNFNFNGLTGTGVLTESNKKFLPFQQFGRDIADTTDAVRDPQTLEILDITPCSFGGVSVITPGTNTSNQVAVLYQDVNCTEVPVAIHADQLTPTWRVYSTGSNVFQTRAGCLIGAEHVNNSYECDIPIGAGICASYQTQTNSPRRARSVASQSIIAYTMSLGAENSVAYSNNSIAIPTNFTISVTTEILPVSMTKTSVDCTMYICGDSTECSNLLLQYGSFCTQLNRALTGIAVEQDKNTQEVFAQVKQIYKTPPIKDFGGFNFSQILPDPSKPSKRSFIEDLLFNKVTLADAGFIKQYGDCLGDIAARDLICAQKFNGLTVLPPLLTDEMIAQYTSALLAGTITSGWTFGAGAALQIPFAMQMAYRFNGIGVTQNVLYENQKLIANQFNSAIGKIQDSLSSTASALGKLQDVVNQNAQALNTLVKQLSSNCGAISSVLNDILSRLDKVEAEVQIDRLITCRLQSLQTYVTQQLIRAAEIRASANLAATKMSECVLGQSKRVDFCGKGYHLMSFPQSAPHGVVFLHVTYVPAQEKNFTTAPAICHDGKAHFPREGVFVSNGTHWFVTQRNFYEPQIITTDNTFVSGNCDVVIGIVNNTVYDPLQPELDSGGGGSDIDPYKEFGSSYQLLNFLPLDFFPDLNALVDTATALYEEELTGREHCSPHHTAIRQALVCWDELTKLIAWMSSNITSEQVRTIIVNHVNDTWGLKVRQSLWFHLSCLTFGQHTVQEFLVSFGVWIRTPAPYRPPNAPILSTLPEHTVIC

SEQ ID NO: 11403 - protein, 1301 aa, Artificial Sequence
  SARS-CoV-2/Australia/VIC01/2020__EPI_ISL_406844 spike protein (1-1147)(F970C_G999C) WhcAg construct
MFVFLVLLPLVSSQCVNLTTRTQLPPAYTNSFTRGVYYPDKVFRSSVLHSTQDLFLPFFSNVTWFHAIHVSGTNGTKRFDNPVLPFNDGVYFASTEKSNIIRGWIFGTTLDSKTQSLLIVNNATNVVIKVCEFQFCNDPFLGVYYHKNNKSWMESEFRVYSSANNCTFEYVSQPFLMDLEGKQGNFKNLREFVFKNIDGYFKIYSKHTPINLVRDLPQGFSALEPLVDLPIGINITRFQTLLALHRRYLTPGDSSSGWTAGAAAYYVGYLQPRTFLLKYNENGTITDAVDCALDPLSETKCTLKSFTVEKGIYQTSNFRVQPTESIVRFPNITNLCPFGEVFNATRFASVYAWNRKRISNCVADYSVLYNSASFSTFKCYGVSPTKLNDLCFTNVYADSFVIRGDEVRQIAPGQTGKIADYNYKLPDDFTGCVIAWNSNNLDSKVGGNYNYLYRLFRKSNLKPFERDISTEIYQAGSTPCNGVEGFNCYFPLQSYGFQPTNGVGYQPYRVVVLSFELLHAPATVCGPKKSTNLVKNKCVNFNFNGLTGTGVLTESNKKFLPFQQFGRDIADTTDAVRDPQTLEILDITPCSFGGVSVITPGTNTSNQVAVLYQDVNCTEVPVAIHADQLTPTWRVYSTGSNVFQTRAGCLIGAEHVNNSYECDIPIGAGICASYQTQTNSPRRARSVASQSIIAYTMSLGAENSVAYSNNSIAIPTNFTISVTTEILPVSMTKTSVDCTMYICGDSTECSNLLLQYGSFCTQLNRALTGIAVEQDKNTQEVFAQVKQIYKTPPIKDFGGFNFSQILPDPSKPSKRSFIEDLLFNKVTLADAGFIKQYGDCLGDIAARDLICAQKFNGLTVLPPLLTDEMIAQYTSALLAGTITSGWTFGAGAALQIPFAMQMAYRFNGIGVTQNVLYENQKLIANQFNSAIGKIQDSLSSTASALGKLQDVVNQNAQALNTLVKQLSSNCGAISSVLNDILSRLDKVEAEVQIDRLITCRLQSLQTYVTQQLIRAAEIRASANLAATKMSECVLGQSKRVDFCGKGYHLMSFPQSAPHGVVFLHVTYVPAQEKNFTTAPAICHDGKAHFPREGVFVSNGTHWFVTQRNFYEPQIITTDNTFVSGNCDVVIGIVNNTVYDPLQPELDSGGGGSDIDPYKEFGSSYQLLNFLPLDFFPDLNALVDTATALYEEELTGREHCSPHHTAIRQALVCWDELTKLIAWMSSNITSEQVRTIIVNHVNDTWGLKVRQSLWFHLSCLTFGQHTVQEFLVSFGVWIRTPAPYRPPNAPILSTLPEHTVIC

SEQ ID NO: 11404 - protein, 1301 aa, Artificial Sequence
  SARS-CoV-2/Germany/BavPat1/2020__EPI_ISL_406862 spike protein (1-1147)(F970C_G999C) WhcAg construct
MFVFLVLLPLVSSQCVNLTTRTQLPPAYTNSFTRGVYYPDKVFRSSVLHSTQDLFLPFFSNVTWFHAIHVSGTNGTKRFDNPVLPFNDGVYFASTEKSNIIRGWIFGTTLDSKTQSLLIVNNATNVVIKVCEFQFCNDPFLGVYYHKNNKSWMESEFRVYSSANNCTFEYVSQPFLMDLEGKQGNFKNLREFVFKNIDGYFKIYSKHTPINLVRDLPQGFSALEPLVDLPIGINITRFQTLLALHRSYLTPGDSSSGWTAGAAAYYVGYLQPRTFLLKYNENGTITDAVDCALDPLSETKCTLKSFTVEKGIYQTSNFRVQPTESIVRFPNITNLCPFGEVFNATRFASVYAWNRKRISNCVADYSVLYNSASFSTFKCYGVSPTKLNDLCFTNVYADSFVIRGDEVRQIAPGQTGKIADYNYKLPDDFTGCVIAWNSNNLDSKVGGNYNYLYRLFRKSNLKPFERDISTEIYQAGSTPCNGVEGFNCYFPLQSYGFQPTNGVGYQPYRVVVLSFELLHAPATVCGPKKSTNLVKNKCVNFNFNGLTGTGVLTESNKKFLPFQQFGRDIADTTDAVRDPQTLEILDITPCSFGGVSVITPGTNTSNQVAVLYQGVNCTEVPVAIHADQLTPTWRVYSTGSNVFQTRAGCLIGAEHVNNSYECDIPIGAGICASYQTQTNSPRRARSVASQSIIAYTMSLGAENSVAYSNNSIAIPTNFTISVTTEILPVSMTKTSVDCTMYICGDSTECSNLLLQYGSFCTQLNRALTGIAVEQDKNTQEVFAQVKQIYKTPPIKDFGGFNFSQILPDPSKPSKRSFIEDLLFNKVTLADAGFIKQYGDCLGDIAARDLICAQKFNGLTVLPPLLTDEMIAQYTSALLAGTITSGWTFGAGAALQIPFAMQMAYRFNGIGVTQNVLYENQKLIANQFNSAIGKIQDSLSSTASALGKLQDVVNQNAQALNTLVKQLSSNCGAISSVLNDILSRLDKVEAEVQIDRLITCRLQSLQTYVTQQLIRAAEIRASANLAATKMSECVLGQSKRVDFCGKGYHLMSFPQSAPHGVVFLHVTYVPAQEKNFTTAPAICHDGKAHFPREGVFVSNGTHWFVTQRNFYEPQIITTDNTFVSGNCDVVIGIVNNTVYDPLQPELDSGGGGSDIDPYKEFGSSYQLLNFLPLDFFPDLNALVDTATALYEEELTGREHCSPHHTAIRQALVCWDELTKLIAWMSSNITSEQVRTIIVNHVNDTWGLKVRQSLWFHLSCLTFGQHTVQEFLVSFGVWIRTPAPYRPPNAPILSTLPEHTVIC

SEQ ID NO: 11405 - protein, 1301 aa, Artificial Sequence
  SARS-CoV-2/Wuhan/HBCDC-HB-02/2020__EPI_ISL_412978 spike protein (1-1147)(F970C_G999C) WhcAg construct
MFVFLVLLPLVSSQCVNLTTRTQLPPAYTNSFTRGVYYPDKVFRSSVLHSTQDLFLPFFSNVTWFHAIHVSGTNGTKRFDNPVLPFNDGVYFASTEKSNIIRGWIFGTTLDSKTQSLLIVNNATNVVIKVCEFQFCNDPFLGVYYHKNNKSWMESEFRVYSSANNCTFEYVSQPFLMDLEGKQGNFKNLREFVFKNIDGYFKIYSKHTPINLVRDLPQGFSALEPLVDLPIGINITRFQTLLALHRSYLTPGDSSSGWTAGAAAYYVGYLQPRTFLLKYNENGTITDAVDCALDPLSETKCTLKSFTVEKGIYQTSNFRVQPTESIVRFPNITNLCPFGEVFNATRFASVYAWNRKRISNCVADYSVLYNSASFSTFKCYGVSPTKLNDLCFTNVYADSFVIRGDEVRQIAPGQTGKIADYNYKLPDDFTGCVIAWNSNNLDSKVGGNYNYLYRLFRKSNLKPFERDISTEIYQAGSTPCNGVEGFNCYFPLQSYGFQPTNGVGYQPYRVVVLSFELLHAPATVCGPKKSTNLVKNKCVNFNFNGLTGTGVLTESNKKFLPFQQFGRDIADTTDAVRDPQTLEILDITPCSFGGVSVITPGTNTSNQVAVLYQDVNCTEVPVAIHADQLTPTWRVYSTGSNVFQTRAGCLIGAEHVNNSYECDIPIGAGICASYQTQTNSPRRARSVASQSIIAYTMSLGAENSVAYSNNSIAIPTNFTISVTTEILPVSMTKTSVDCTMYICGDSTECSNFLLQYGSFCTQLNRALTGIAVEQDKNTQEVFAQVKQIYKTPPIKDFGGFNFSQILPDPSKPSKRSFIEDLLFNKVTLADAGFIKQYGDCLGDIAARDLICAQKFNGLTVLPPLLTDEMIAQYTSALLAGTITSGWTFGAGAALQIPFAMQMAYRFNGIGVTQNVLYENQKLIANQFNSAIGKIQDSLSSTASALGKLQDVVNQNAQALNTLVKQLSSNCGAISSVLNDILSRLDKVEAEVQIDRLITCRLQSLQTYVTQQLIRAAEIRASANLAATKMSECVLGQSKRVDFCGKGYHLMSFPQSAPHGVVFLHVTYVPAQEKNFTTAPAICHDGKAHFPREGVFVSNGTHWFVTQRNFYEPQIITTDNTFVSGNCDVVIGIVNNTVYDPLQPELDSGGGGSDIDPYKEFGSSYQLLNFLPLDFFPDLNALVDTATALYEEELTGREHCSPHHTAIRQALVCWDELTKLIAWMSSNITSEQVRTIIVNHVNDTWGLKVRQSLWFHLSCLTFGQHTVQEFLVSFGVWIRTPAPYRPPNAPILSTLPEHTVIC

SEQ ID NO: 11406 - protein, 1301 aa, Artificial Sequence
  SARS-CoV-2/Australia/QLD02/2020__EPI_ISL_407896 spike protein (1-1147)(F970C_G999C) WhcAg construct
MFVFLVLLPLVSSQCVNLTTRTQLPPAYTNSFTRGVYYPDKVFRSSVLHSTQDLFLPFFSNVTWFHAIHVSGTNGTKRFDNPVLPFNDGVYFASTEKSNIIRGWIFGTTLDSKTQSLLIVNNATNVVIKVCEFQFCNDPFLGVYYHKNNKSWMESEFRVYSSANNCTFEYVSQPFLMDLEGKQGNFKNLREFVFKNIDGYFKIYSKHTPINLVRDLPQGFSALEPLVDLPIGINITRFQTLLALHRSYLTPGDSSSGWTAGAAAYYVGYLQPRTFLLKYNENGTITDAVDCALDPLSETKCTLKSFTVEKGIYQTSNFRVQPTESIVRFPNITNLCPFGEVFNATRFASVYAWNRKRISNCVADYSVLYNSASFSTFKCYGVSPTKLNDLCFTNVYADSFVIRGDEVRQIAPGQTGKIADYNYKLPDDFTGCVIAWNSNNLDSKVGGNYNYLYRLFRKSNLKPFERDISTEIYQAGSTPCNGVEGFNCYFPLQSYGFQPTNGVGYQPYRVVVLSFELLHAPATVCGPKKSTNLVKNKCVNFNFNGLTGTGVLTESNKKFLPFQQFGRDIADTTDAVRDPQTLEILDITPCSFGGVSVITPGTNTSNQVAVLYQDVNCTEVPVAIHADQLTPTWRVYSTGSNVFQTRAGCLIGAEHVNNSYECDIPIGAGICASYQTQTNSPRRARSVASQSIIAYTMSLGAENSVAYSNNSIAIPTNFTISVTTEILPVSMTKTSVDCTMYICGDSTECSNLLLQYGSFCTQLNRALTGIAVEQDKNTQEVFAQVKQIYKTPPIKDFGGFNFSQILPDPSKPSKRSFIEDLLFNKVTLADAGFIKQYGDCLGDIAARDLICAQKFNGLTVLPPLLTDEMIAQYTSALLAGTITSGWTFGAGAALQIPFAMQMAYRFNGIGVTQNVLYENQKLIANQFNSAIGKIQDSLSSTASALGKLQDVVNQNAQALNTLVKQLSSNCGAISSVLNDILSRLDKVEAEVQIDRLITCRLQSLQTYVTQQLIRAAEIRASANLAATKMSECVLGQSKRVDFCGKGYHLMSFPQSAPHGVVFLHVTYVPAQEKNFTTAPAICHDGKAHFPREGVFVSNGTHWFVTQRNFYEPQIITTDNTFVSGNCDVVIGIVNNTVYDPLQLELDSGGGGSDIDPYKEFGSSYQLLNFLPLDFFPDLNALVDTATALYEEELTGREHCSPHHTAIRQALVCWDELTKLIAWMSSNITSEQVRTIIVNHVNDTWGLKVRQSLWFHLSCLTFGQHTVQEFLVSFGVWIRTPAPYRPPNAPILSTLPEHTVIC

SEQ ID NO: 11407 - protein, 1301 aa, Artificial Sequence
  SARS-CoV-2/India/1-31/2020__EPI_ISL_413523 spike protein (1-1147)(F970C_G999C) WhcAg construct
MFVFLVLLPLVSSQCVNLTTRTQLPPAYTNSFTRGVYYPDKVFRSSVLHSTQDLFLPFFSNVTWFHAIHVSGTNGTKRFDNPVLPFNDGVYFASTEKSNIIRGWIFGTTLDSKTQSLLIVNNATNVVIKVCEFQFCNDPFLGVYYHKNNKSWMESEFRVYSSANNCTFEYVSQPFLMDLEGKQGNFKNLREFVFKNIDGYFKIYSKHTPINLVRDLPQGFSALEPLVDLPIGINITRFQTLLALHRSYLTPGDSSSGWTAGAAAYYVGYLQPRTFLLKYNENGTITDAVDCALDPLSETKCTLKSFTVEKGIYQTSNFRVQPTESIVRFPNITNLCPFGEVFNATRFASVYAWNRKRISNCVADYSVLYNSASFSTFKCYGVSPTKLNDLCFTNVYADSFVIRGDEVRQIAPGQTGKIADYNYKLPDDFTGCVIAWNSNNLDSKVGGNYNYLYRLFRKSNLKPFERDISTEIYQAGSTPCNGVEGFNCYFPLQSYGFQPTNGVGYQPYRVVVLSFELLHAPATVCGPKKSTNLVKNKCVNFNFNGLTGTGVLTESNKKFLPFQQFGRDIADTTDAVRDPQTLEILDITPCSFGGVSVITPGTNTSNQVAVLYQDVNCTEVPVAIHADQLTPTWRVYSTGSNVFQTRAGCLIGAEHVNNSYECDIPIGAGICASYQTQTNSPRRARSVASQSIIAYTMSLGAENSVAYSNNSIAIPTNFTISVTTEILPVSMTKTSVDCTMYICGDSTECSNLLLQYGSFCTQLNRALTGIAVEQDKNTQEVFAQVKQIYKTPPIKDFGGFNFSQILPDPSKPSKRSFIEDLLFNKVTLADAGFIKQYGDCLGDIAARDLICAQKFNGLTVLPPLLTDEMIAQYTSALLAGTITSGWTFGAGAALQIPFAMQMAYRFNGIGVTQNVLYENQKLIANQFNSVIGKIQDSLSSTASALGKLQDVVNQNAQALNTLVKQLSSNCGAISSVLNDILSRLDKVEAEVQIDRLITCRLQSLQTYVTQQLIRAAEIRASANLAATKMSECVLGQSKRVDFCGKGYHLMSFPQSAPHGVVFLHVTYVPAQEKNFTTAPAICHDGKAHFPREGVFVSNGTHWFVTQRNFYEPQIITTDNTFVSGNCDVVIGIVNNTVYDPLQPELDSGGGGSDIDPYKEFGSSYQLLNFLPLDFFPDLNALVDTATALYEEELTGREHCSPHHTAIRQALVCWDELTKLIAWMSSNITSEQVRTIIVNHVNDTWGLKVRQSLWFHLSCLTFGQHTVQEFLVSFGVWIRTPAPYRPPNAPILSTLPEHTVIC

SEQ ID NO: 11408 - protein, 1301 aa, Artificial Sequence
  SARS-CoV-2/Guangdong/GD2020087-P0008/2020__EPI_ISL_413863 spike protein (1-1147)(F970C_G999C) WhcAg construct
MFVFLVLLPLVSSQCVNLTTRTQLPPAYTNSFTRGVYYPDKVFRSSVLHSTQDLFLPFFSNVTWFHAIHVSGTNGTKRFDNPVLPFNDGVYFASTEKSNIIRGWIFGTTLDSKTQSLLIVNNATNVVIKVCEFQFCNDPFLGVYYHKNNKSWMESEFRVYSSANNCTFEYVSQPFLMDLEGKQGNFKNLREFVFKNIDGYFKIYSKHTPINLVRDLPQGFSALEPLVDLPIGINITRFQTLLALHRSYLTPGDSSSGWTAGAAAYYVGYLQPRTFLLKYNENGTITDAVDCALDPLSETKCTLKSFTVEKGIYQTSNFRVQPTESIVRFPNITNLCPFGEVFNATRFASVYAWNRKRISNCVADYSVLYNSASFSTFKCYGVSPTKLNDLCFTNVYADSFVIRGDEVREIAPGQTGKIADYNYKLPDDFTGCVIAWNSNNLDSKVGGNYNYLYRLFRKSNLKPFERDISTEIYQAGSTPCNGVEGFNCYFPLQSYGFQPTNGVGYQPYRVVVLSFELLHAPATVCGPKKSTNLVKNKCVNFNFNGLTGTGVLTESNKKFLPFQQFGRDIADTTDAVRDPQTLEILDITPCSFGGVSVITPGTNTSNQVAVLYQDVNCTEVPVAIHADQLTPTWRVYSTGSNVFQTRAGCLIGAEHVNNSYECDIPIGAGICASYQTQTNSPRRARSVASQSIIAYTMSLGAENSVAYSNNSIAIPTNFTISVTTEILPVSMTKTSVDCTMYICGDSTECSNLLLQYGSFCTQLNRALTGIAVEQDKNTQEVFAQVKQIYKTPPIKDFGGFNFSQILPDPSKPSKRSFIEDLLFNKVTLADAGFIKQYGDCLGDIAARDLICAQKFNGLTVLPPLLTDEMIAQYTSALLAGTITSGWTFGAGAALQIPFAMQMAYRFNGIGVTQNVLYENQKLIANQFNSAIGKIQDSLSSTASALGKLQDVVNQNAQALNTLVKQLSSNCGAISSVLNDILSRLDKVEAEVQIDRLITCRLQSLQTYVTQQLIRAAEIRASANLAATKMSECVLGQSKRVDFCGKGYHLMSFPQSAPHGVVFLHVTYVPAQEKNFTTAPAICHDGKAHFPREGVFVSNGTHWFVTQRNFYEPQIITTDNTFVSGNCDVVIGIVNNTVYDPLQPELDSGGGGSDIDPYKEFGSSYQLLNFLPLDFFPDLNALVDTATALYEEELTGREHCSPHHTAIRQALVCWDELTKLIAWMSSNITSEQVRTIIVNHVNDTWGLKVRQSLWFHLSCLTFGQHTVQEFLVSFGVWIRTPAPYRPPNAPILSTLPEHTVIC

SEQ ID NO: 11409 - protein, 1301 aa, Artificial Sequence
  SARS-CoV-2/Sweden/01/2020__EPI_ISL_411951 spike protein (1-1147)(F970C_G999C) WhcAg construct
MFVFLVLLPLVSSQCVNLTTRTQLPPAYTNSFTRGVYYPDKVFRSSVLHSTQDLFLPFFSNVTWFHAIHVSGTNGTKRFDNPVLPFNDGVYFASTEKSNIIRGWIFGTTLDSKTQSLLIVNNATNVVIKVCEFQFCNDPFLGVYYHKNNKSWMESEFRVYSSANNCTFEYVSQPFLMDLEGKQGNFKNLREFVFKNIDGYFKIYSKHTPINLVRDLPQGFSALEPLVDLPIGINITRFQTLLALHRSYLTPGDSSSGWTAGAAAYYVGYLQPRTFLLKYNENGTITDAVDCALDPLSETKCTLKSFTVEKGIYQTSNFRVQPTESIVRFPNITNLCPFGEVFNATRFASVYAWNRKRISNCVADYSVLYNSASFSTFKCYGVSPTKLNDLCFTNVYADSFVIRGDEVRQIAPGQTGKIADYNYKLPDDFTGCVIAWNSNNLDSKVGGNYNYLYRLFRKSNLKPFERDISTEIYQAGSTPCNGVEGFNCYFPLQSYGFQPTNGVGYQPYRVVVLSFELLHAPATVCGPKKSTNLVKNKCVNFNFNGLTGTGVLTESNKKFLPFQQFGRDIADTTDAVRDPQTLEILDITPCSFGGVSVITPGTNTSNQVAVLYQDVNCTEVPVAIHADQLTPTWRVYSTGSNVFQTRAGCLIGAEHVNNSYECDIPIGAGICASYQTQTNSPRRARSVASQSIIAYTMSLGAENSVAYSNNSIAIPTNFTISVTTEILPVSMTKTSVDCTMYICGDSTECSNLLLQYGSFCTQLNRALTGIAVEQDKNTQEVFAQVKQIYKTPPIKDCGGFNFSQILPDPSKPSKRSFIEDLLFNKVTLADAGFIKQYGDCLGDIAARDLICAQKFNGLTVLPPLLTDEMIAQYTSALLAGTITSGWTFGAGAALQIPFAMQMAYRFNGIGVTQNVLYENQKLIANQFNSAIGKIQDSLSSTASALGKLQDVVNQNAQALNTLVKQLSSNCGAISSVLNDILSRLDKVEAEVQIDRLITCRLQSLQTYVTQQLIRAAEIRASANLAATKMSECVLGQSKRVDFCGKGYHLMSFPQSAPHGVVFLHVTYVPAQEKNFTTAPAICHDGKAHFPREGVFVSNGTHWFVTQRNFYEPQIITTDNTFVSGNCDVVIGIVNNTVYDPLQPELDSGGGGSDIDPYKEFGSSYQLLNFLPLDFFPDLNALVDTATALYEEELTGREHCSPHHTAIRQALVCWDELTKLIAWMSSNITSEQVRTIIVNHVNDTWGLKVRQSLWFHLSCLTFGQHTVQEFLVSFGVWIRTPAPYRPPNAPILSTLPEHTVIC

SEQ ID NO: 11410 - protein, 1301 aa, Artificial Sequence
  SARS-CoV-2/Tianmen/HBCDC-HB-07/2020__EPI_ISL_412983 spike protein (1-1147)(F970C_G999C) WhcAg construct
MFVFLVLLPLVSSQCVNLTTRTQLPPAYTNSFTRGVYYPDKVFRSSVLHSTQDLFLPFFSNVTWFHAIHVSGTNGTKRFDNPVLPFNDGVYFASTEKSNIIRGWIFGTTLDSKTQSLLIVNNATNVVIKVCEFQFCNDPFLGVYYHKNNKSWMESEFRVYSSANNCTFEYVSQPFLMDLEGKQGNFKNLREFVFKNIDGYFKIYSKHTPINLVRDLPQGFSALEPLVDLPIGINITRFQTLLALHRSYLTPGDSSSGWTAGAAAYYVGYLQPRTFLLKYNENGTITDAVDCALDPLSETKCTLKSFTVEKGIYQTSNFRVQPTESIVRFPNITNLCPFGEVFNATRFASVYAWNRKRISNCVADYSVLYNSASFSTFKCYGVSPTKLNDLCFTNVYADSFVIRGDEVRQIAPGQTGKIADYNYKLPDDFTGCVIAWNSNNLDSKVGGNYNYLYRLFRKSNLKPFERDISTEIYQAGSTPCNGVEGFNCYFPLQSYGFQPTNGVGYQPYRVVVLSFELLHAPATVCGPKKSTNLVKNKCVNFNFNGLTGTGVLTESNKKFLPFQQFGRDIADTTDAVRDPQTLEILDITPCSFGGVSVITPGTNTSNQVAVLYQDLNCTEVPVAIHADQLTPTWRVYSTGSNVFQTRAGCLIGAEHVNNSYECDIPIGAGICASYQTQTNSPRRARSVASQSIIAYTMSLGAENSVAYSNNSIAIPTNFTISVTTEILPVSMTKTSVDCTMYICGDSTECSNLLLQYGSFCTQLNRALTGIAVEQDKNTQEVFAQVKQIYKTPPIKDFGGFNFSQILPDPSKPSKRSFIEDLLFNKVTLADAGFIKQYGDCLGDIAARDLICAQKFNGLTVLPPLLTDEMIAQYTSALLAGTITSGWTFGAGAALQIPFAMQMAYRFNGIGVTQNVLYENQKLIANQFNSAIGKIQDSLSSTASALGKLQDVVNQNAQALNTLVKQLSSNCGAISSVLNDILSRLDKVEAEVQIDRLITCRLQSLQTYVTQQLIRAAEIRASANLAATKMSECVLGQSKRVDFCGKGYHLMSFPQSAPHGVVFLHVTYVPAQEKNFTTAPAICHDGKAHFPREGVFVSNGTHWFVTQRNFYEPQIITTDNTFVSGNCDVVIGIVNNTVYDPLQPELDSGGGGSDIDPYKEFGSSYQLLNFLPLDFFPDLNALVDTATALYEEELTGREHCSPHHTAIRQALVCWDELTKLIAWMSSNITSEQVRTIIVNHVNDTWGLKVRQSLWFHLSCLTFGQHTVQEFLVSFGVWIRTPAPYRPPNAPILSTLPEHTVIC

SEQ ID NO: 11411 - protein, 1301 aa, Artificial Sequence
  SARS-CoV-2/Hong Kong/case42_VM20002493/2020__EPI_ISL_414527 spike protein (1-1147)(F970C_G999C) WhcAg construct
MFVFLVLLPLVSSQCVNLTTRTQLPPAYTNSFTRGVYYPDKVFRSSVLHSTQDLFLPFFSNVTWFHAIHVSGTNGTKRFDNPVLPFNDGVYFASTEKSNIIRGWIFGTTLDSKTQSLLIVNNATNVVIKVCEFQFCNDPFLGVYYHKNNKSWMESEFRVYSSANNCTFEYVSQPFLMDLEGKQGNFKNLREFVFKNIDGYFKIYSKHTPINLVRDLPQGFSALEPLVDLPIGINITRFQTLLALHRSYLTPGDSSSGWTAGAAAYYVGYLQPRTFLLKYNENGTITDAVDCALDPLSETKCTLKSFTVEKGIYQTSNFRVQPTESIVRFPNITNLCPFGEVFNATRFASVYAWNRKRISNCVADYSVLYNSASFSTFKCYGVSPTKLNDLCFTNVYADSFVIRGDEVRQIAPGQTGKIADYNYKLPDDFTGCVIAWNSNNLDSKVGGNYNYLYRLFRKSNLKPFERDISTEIYQAGSTPCNGVEGFNCYFPLQSYGFQPTNGVGYQPYRVVVLSFELLHAPATVCGPKKSTNLVKNKCVNFNFNGLTGTGVLTESNKKFLPFQQFGRDIADTTDAVRDPQTLEILDITPCSFGGVSVITPGTNTSNQVAVLYQDVNCTEVPVAIHADQLTPTWRVYSTGSNVFQTRAGCLIGAEHVNNSYECDIPIGAGICASYQTQTNSPRRARSVASQSIIAYTMSLGAENSVAYSNNSIAIPTNFAISVTTEILPVSMTKTSVDCTMYICGDSTECSNLLLQYGSFCTQLNRALTGIAVEQDKNTQEVFAQVKQIYKTPPIKDFGGFNFSQILPDPSKPSKRSFIEDLLFNKVTLADAGFIKQYGDCLGDIAARDLICAQKFNGLTVLPPLLTDEMIAQYTSALLAGTITSGWTFGAGAALQIPFAMQMAYRFNGIGVTQNVLYENQKLIANQFNSAIGKIQDSLSSTASALGKLQDVVNQNAQALNTLVKQLSSNCGAISSVLNDILSRLDKVEAEVQIDRLITCRLQSLQTYVTQQLIRAAEIRASANLAATKMSECVLGQSKRVDFCGKGYHLMSFPQSAPHGVVFLHVTYVPAQEKNFTTAPAICHDGKAHFPREGVFVSNGTHWFVTQRNFYEPQIITTDNTFVSGNCDVVIGIVNNTVYDPLQPELDSGGGGSDIDPYKEFGSSYQLLNFLPLDFFPDLNALVDTATALYEEELTGREHCSPHHTAIRQALVCWDELTKLIAWMSSNITSEQVRTIIVNHVNDTWGLKVRQSLWFHLSCLTFGQHTVQEFLVSFGVWIRTPAPYRPPNAPILSTLPEHTVIC

SEQ ID NO: 11412 - protein, 1301 aa, Artificial Sequence
  SARS-CoV-2/USA/CruiseA-23/2020__EPI_ISL_414482 spike protein (1-1147)(F970C_G999C) WhcAg construct
MFVFLVLLPLVSSQCVNLTTRTQLPPAYTNSFTRGVYYPDKVFRSSVLHSTQDLFLPFFSNVTWFHAIHVSGTNGTKRFDNPVLPFNDGVYFASTEKSNIIRGWIFGTTLDSKTQSLLIVNNATNVVIKVCEFQFCNDPFLGVYYHKNNKSWMESEFRVYSSANNCTFEYVSQPFLMDLEVKQGNFKNLREFVFKNIDGYFKIYSKHTPINLVRDLPQGFSALEPLVDLPIGINITRFQTLLALHRSYLTPGDSSSGWTAGAAAYYVGYLQPRTFLLKYNENGTITDAVDCALDPLSETKCTLKSFTVEKGIYQTSNFRVQPTESIVRFPNITNLCPFGEVFNATRFASVYAWNRKRISNCVADYSVLYNSASFSTFKCYGVSPTKLNDLCFTNVYADSFVIRGDEVRQIAPGQTGKIADYNYKLPDDFTGCVIAWNSNNLDSKVGGNYNYLYRLFRKSNLKPFERDISTEIYQAGSTPCNGVEGFNCYFPLQSYGFQPTNGVGYQPYRVVVLSFELLHAPATVCGPKKSTNLVKNKCVNFNFNGLTGTGVLTESNKKFLPFQQFGRDIADTTDAVRDPQTLEILDITPCSFGGVSVITPGTNTSNQVAVLYQDVNCTEVPVAIHADQLTPTWRVYSTGSNVFQTRAGCLIGAEHVNNSYECDIPIGAGICASYQTQTNSPRRARSVASQSIIAYTMSLGAENSVAYSNNSIAIPTNFTISVTTEILPVSMTKTSVDCTMYICGDSTECSNLLLQYGSFCTQLNRALTGIAVEQDKNTQEVFAQVKQIYKTPPIKDFGGFNFSQILPDPSKPSKRSFIEDLLFNKVTLADAGFIKQYGDCLGDIAARDLICAQKFNGLTVLPPLLTDEMIAQYTSALLAGTITSGWTFGAGAALQIPFAMQMAYRFNGIGVTQNVLYENQKLIANQFNSAIGKIQDSLSSTASALGKLQDVVNQNAQALNTLVKQLSSNCGAISSVLNDILSRLDKVEAEVQIDRLITCRLQSLQTYVTQQLIRAAEIRASANLAATKMSECVLGQSKRVDFCGKGYHLMSFPQSAPHGVVFLHVTYVPAQEKNFTTAPAICHDGKAHFPREGVFVSNGTHWFVTQRNFYEPQIITTDNTFVSGNCDVVIGIVNNTVYDPLQPELDSGGGGSDIDPYKEFGSSYQLLNFLPLDFFPDLNALVDTATALYEEELTGREHCSPHHTAIRQALVCWDELTKLIAWMSSNITSEQVRTIIVNHVNDTWGLKVRQSLWFHLSCLTFGQHTVQEFLVSFGVWIRTPAPYRPPNAPILSTLPEHTVIC

SEQ ID NO: 11413 - protein, 1301 aa, Artificial Sequence
  SARS-CoV-2/Hong Kong/case85_VM20002868/2020__EPI_ISL_414519 spike protein (1-1147)(F970C_G999C) WhcAg construct
MFVFLVLVPLVSSQCVNLTTRTQLPPAYTNSFTRGVYYPDKVFRSSVLHSTQDLFLPFFSNVTWFHAIHVSGTNGTKRFDNPVLPFNDGVYFASTEKSNIIRGWIFGTTLDSKTQSLLIVNNATNVVIKVCEFQFCNDPFLGVYYHKNNKSWMESEFRVYSSANNCTFEYVSQPFLMDLEGKQGNFKNLREFVFKNIDGYFKIYSKHTPINLVRDLPQGFSALEPLVDLPIGINITRFQTLLALHRSYLTPGDSSSGWTAGAAAYYVGYLQPRTFLLKYNENGTITDAVDCALDPLSETKCTLKSFTVEKGIYQTSNFRVQPTESIVRFPNITNLCPFGEVFNATRFASVYAWNRKRISNCVADYSVLYNSASFSTFKCYGVSPTKLNDLCFTNVYADSFVIRGDEVRQIAPGQTGKIADYNYKLPDDFTGCVIAWNSNNLDSKVGGNYNYLYRLFRKSNLKPFERDISTEIYQAGSTPCNGVEGFNCYFPLQSYGFQPTNGVGYQPYRVVVLSFELLHAPATVCGPKKSTNLVKNKCVNFNFNGLTGTGVLTESNKKFLPFQQFGRDIADTTDAVRDPQTLEILDITPCSFGGVSVITPGTNTSNQVAVLYQDVNCTEVPVAIHADQLTPTWRVYSTGSNVFQTRAGCLIGAEHVNNSYECDIPIGAGICASYQTQTNSPRRARSVASQSIIAYTMSLGAENSVAYSNNSIAIPTNFTISVTTEILPVSMTKTSVDCTMYICGDSTECSNLLLQYGSFCTQLNRALTGIAVEQDKNTQEVFAQVKQIYKTPPIKDFGGFNFSQILPDPSKPSKRSFIEDLLFNKVTLADAGFIKQYGDCLGDIAARDLICAQKFNGLTVLPPLLTDEMIAQYTSALLAGTITSGWTFGAGAALQIPFAMQMAYRFNGIGVTQNVLYENQKLIANQFNSAIGKIQDSLSSTASALGKLQDVVNQNAQALNTLVKQLSSNCGAISSVLNDILSRLDKVEAEVQIDRLITCRLQSLQTYVTQQLIRAAEIRASANLAATKMSECVLGQSKRVDFCGKGYHLMSFPQSAPHGVVFLHVTYVPAQEKNFTTAPAICHDGKAHFPREGVFVSNGTHWFVTQRNFYEPQIITTDNTFVSGNCDVVIGIVNNTVYDPLQPELDSGGGGSDIDPYKEFGSSYQLLNFLPLDFFPDLNALVDTATALYEEELTGREHCSPHHTAIRQALVCWDELTKLIAWMSSNITSEQVRTIIVNHVNDTWGLKVRQSLWFHLSCLTFGQHTVQEFLVSFGVWIRTPAPYRPPNAPILSTLPEHTVIC

SEQ ID NO: 11414 - protein, 1301 aa, Artificial Sequence; identical to SEQ ID NO: 11404
  SARS-CoV-2/England/200990660/2020__EPI_ISL_414523 spike protein (1-1147)(F970C_G999C) WhcAg construct

SEQ ID NO: 11415 - protein, 1301 aa, Artificial Sequence
  SARS-CoV-2/Australia/NSW09/2020__EPI_ISL_413595 spike protein (1-1147)(F970C_G999C) WhcAg construct
MFVFLVLLPLVSSQCVNLTTRTQLPPAYTNSFTRGVYYPDKVFRSSVLHSTQDLFLPFFSNVTWFHAIHVSGTNGTKRFDNPVLPFNDGVYFASTEKSNIIRGWIFGTTLDSKTQSLLIVNNATNVVIKVCEFQFCNDPFLGVYYHKNNKSWMESEFRVYSSANNCTFEYVSQPFLMDLEGKQGNFKNLREFVFKNIDGYFKIYSKHTPINLVRDLPQGFSALEPLVDLPIGINITRFQTLLALHRSYLTPGDSSSGWTAGAAAYYVGYLQPRTFLLKYNENGTITDAVDCALDPLSETKCTLKSFTVEKGIYQTSNFRVQPTESIVRFPNITNLCPFGEVFNATRFASVYAWNRKRISNCVADYSVLYNSASFSTFKCYGVSPTKLNDLCFTNVYADSFVIRGDEVRQIAPGQTGKIADYNYKLPDDFTGCVIAWNSNNLDSKVGGNYNYLYRLFRKSNLKPFERDISTEIYQAGSTPCNGVEGFNCYFPLQSYGFQPTNGVGYQPYRVVVLSFELLHAPATVCGPKKSTNLVKNKCVNFNFNGLTGTGVLTESNKKFLPFQQFGRDIADTTDAVRDPQTLEILDITPCSFGGVSVITPGTNTSNQVAVLYQDVNCTEVPVAIHADQLTPTWRVYSTGSNVFQTRAGCLIGAEHVNNSYECDIPIGAGICASYQTQTNSPRRARSVASQSIIAYTMSLGAENSVAYSNNSIAIPTNFTISVTTEILPVSMTKTSVDCTMYICGDSTECSNLLLQYGSFCTQLNRALTGIAVEQDKNTQEVFAQVKQIYKTPPIKDFGGFNFSQILPDPSKPSKRSFIEDLLFNKVTLADAGFIKQYGDCLGDIAARDLICAQKFNGLTVLPPLLTDEMIAQYTSALLAGTITSGWTFGAGAALQIPFAMQMAYRFNGIGVTQNVLYENQKLIANQFNSAIGKIQDSLSFTASALGKLQDVVNQNAQALNTLVKQLSSNCGAISSVLNDILSRLDKVEAEVQIDRLITCRLQSLQTYVTQQLIRAAEIRASANLAATKMSECVLGQSKRVDFCGKGYHLMSFPQSAPHGVVFLHVTYVPAQEKNFTTAPAICHDGKAHFPREGVFVSNGTHWFVTQRNFYEPQIITTDNTFVSGNCDVVIGIVNNTVYDPLQPELDSGGGGSDIDPYKEFGSSYQLLNFLPLDFFPDLNALVDTATALYEEELTGREHCSPHHTAIRQALVCWDELTKLIAWMSSNITSEQVRTIIVNHVNDTWGLKVRQSLWFHLSCLTFGQHTVQEFLVSFGVWIRTPAPYRPPNAPILSTLPEHTVIC

SEQ ID NO: 11416 - protein, 1301 aa, Artificial Sequence; identical to SEQ ID NO: 11396
  SARS-CoV-2/Australia/NSW10/2020__EPI_ISL_413596 spike protein (1-1147)(F970C_G999C) WhcAg construct

SEQ ID NO: 11417 - protein, 1301 aa, Artificial Sequence
  SARS-CoV-2/Switzerland/1000477797/2020__EPI_ISL_413023 spike protein (1-1147)(F970C_G999C) WhcAg construct
MFVFLVLLPLVSSQCVNLTTRTQLPPAYTNSFTRGVYYPDKVFRSSVLHSTQDLFLPFFSNVTWFHAIHVSGTNGTKRFDNPVLPFNDGVYFASTEKSNIIRGWIFGTTLDSKTQSLLIVNNATNVVIKVCEFQFCNDPFLGVYYHKNNKSWMESEFRVYSSANNCTFEYVSQPFLMDLEGKQGNFKNLREFVFKNIDGYFNIYSKHTPINLVRDLPQGFSALEPLVDLPIGINITRFQTLLALHRSYLTPGDSSSGWTAGAAAYYVGYLQPRTFLLKYNENGTITDAVDCALDPLSETKCTLKSFTVEKGIYQTSNFRVQPTESIVRFPNITNLCPFGEVFNATRFASVYAWNRKRISNCVADYSVLYNSASFSTFKCYGVSPTKLNDLCFTNVYADSFVIRGDEVRQIAPGQTGKIADYNYKLPDDFTGCVIAWNSNNLDSKVGGNYNYLYRLFRKSNLKPFERDISTEIYQAGSTPCNGVEGFNCYFPLQSYGFQPTNGVGYQPYRVVVLSFELLHAPATVCGPKKSTNLVKNKCVNFNFNGLTGTGVLTESNKKFLPFQQFGRDIADTTDAVRDPQTLEILDITPCSFGGVSVITPGTNTSNQVAVLYQGVNCTEVPVAIHADQLTPTWRVYSTGSNVFQTRAGCLIGAEHVNNSYECDIPIGAGICASYQTQTNSPRRARSVASQSIIAYTMSLGAENSVAYSNNSIAIPTNFTISVTTEILPVSMTKTSVDCTMYICGDSTECSNLLLQYGSFCTQLNRALTGIAVEQDKNTQEVFAQVKQIYKTPPIKDFGGFNFSQILPDPSKPSKRSFIEDLLFNKVTLADAGFIKQYGDCLGDIAARDLICAQKFNGLTVLPPLLTDEMIAQYTSALLAGTITSGWTFGAGAALQIPFAMQMAYRFNGIGVTQNVLYENQKLIANQFNSAIGKIQDSLSSTASALGKLQDVVNQNAQALNTLVKQLSSNCGAISSVLNDILSRLDKVEAEVQIDRLITCRLQSLQTYVTQQLIRAAEIRASANLAATKMSECVLGQSKRVDFCGKGYHLMSFPQSAPHGVVFLHVTYVPAQEKNFTTAPAICHDGKAHFPREGVFVSNGTHWFVTQRNFYEPQIITTDNTFVSGNCDVVIGIVNNTVYDPLQPELDSGGGGSDIDPYKEFGSSYQLLNFLPLDFFPDLNALVDTATALYEEELTGREHCSPHHTAIRQALVCWDELTKLIAWMSSNITSEQVRTIIVNHVNDTWGLKVRQSLWFHLSCLTFGQHTVQEFLVSFGVWIRTPAPYRPPNAPILSTLPEHTVIC

SEQ ID NO: 11418 - protein, 1301 aa, Artificial Sequence
  SARS-CoV-2/Belgium/BA-02291/2020__EPI_ISL_415159 spike protein (1-1147)(F970C_G999C) WhcAg construct
MFVFLVLLPLVSSQCVNLTTRTQLPPAYTNSFTRGVYYPDKVFRSSVLHSTQDLFLPFFSNVTWFHAIHVSGTNGTKRFDNPVLPFNDGVYFASTEKSNIIRGWIFGTTLDSKTQSLLIVNNATNVVIKVCEFQFCNDPFLGVYYHKNNKSWMESEFRVYSSANNCTFEYVSQPFLMDLEGKQGNFKNLREFVFKNIDGYFKIYSKHTPINLVRDLPQGFSALEPLVDLPIGINITRFQTLLALHRSYLTPGDSSSGWTAGAAAYYVGYLQPRTFLLKYNENGTITDAVDCALDPLSETKCTLKSFTVEKGIYQTSNFRVQPTESIVRFPNITNLCPFGEVFNATRFASVYAWNRKRISNCVADYSVLYNSASFSTFKCYGVSPTKLNDLCFTNVYADSFVIRGDEVRQIAPGQTGKIADYNYKLPDDFTGCVIAWNSNNLDSKVGGNYNYLYRLFRRSNLKPFERDISTEIYQAGSTPCNGVEGFNCYFPLQSYGFQPTNGVGYQPYRVVVLSFELLPAPATVCGPKKSTNLVKNKCVNFNFNGLTGTGVLTESNKKFLPFQQFGRDIADTTDAVRDPQTLEILDITPCSFGGVSVITPGTNTSNQVAVLYQGVNCTEVPVAIHADQLTPTWRVYSTGSNVFQTRAGCLIGAEHVNNSYECDIPIGAGICASYQTQTNSPRRARSVASQSIIAYTMSLGAENSVAYSNNSIAIPTNFTISVTTEILPVSMTKTSVDCTMYICGDSTECSNLLLQYGSFCTQLNRALTGIAVEQDKNTQEVFAQVKQIYKTPPIKDFGGFNFSQILPDPSKPSKRSFIEDLLFNKVTLADAGFIKQYGDCLGDIAARDLICAQKFNGLTVLPPLLTDEMIAQYTSALLAGTITSGWTFGAGAALQIPFAMQMAYRFNGIGVTQNVLYENQKLIANQFNSAIGKIQDSLSSAAPALGKLQDVVNQNAQALNTLVKQLSSNCGAISSVLNDILSRLDKVEAEVQIDRLITCRLQSLQTYVTQQLIRAAEIRASANLAATKMSECVLGQSKRVDFCGKGYHLMSFPQSAPHGVVFLHVTYVPAQEKNFTTAPAICHDGKAHFPREGVFVSNGTHWFVTQRNFYEPQIITTDNTFVSGNCDVVIGIVNNTVYDPLQPELDSGGGGSDIDPYKEFGSSYQLLNFLPLDFFPDLNALVDTATALYEEELTGREHCSPHHTAIRQALVCWDELTKLIAWMSSNITSEQVRTIIVNHVNDTWGLKVRQSLWFHLSCLTFGQHTVQEFLVSFGVWIRTPAPYRPPNAPILSTLPEHTVIC

SEQ ID NO: 11419 - protein, 1301 aa, Artificial Sequence
  SARS-CoV-2/USA/WA8-UW5/2020__EPI_ISL_413486 spike protein (1-1147)(F970C_G999C) WhcAg construct
MFVFLVLLPLVSSQCVNLTTRTQLPPAYTNSFTRGVYYPDKVFRSSVLHSTQDLFLPFFSNVTWFHAIHVSGTNGTKRFDNPVLPFNDGVYFASTEKSNIIRGWIFGTTLDSKTQSLLIVNNATNVVIKVCEFQFCNDPFLGVYYHKNNKSWMESEFRVYSSANNCTFEYVSQPFLMDLEGKQGNFKNLREFVFKNIDGYFKIYSKHTPINLVRDLPQGFSALEPLVDLPIGINITRFQTLLALHRSYLTPGDSSSGWTAGAAAYYVGYLQPRTFLLKYNENGTITDAVDCALDPLSETKCTLKSFTVEKGIYQTSNFRVQPTESIVRFPNITNLCPFGEVFNATRFASVYAWNRKRISNCVADYSVLYNSASFSTFKCYGVSPTKLNDLCFTNVYADSFVIRGDEVRQIAPGQTGKIADYNYKLPDDFTGCVIAWNSNNLDSKVGGNYNYLYRLFRKSNLKPFERDISTEIYQAGSTPCNGVEGFNCYFPLQSYGFQPTNGVGYQPYRVVVLSFELLHAPATVCGPKKSTNLVKNKCVNFNFNGLTGTGVLTESNKKFLPFQQFGRDIADTTDAVRDPQTLEILDITPCSFGGVSVITPGTNTSNQVAVLYQDVNCTEVPVAIHADQLTPTWRVYSTGSNVFQTRAGCLIGAEYVNNSYECDIPIGAGICASYQTQTNSPRRARSVASQSIIAYTMSLGAENSVAYSNNSIAIPTNFTISVTTEILPVSMTKTSVDCTMYICGDSTECSNLLLQYGSFCTQLNRALTGIAVEQDKNTQEVFAQVKQIYKTPPIKDFGGFNFSQILPDPSKPSKRSFIEDLLFNKVTLADAGFIKQYGDCLGDIAARDLICAQKFNGLTVLPPLLTDEMIAQYTSALLAGTITSGWTFGAGAALQIPFAMQMAYRFNGIGVTQNVLYENQKLIANQFNSAIGKIQDSLSSTASALGKLQDVVNQNAQALNTLVKQLSSNCGAISSVLNDILSRLDKVEAEVQIDRLITCRLQSLQTYVTQQLIRAAEIRASANLAATKMSECVLGQSKRVDFCGKGYHLMSFPQSAPHGVVFLHVTYVPAQEKNFTTAPAICHDGKAHFPREGVFVSNGTHWFVTQRNFYEPQIITTDNTFVSGNCDVVIGIVNNTVYDPLQPELDSGGGGSDIDPYKEFGSSYQLLNFLPLDFFPDLNALVDTATALYEEELTGREHCSPHHTAIRQALVCWDELTKLIAWMSSNITSEQVRTIIVNHVNDTWGLKVRQSLWFHLSCLTFGQHTVQEFLVSFGVWIRTPAPYRPPNAPILSTLPEHTVIC

SEQ ID NO: 11420 - protein, 1301 aa, Artificial Sequence
  SARS-CoV-2/England/20102000506/2020__EPI_ISL_415147 spike protein (1-1147)(F970C_G999C) WhcAg construct
MFVFLVLLPLVSSQCVNLTTRTQLPPAYTNSFTRGVYYPDKVFRSSVLHSTQDLFLPFFSNVTWFHAIHVSGTNGTKRFDNPVLPFNDGVYFASTEKSNIIRGWIFGTTLDSKTQSLLIVNNATNVVIKVCEFQFCNDPFLGVYYHKNNKSWMESEFRVYSSANNCTFEYVSQPFLMDLEGKQGNFKNLREFVFKNIDGYFKIYSKHTPINLVRDLPQGFSALEPLVDLPIGINITRFQTLLALHRSYLTPGDSSSGWTAGAAAYYVGYLQPRTFLLKYNENGTITDAVDCALDPLSETKCTLKSFTVEKGIYQTSNFRVQPTESIVRFPNITNLCPFGEVFNATRFASVYAWNRKRISNCVADYSVLYNSASFSTFKCYGVSPTKLNDLCFTNVYADSFVIRGDEVRQIAPGQTGKIADYNYKLPDDFTGCVIAWNSNNLDSKVGGNYNYLYRLFRKSNLKPFERDISTEIYQAGSTPCNGVEGFNCYFPLQSYGFQPTNGVGYQPYRVVVLSFELLHAPATVCGPKKSTNLVKNKCVNFNFNGLTGTGVLTESNKKFLPFQQFGRDIADTTDAVRDPQTLEILDITPCSFGGVSVITPGTNTSNQVAVLYQGVNCTEVPVAIHADQLTPTWRVYSTGSNVFQTRAGCLIGAEHVNNSYECDIPIGAGICASYQTQTNSPRRARSVASQSIIAYTMSLGAENSVAYSNNSIAIPTNFTISVTTEILPVSMTKTSVDCTMYICGDSTECSNLLLQYGSFCTQLNRALTGIAVEQDKNTQEVFAQVKQIYKTPPIKDFGGFNFSQILPDPSKPSKRSFIEDLLFNKVTLADAGFIKQYGYCLGDIAARDLICAQKFNGLTVLPPLLTDEMIAQYTSALLAGTITSGWTFGAGAALQIPFAMQMAYRFNGIGVTQNVLYENQKLIANQFNSAIGKIQDSLSSTASALGKLQDVVNQNAQALNTLVKQLSSNCGAISSVLNDILSRLDKVEAEVQIDRLITCRLQSLQTYVTQQLIRAAEIRASANLAATKMSECVLGQSKRVDFCGKGYHLMSFPQSAPHGVVFLHVTYVPAQEKNFTTAPAICHDGKAHFPREGVFVSNGTHWFVTQRNFYEPQIITTDNTFVSGNCDVVIGIVNNTVYDPLQPELDSGGGGSDIDPYKEFGSSYQLLNFLPLDFFPDLNALVDTATALYEEELTGREHCSPHHTAIRQALVCWDELTKLIAWMSSNITSEQVRTIIVNHVNDTWGLKVRQSLWFHLSCLTFGQHTVQEFLVSFGVWIRTPAPYRPPNAPILSTLPEHTVIC

SEQ ID NO: 11421 - protein, 1301 aa, Artificial Sequence
  SARS-CoV-2/Belgium/VAG-03013/2020__EPI_ISL_415155 spike protein (1-1147)(F970C_G999C) WhcAg construct
MFVFLVLLPLVSSQCVNLTTRTQLPPAYTNSFTRGVYYPDKVFRSSVLHSTQDLFLPFFSNVTWFHAIHVSGTNGTKRFDNPVLPFNDGVYFASTEKSNIIRGWIFGTTLDSKTQSLLIVNNATNVVIKVCEFQFCNDPFLGVYYHKNNKSWMESEFRVYSSANNCTFEYVSQPFLMDLEGKQGNFKNLREFVFKNIDGYFKIYSKHTPINLVRDLPQGFSALEPLVDLPIGINITRFQTLLALHRSYLTPGDSSSGWTAGAAAYYVGYLQPRTFLLKYNENGTITDAVDCALDPLSETKCTLKSFTVEKGIYQTSNFRVQPTESIVRFPNITNLCPFGEVFNATRFASVYAWNRKRISNCVADYSVLYNSASFSTFKCYGVSPTKLNDLCFTNVYADSFVIRGDEVRQIAPGQTGKIADYNYKLPDDFTGCVIAWNSNNLDSKVGGNYNYLYRLFRKSNLKPFERDISTEIYQAGSTPCNGVEGFNCYFPLQSYGFQPTNGVGYQPYRVVVLSFELLHAPATVCGPKKSTNLVKNKCVNFNFNGLTGTGVLTESNKKFLPFQQFGRDIADTTDAVRDPQTLEILDITPCSFGGVSVITPGTNTSNQVAVLYQGVNCTEVPVAIHADQLTPTWRVYSTGSNVFQTRAGCLIGAEHVNNSYECDIPIGAGICASYQTQTNSPRRARSVASQSIIAYTMSLGAENSVAYSNNSIAIPTNFTISVTTEILPVSMTKTSVDCTMYICGDSTECSNLLLQYGSFCTQLNRALTGIAVEQDKNTQEVFAQVKQIYKTPPIKDFGGFNFSQILPDPSKPSKRSFIEDLLFNKVTLADAGFIKQYGDCLGDIAARDLICAQKFNGLTVLPPLLTDEMIAQYTSALLAGTITSGWTFGAGAALQIPFAMQMAYRFNGIGVTQNVLYENQKLIANQFNSAIGKIQDSLSSTATALGKLQDVVNQNAQALNTLVKQLSSNCGAISSVLNDILSRLDKVEAEVQIDRLITCRLQSLQTYVTQQLIRAAEIRASANLAATKMSECVLGQSKRVDFCGKGYHLMSFPQSAPHGVVFLHVTYVPAQEKNFTTAPAICHDGKAHFPREGVFVSNGTHWFVTQRNFYEPQIITTDNTFVSGNCDVVIGIVNNTVYDPLQPELDSGGGGSDIDPYKEFGSSYQLLNFLPLDFFPDLNALVDTATALYEEELTGREHCSPHHTAIRQALVCWDELTKLIAWMSSNITSEQVRTIIVNHVNDTWGLKVRQSLWFHLSCLTFGQHTVQEFLVSFGVWIRTPAPYRPPNAPILSTLPEHTVIC

SEQ ID NO: 11422 - protein, 1301 aa, Artificial Sequence
  SARS-CoV-2/Belgium/BC-03016/2020__EPI_ISL_415157 spike protein (1-1147)(F970C_G999C) WhcAg construct
MFVFLVLLPLVSSQCVNLTTRTQLPPAYTNSFTRGVYYPDKVFRSSVLHSTQDLFLPFFSNVTWFHAIHVSGTNGTKRFDNPVLPFNDGVYFASTEKSNIIRGWIFGTTLDSKTQSLLIVNNATNVVIKVCEFQFCNDPFLGVYYHKNNKSWMESEFRVYSSANNCTFEYVSQPFLMDLEGKQGNFKNLREFVFKNIDGYFKIYSKHTPINLVRDLPQGFSALEPLVDLPIGINITRFQTLLALHRSYLTPGDSSSGWTAGAAAYYVGYLQPRTFLLKYNENGTITDAVDCALDPLSETKCTLKSFTVEKGIYQTSNFRVQPTESIVRFPNITNLCPFGEVFNATRFASVYAWNRKRISNCVADYSVLYNSASFSTFKCYGVSPTKLNDLCFTNVYADSFVIRGDEVRQIAPGQTGKIADYNYKLPDDFTGCVIAWNSNNLDSKVGGNYNYLYRLFRKSNLKPFERDISTEIYQAGSTPCNGVEGFNCYFPLQSYGFQPTNGVGYQPYRVVVLSFELLHAPATVCGPKKSTNLVKNKCVNFNFNGLTGTGVLTESNKKFLPFQQFGRDIADTTDAVRDPQTLEILDITPCSFGGVSVITPGTNTSNQVAVLYQGVNCTEVPVAIHADQLTPTWRVYSTGSNVFQTRAGCLIGAEHVNNSYECDIPIGAGICASYQTQTNSPRRARSVASQSIIAYTMSLGAENSVAYSNNSIAIPTNFTISVTTEILPVSMTKTSVDCTMYICGDSTECSNLLLQYGSFCTQLNRALTGIAVEQDKNTQEVFAQVKQIYKTPPIKDFGGFNFSQILPDPSKPSKRSFIEDLLFNKVTLADAGFIKQYGDCLGDIAARDLICAQKFNGLTVLPPLLTDEMIAQYTSALLAGTITSGWTFGAGAALQIPFAMQMAYRFNGIGVTQNVLYENQKLIANQFNSAIGKIQDSLSSTAPALGKLQDVVNQNAQALNTLVKQLSSNCGAISSVLNDILSRLDKVEAEVQIDRLITCRLQSLQTYVTQQLIRAAEIRASANLAATKMSECVLGQSKRVDFCGKGYHLMSFPQSAPHGVVFLHVTYVPAQEKNFTTAPAICHDGKAHFPREGVFVSNGTHWFVTQRNFYEPQIITTDNTFVSGNCDVVIGIVNNTVYDPLQPELDSGGGGSDIDPYKEFGSSYQLLNFLPLDFFPDLNALVDTATALYEEELTGREHCSPHHTAIRQALVCWDELTKLIAWMSSNITSEQVRTIIVNHVNDTWGLKVRQSLWFHLSCLTFGQHTVQEFLVSFGVWIRTPAPYRPPNAPILSTLPEHTVIC

SEQ ID NO: 11423 - protein, 1301 aa, Artificial Sequence
  SARS-CoV-2/Germany/BavPat3/2020__EPI_ISL_414521 spike protein (1-1147)(F970C_G999C) WhcAg construct
MFVFLVLLPLVSSQCVNLTTRTQLPPAYTNSFTRGVYYPDKVFRSSVLHSTQDLFLPFFSNVTWFHAIHVSGTNGTKRFDNPVLPFNDGVYFASTEKSNIIRGWIFGTTLDSKTQSLLIVNNATNVVIKVCEFQFCNDPFLGVYYHKNNKSWMESEFRVYSSANNCTFEYVSQPFLMDLEGKQGNFKNLREFVFKNIDGYFKIYSKHTPINLVRDLPQGFSALEPLVDLPIGINITRFQTLLALHRSYLTPGDSSSGWTAGAAAYYVGYLQPRTFLLKYNENGTITDAVDCALDPLSETKCTLKSFTVEKGIYQTSNFRVQPTESIVRFPNITNLCPFGEVFNATRFASVYAWNRKRISNCVADYSVLYNSASFSTFKCYGVSPTKLNDLCFTNVYADSFVIRGDEVRQIAPGQTGKIADYNYKLPDDFTGCVIAWNSNNLDSKVGGNYNYLYRLFRKSNLKPFERDISTEIYQAGSTPCNGVEGFNCYFPLQSYGFQPTNGVGYQPYRVVVLSFELLHAPATVCGPKKSTNLVKNKCVNFNFNGLTGTGVLTESNKKFLPFQQFGRDIADTTDAVRDPQTLEILDITPCSFGGVSVITPGTNTSNQVAVLYQDVNCTEVPVAIHADQLTPTWRVYSTGSNVFQTRAGCLIGAEHVNNSYECDIPIGAGICASYQTQTNSPRRARSVASQSIIAYTMSLGAENSVAYSNNSIAIPTNFTISVTTEILPVSMTKTSVDCTMYICGDSTECSNLLLQYGSFCTQLNRALTGIAVEQDKNTQQVFAQVKQIYKTPPIKDFGGFNFSQILPDPSKPSKRSFIEDLLFNKVTLADAGFIKQYGDCLGDIAARDLICAQKFNGLTVLPPLLTDEMIAQYTSALLAGTITSGWTFGAGAALQIPFAMQMAYRFNGIGVTQNVLYENQKLIANQFNSAIGKIQDSLSSTASALGKLQDVVNQNAQALNTLVKQLSSNCGAISSVLNDILSRLDKVEAEVQIDRLITCRLQSLQTYVTQQLIRAAEIRASANLAATKMSECVLGQSKRVDFCGKGYHLMSFPQSAPHGVVFLHVTYVPAQEKNFTTAPAICHDGKAHFPREGVFVSNGTHWFVTQRNFYEPQIITTDNTFVSGNCDVVIGIVNNTVYDPLQPELDSGGGGSDIDPYKEFGSSYQLLNFLPLDFFPDLNALVDTATALYEEELTGREHCSPHHTAIRQALVCWDELTKLIAWMSSNITSEQVRTIIVNHVNDTWGLKVRQSLWFHLSCLTFGQHTVQEFLVSFGVWIRTPAPYRPPNAPILSTLPEHTVIC

SEQ ID NO: 11424 - protein, 1301 aa, Artificial Sequence
  SARS-CoV-2/France/HF1805/2020__EPI_ISL_414628 spike protein (1-1147)(F970C_G999C) WhcAg construct
MFVFLVLLPLVSSQCVNLTTRTQLPPAYTNSFTRGVYYPDKVFRSSVLHSTQDLFLPFFSNVTWFHAIHVSGTNGTKRFDNPVLPFNDGVYFASTEKSNIIRGWIFGTTLDSKTQSLLIVNNATNVVIKVCEFQFCNDPFLGVYYHKNNKSWMESEFRVYSSANNCTFEYVSQPFLMDLEGKQGNFKNLREFVFKNIDGYFKIYSKHTPINLVRDLPQGFSALEPLVDLPIGINITRFQTLLALHRSYLTPGDSSSGWTAGAAAYYVGYLQPRTFLLKYNENGTITDAVDCALDPLSETKCTLKSFTVEKGIYQTSNFRVQPTESIVRFPNITNLCPFGEVFNATRFASVYAWNRKRISNCVADYSVLYNSASFSTFKCYGVSPTKLNDLCFTNVYADSFVIRGDEVRQIAPGQTGKIADYNYKLPDDFTGCVIAWNSNNLDSKVGGNYNYLYRLFRKSNLKPFERDISTEIYQAGSTPCNGVEGFNCYFPLQSYGFQPTNGVGYQPYRVVVLSFELLHAPATVCGPKKSTNLVKNKCVNFNFNGLTGTGVLTESNKKFLPFQQFGRDIADTTDAVRDPQTLEILDITPCSFGGVSVITPGTNTSNQVAVLYQGVNCTEVPVAIHADQLTPTWRVYSTGSNVFQTRAGCLIGAEHVNNSYECDIPIGAGICASYQTQTNSPRRARSVASQSIIAYTMSLGAENSVAYSNNSIAIPTNFTISVTTEILPVSMTKTSVDCTMYICGDSTECSNLLLQYGSFCTQLNRALTGIAVEQDKNTQEVFAQVKQIYKTPPIKDFGGFNFSQILPDPSKPSKRSFIEDLLFNKVTLADAGFIKQYGDCLGDIAARDLICAQKFNGLTVLPPLLTDEMIAQYTSALLAGTITSGWTFGAGAALQIPFAMQMAYRFNGIGVTQNVLYENQKLIANQFNSAIGKIQDSLSSTASALGKLQDVVNQNAQALNTLVKQLSSNCGAISSVLNDILSRLDKVEAEVQIDRLITCRLQSLQTYVTQQLIRAAEIRASANLAATKMSECVLGQSKRVDFCGKGYHLMSFPQSAPHGVVFLHVTYVPAQEKNFTTAPAICHDGKAHFPREGVFVSNGTHWFVTQRNFYEPQIITTDNTFVSGNCDVVIGVVNNTVYDPLQPELDSGGGGSDIDPYKEFGSSYQLLNFLPLDFFPDLNALVDTATALYEEELTGREHCSPHHTAIRQALVCWDELTKLIAWMSSNITSEQVRTIIVNHVNDTWGLKVRQSLWFHLSCLTFGQHTVQEFLVSFGVWIRTPAPYRPPNAPILSTLPEHTVIC

SEQ ID NO: 11425 - protein, 1301 aa, Artificial Sequence
  SARS-CoV-2/Netherlands/ZuidHolland_9/2020__EPI_ISL_414445 spike protein (1-1147)(F970C_G999C) WhcAg construct
MFVFLVLLPLVSSQCVNLTTRTQLPPAYTNSFTRGVYYPDKVFRSSVLHSTQDLFLPFFSNVTWFHAIHVSGTNGTKRFDNPVLPFNDGVYFASTEKSNIIRGWIFGTTLDSKTQSLLIVNNATNVVIKVCEFQFCNDPFLGVYYHKNNKSWMESEFRVYSSANNCTFEYVSQPFLMDLEGKQGNFKNLREFVFKNIDGYFKIYSKHTPINLVRDLPQGFSALEPLVDLPIGINITRFQTLLALHRSYLTPGDSSSGWTAGAAAYYVGYLQPRTFLLKYNENGTITDAVDCALDPLSETKCTLKSFTVEKGIYQTSNFRVQPTESIVRFPNITNLCPFGEVFNATRFASVYAWNRKRISNCVADYSVLYNSASFSTFKCYGVSPTKLNDLCFTNVYADSFVIRGDEVRQIAPGQTGKIADYNYKLPDDFTGCVIAWNSNNLDSKVGGNYNYLYRLFRKSNLKPFERDISTEIYQAGSTPCNGVEGFNCYFPLQSYGFQPTNGVGYQPYRVVVLSFELLHAPATVCGPKKSTNLVKNKCVNFNFNGLTGTGVLTESNKKFLPFQQFGRDIADTTDAVRDPQTLEILDITPCSFGGVSVITPGTNTSNQVAVLYQGVNCTEVPVAIHADQLTPTWRVYSTGSNVFQTRAGCLIGAEHVNNSYECDIPIGAGICASYQTQTNSPRRARSVASQSIIAYTMSLGAENSVAYSNNSIAIPTNFTISVTTEILPVSMTKTSVDCTMYICGDSTECSNLLLQYGSFCTQLNRALTGIAVEQDKNTQEVFAQVKQIYKTPPIKDFGGFNFSQILPDPSKPSKRSFIEDLLFNKVTLADAGFIKQYGDCLGDIAARDLICVQKFNGLTVLPPLLTDEMIAQYTSALLAGTITSGWTFGAGAALQIPFAMQMAYRFNGIGVTQNVLYENQKLIANQFNSAIGKIQDSLSSTASALGKLQDVVNQNAQALNTLVKQLSSNCGAISSVLNDILSRLDKVEAEVQIDRLITCRLQSLQTYVTQQLIRAAEIRASANLAATKMSECVLGQSKRVDFCGKGYHLMSFPQSAPHGVVFLHVTYVPAQEKNFTTAPAICHDGKAHFPREGVFVSNGTHWFVTQRNFYEPQIITTDNTFVSGNCDVVIGIVNNTVYDPLQPELDSGGGGSDIDPYKEFGSSYQLLNFLPLDFFPDLNALVDTATALYEEELTGREHCSPHHTAIRQALVCWDELTKLIAWMSSNITSEQVRTIIVNHVNDTWGLKVRQSLWFHLSCLTFGQHTVQEFLVSFGVWIRTPAPYRPPNAPILSTLPEHTVIC

SEQ ID NO: 11426 - protein, 1301 aa, Artificial Sequence
  SARS-CoV-2/Finland/FIN03032020A/2020__EPI_ISL_413602 spike protein (1-1147)(F970C_G999C) WhcAg construct
MFVFLVLLPLVSSQCVNLTTRTQLPPAYTNSFTRGVYYPDKVFRSSVLHSTQDLFLPFFSNVTWFHAIHVSGTNGTKRFDNPVLPFNDGVYFASTEKSNIIRGWIFGTTLDSKTQSLLIVNNATNVVIKVCEFQFCNDPFLGVYYHKNNKSWMESEFRVYSSANNCTFEYVSQPFLMDLEGKQGNFKNLREFVFKNIDGYFKIYSKHTPINLVRDLPQGFSALEPLVDLPIGINITRFQTLLALHRSYLTPGDSSSGWTAGAAAYYVGYLQPRTFLLKYNENGTITDAVDCALDPLSETKCTLKSFTVEKGIYQTSNFRVQPTESIVRFPNITNLCPFGEVFNATRFASVYAWNRKRISNCVADYSVLYNSASFSTFKCYGVSPTKLNDLCFTNVYADSFVIRGDEVRQIAPGQTGKIADYNYKLPDDFTGCVISWNSNNLDSKVGGNYNYLYRLFRKSNLKPFERDISTEIYQAGSTPCNGVEGFNCYFPLQSYGFQPTNGVGYQPYRVVVLSFELLHAPATVCGPKKSTNLVKNKCVNFNFNGLTGTGVLTESNKKFLPFQQFGRDIADTTDAVRDPQTLEILDITPCSFGGVSVITPGTNTSNQVAVLYQGVNCTEVPVAIHADQLTPTWRVYSTGSNVFQTRAGCLIGAEHVNNSYECDIPIGAGICASYQTQTNSPRRARSVASQSIIAYTMSLGAENSVAYSNNSIAIPTNFTISVTTEILPVSMTKTSVDCTMYICGDSTECSNLLLQYGSFCTQLNRALTGIAVEQDKNTQEVFAQVKQIYKTPPIKDFGGFNFSQILPDPSKPSKRSFIEDLLFNKVTLADAGFIKQYGDCLGDIAARDLICAQKFNGLTVLPPLLTDEMIAQYTSALLAGTITSGWTFGAGAALQIPFAMQMAYRFNGIGVTQNVLYENQKLIANQFNSAIGKIQDSLSSTASALGKLQDVVNQNAQALNTLVKQLSSNCGAISSVLNDILSRLDKVEAEVQIDRLITCRLQSLQTYVTQQLIRAAEIRASANLAATKMSECVLGQSKRVDFCGKGYHLMSFPQSAPHGVVFLHVTYVPAQEKNFTTAPAICHDGKAHFPREGVFVSNGTHWFVTQRNFYEPQIITTDNTFVSGNCDVVIGIVNNTVYDPLQPELDSGGGGSDIDPYKEFGSSYQLLNFLPLDFFPDLNALVDTATALYEEELTGREHCSPHHTAIRQALVCWDELTKLIAWMSSNITSEQVRTIIVNHVNDTWGLKVRQSLWFHLSCLTFGQHTVQEFLVSFGVWIRTPAPYRPPNAPILSTLPEHTVIC

SEQ ID NO: 11427 - protein, 1301 aa, Artificial Sequence
  SARS-CoV-2/France/GE1977/2020__EPI_ISL_414632 spike protein (1-1147)(F970C_G999C) WhcAg construct
MFVFLVLLPLVSSQCVNLTTRTQLPPAYTNSFTRGVYYPDKVFRSSVLHSTQDLFLPFFSNVTWFHAIHVSGTNGTKRFDNPVLPFNDGVYFASTEKSNIIRGWIFGTTLDSKTQSLLIVNNATNVVIKVCEFQFCNDPFLGVYYHKNNKSWMESEFRVYSSANNCTFEYVSQPFLMDLEGKQGNFKNLREFVFKNIDGYFKIYSKHTPINLVRDLPQGFSALEPLVDLPIGINITRFQTLLALHRSYLTPGDSSSGWTAGAAAYYVGYLQPRTFLLKYNENGTITDAVDCALDPLSETKCTLKSFTVEKGIYQTSNFRVQPTESIVRFPNITNLCPFGEVFNATRFASVYAWNRKRISNCVADYSVLYNSASFSTFKCYGVSPTKLNDLCFTNVYADSFVIRGDEVRQIAPGQTGKIADYNYKLPDDFTGCVIAWNSNNLDSKVGGNYNYLYRLFRKSNLKPFERDISTEIYQAGSTPCNGVEGFNCYFPLQSYGFQPTNGVGYQPYRVVVLSFELLHAPATVCGPKKSTNLVKNKCVNFNFNGLTGTGVLTESNKKFLPFQQFGRDIADTTDAVRDPQTLEILDITPCSFGGVSVITPGTNTSNQVAVLYQGVNCTEVPVAIHADQLTPTWRVYSTGSNVFQTRAGCLIGAEHVNNSYECDIPIGAGICASYQTQTNSPRRARSVASQSIIAYTMSLGAENSVAYSNNSIAIPTNFTISVTTEILPVSMTKTSVDCTMYICGDSTECSNLLLQYGSFCTQLNRALTGIAVEQDKNTQEVFAQVKQIYKTPPIKDFGGFNFSQILPDPSKPSKRSFIEDLLFNKVTLADAGFIKQYGDCLGDIAARDLICAQKFNGLTVLPPLLTDEMIAQYTSALLAGTITSGWTFGAGAALQIPFAMQMAYRFNGIGVTQNVLYENQKLIANQFNSAIGKIQDSLFSTASALGKLQDVVNQNAQALNTLVKQLSSNCGAISSVLNDILSRLDKVEAEVQIDRLITCRLQSLQTYVTQQLIRAAEIRASANLAATKMSECVLGQSKRVDFCGKGYHLMSFPQSAPHGVVFLHVTYVPAQEKNFTTAPAICHDGKAHFPREGVFVSNGTHWFVTQRNFYEPQIITTDNTFVSGNCDVVIGIVNNTVYDPLQPELDSGGGGSDIDPYKEFGSSYQLLNFLPLDFFPDLNALVDTATALYEEELTGREHCSPHHTAIRQALVCWDELTKLIAWMSSNITSEQVRTIIVNHVNDTWGLKVRQSLWFHLSCLTFGQHTVQEFLVSFGVWIRTPAPYRPPNAPILSTLPEHTVIC

SEQ ID NO: 11428 - protein, 1301 aa, Artificial Sequence
  SARS-CoV-2/Finland/FIN-313/2020__EPI_ISL_414641 spike protein (1-1147)(F970C_G999C) WhcAg construct
MFVFLVLLPLVSSQCVNLTTRTQLPPAYTNSFTRGVYYPDKVFRSSVLHSTQDLFLPFFSNVTWFHAIHVSGTNGTKRFDNPVLPFNDGVYFASTEKSNIIRGWIFGTTLDSKTQSLLIVNNATNVVIKVCEFQFCNDPFLGVYYHKNNKSWMESEFRVYSSANNCTFEYVSQPFLMDLEGKQGNFKNLREFVFKNIDGYFKIYSKHTPINLVRDLPQGFSALEPLVDLPIGINITRFKTLLALHRSYLTPGDSSSGWTAGAAAYYVGYLQPRTFLLKYNENGTITDAVDCALDPLSETKCTLKSFTVEKGIYQTSNFRVQPTESIVRFPNITNLCPFGEVFNATRFASVYAWNRKRISNCVADYSVLYNSASFSTFKCYGVSPTKLNDLCFTNVYADSFVIRGDEVRQIAPGQTGKIADYNYKLPDDFTGCVIAWNSNNLDSKVGGNYNYLYRLFRKSNLKPFERDISTEIYQAGSTPCNGVEGFNCYFPLQSYGFQPTNGVGYQPYRVVVLSFELLHAPATVCGPKKSTNLVKNKCVNFNFNGLTGTGVLTESNKKFLPFQQFGRDIADTTDAVRDPQTLEILDITPCSFGGVSVITPGTNTSNQVAVLYQGVNCTEVPVAIHADQLTPTWRVYSTGSNVFQTRAGCLIGAEHVNNSYECDIPIGAGICASYQTQTNSPRRARSVASQSIIAYTMSLGAENSVAYSNNSIAIPTNFTISVTTEILPVSMTKTSVDCTMYICGDSTECSNLLLQYGSFCTQLNRALTGIAVEQDKNTQEVFAQVKQIYKTPPIKDFGGFNFSQILPDPSKPSKRSFIEDLLFNKVTLADAGFIKQYGDCLGDIAARDLICAQKFNGLTVLPPLLTDEMIAQYTSALLAGTITSGWTFGAGAALQIPFAMQMAYRFNGIGVTQNVLYENQKLIANQFNSAIGKIQDSLSSTASALGKLQDVVNQNAQALNTLVKQLSSNCGAISSVLNDILSRLDKVEAEVQIDRLITCRLQSLQTYVTQQLIRAAEIRASANLAATKMSECVLGQSKRVDFCGKGYHLMSFPQSAPHGVVFLHVTYVPAQEKNFTTAPAICHDGKAHFPREGVFVSNGTHWFVTQRNFYEPQIITTDNTFVSGNCDVVIGIVNNTVYDPLQPELDSGGGGSDIDPYKEFGSSYQLLNFLPLDFFPDLNALVDTATALYEEELTGREHCSPHHTAIRQALVCWDELTKLIAWMSSNITSEQVRTIIVNHVNDTWGLKVRQSLWFHLSCLTFGQHTVQEFLVSFGVWIRTPAPYRPPNAPILSTLPEHTVIC

SEQ ID NO: 11429 - protein, 1301 aa, Artificial Sequence
  SARS-CoV-2/Netherlands/ZuidHolland_2/2020__EPI_ISL_414556 spike protein (1-1147)(F970C_G999C) WhcAg construct
MFVFLVLLPLVSSQCVNLTTRTQLPPAYTNSFTRGVYYPDKVFRSSVLHSTQDLFLPFFSNVTWFHAIHVSGTNGTKRFDNPVLPFNDGVYFASTEKSNIIRGWIFGTTLDSKTQSLLIVNNATNVVIKVCEFQFCNDPFLGVYYHKNNKSWMESEFRVYSSANNCTFEYVSQPFLMDLEGKQGNFKNLREFVFKNIDGYFKIYSKHTPINLVRDLPQGFSALEPLVDLPIGINITRFQTLLALHRSYLTPGDSSSGWTAGAAAYYVGYLQPRTFLLKYNENGTITDAVDCALDPLSETKCTLKSFTVEKGIYQTSNFRVQPTESIVRFPNITNLCPFGEVFNATRFASVYAWNRKRISNCVADYSVLYNSASFSTFKCYGVSPTKLNDLCFTNVYADSFVIRGDEVRQIAPGQTGKIADYNYKLPDDFTGCVIAWNSNNLDSKVGGNYNYLYRLFRKSNLKPFERDISTEIYQAGSTPCNGVEGFNCYFPLQSYGFQPTNGVGYQPYRVVVLSFELLHAPATVCGPKKSTNLVKNKCVNFNFNGLTGTGVLTESNKKFLPFQQFGRDIADTTDAVRDPQTLEILDITPCSFGGVSVITPGTNTSNQVAVLYQGVNCTEVPVAIHADQLTPTWRVYSTGSNVFQTRAGCLIGAEHVNNSYECDIPIGAGICASYQTQTNSPRRARSVASQSIIAYTMSLGAENSVAYSNNSIAIPTNFTISVTTEILPVSMTKTSVDCTMYICGDSTECSNLLLQYGSFCTQLNRALTGIALEQDKNTQEVFAQVKQIYKTPPIKDFGGFNFSQILPDPSKPSKRSFIEDLLFNKVTLADAGFIKQYGDCLGDIAARDLICAQKFNGLTVLPPLLTDEMIAQYTSALLAGTITSGWTFGAGAALQIPFAMQMAYRFNGIGVTQNVLYENQKLIANQFNSAIGKIQDSLSSTASALGKLQDVVNQNAQALNTLVKQLSSNCGAISSVLNDILSRLDKVEAEVQIDRLITCRLQSLQTYVTQQLIRAAEIRASANLAATKMSECVLGQSKRVDFCGKGYHLMSFPQSAPHGVVFLHVTYVPAQEKNFTTAPAICHDGKAHFPREGVFVSNGTHWFVTQRNFYEPQIITTDNTFVSGNCDVVIGIVNNTVYDPLQPELDSGGGGSDIDPYKEFGSSYQLLNFLPLDFFPDLNALVDTATALYEEELTGREHCSPHHTAIRQALVCWDELTKLIAWMSSNITSEQVRTIIVNHVNDTWGLKVRQSLWFHLSCLTFGQHTVQEFLVSFGVWIRTPAPYRPPNAPILSTLPEHTVIC

SEQ ID NO: 11430 - protein, 1301 aa, Artificial Sequence
  SARS-CoV-2/USA/WA-UW31/2020__EPI_ISL_414618 spike protein (1-1147)(F970C_G999C) WhcAg construct
MFVFLVLLPLVSSQCVNLTTRTQLPPAYTNSFTRGVYYPDKVFRSSVLHSTQDLFLPFFSNVTWFHAIHVSGTNGTKRFDNPVLPFNDGVYFASTEKSNIIRGWIFGTTLDSKTQSLLIVNNATNVVIKVCEFQFCNDPFLGVYYHKNNKSWMESEFRVYSSANNCTFEYVSQPFLMDLEGKQGNFKNLREFVFKNIDGYFKIYSKHTPINLVRDLPQGFSALEPLVDLPIGINITRFQTLLALHRSYLTPGDSSSGWTAGAAAYYVGYLQPRTFLLKYNENGTITDAVDCALDPLSETKCTLKSFTVEKGIYQTSNFRVQPTESIVRFPNITNLCPFGEVFNATRFASVYAWNRKRISNCVADYSVLYNSASFSTFKCYGVSPTKLNDLCFTNVYADSFVIRGDEVRQIAPGQTGKIADYNYKLPDDFTGCVIAWNSNNLDSKVGGNYNYLYRLFRKSNLKPFERDISTEIYQAGSTPCNGAEGFNCYFPLQSYGFQPTNGVGYQPYRVVVLSFELLHAPATVCGPKKSTNLVKNKCVNFNFNGLTGTGVLTESNKKFLPFQQFGRDIADTTDAVRDPQTLEILDITPCSFGGVSVITPGTNTSNQVAVLYQDVNCTEVPVAIHADQLTPTWRVYSTGSNVFQTRAGCLIGAEHVNNSYECDIPIGAGICASYQTQTNSPRRARSVASQSIIAYTMSLGAENSVAYSNNSIAIPTNFTISVTTEILPVSMTKTSVDCTMYICGDSTECSNLLLQYGSFCTQLNRALTGIAVEQDKNTQEVFAQVKQIYKTPPIKDFGGFNFSQILPDPSKPSKRSFIEDLLFNKVTLADAGFIKQYGDCLGDIAARDLICAQKFNGLTVLPPLLTDEMIAQYTSALLAGTITSGWTFGAGAALQIPFAMQMAYRFNGIGVTQNVLYENQKLIANQFNSAIGKIQDSLSSTASALGKLQDVVNQNAQALNTLVKQLSSNCGAISSVLNDILSRLDKVEAEVQIDRLITCRLQSLQTYVTQQLIRAAEIRASANLAATKMSECVLGQSKRVDFCGKGYHLMSFPQSAPHGVVFLHVTYVPAQEKNFTTAPAICHDGKAHFPREGVFVSNGTHWFVTQRNFYEPQIITTDNTFVSGNCDVVIGIVNNTVYDPLQPELDSGGGGSDIDPYKEFGSSYQLLNFLPLDFFPDLNALVDTATALYEEELTGREHCSPHHTAIRQALVCWDELTKLIAWMSSNITSEQVRTIIVNHVNDTWGLKVRQSLWFHLSCLTFGQHTVQEFLVSFGVWIRTPAPYRPPNAPILSTLPEHTVIC

SEQ ID NO: 11431 - protein, 1301 aa, Artificial Sequence
  SARS-CoV-2/South Korea/SNU01/2020__EPI_ISL_411929 spike protein (1-1147)(F970C_G999C) WhcAg construct
MFVFLVLLPLVSSQCVNLTTRTQLPPAYTNSFTRGVYYPDKVFRSSVLHSTQDLFLPFFSNVTWFHAIHVSGTNGTKRFDNPVLPFNDGVYFASTEKSNIIRGWIFGTTLDSKTQSLLIVNNATNVVIKVCEFQFCNDPFLGVYYHKNNKSWMESEFRVYSSANNCTFEYVSQPFLMDLEGKQGNFKNLREFVFKNIDGYFKIYSKHTPINLVRDLPQGFWALEPLVDLPIGINITRFQTLLALHRSYLTPGDSSSGWTAGAAAYYVGYLQPRTFLLKYNENGTITDAVDCALDPLSETKCTLKSFTVEKGIYQTSNFRVQPTESIVRFPNITNLCPFGEVFNATRFASVYAWNRKRISNCVADYSVLYNSASFSTFKCYGVSPTKLNDLCFTNVYADSFVIRGDEVRQIAPGQTGKIADYNYKLPDDFTGCVIAWNSNNLDSKVGGNYNYLYRLFRKSNLKPFERDISTEIYQAGSTPCNGVEGFNCYFPLQSYGFQPTNGVGYQPYRVVVLSFELLHAPATVCGPKKSTNLVKNKCVNFNFNGLTGTGVLTESNKKFLPFQQFGRDIADTTDAVRDPQTLEILDITPCSFGGVSVITPGTNTSNQVAVLYQDVNCTEVPVAIHADQLTPTWRVYSTGSNVFQTRAGCLIGAEHVNNSYECDIPIGAGICASYQTQTNSPRRARSVASQSIIAYTMSLGAENSVAYSNNSIAIPTNFTISVTTEILPVSMTKTSVDCTMYICGDSTECSNLLLQYGSFCTQLNRALTGIAVEQDKNTQEVFAQVKQIYKTPPIKDFGGFNFSQILPDPSKPSKRSFIEDLLFNKVTLADAGFIKQYGDCLGDIAARDLICAQKFNGLTVLPPLLTDEMIAQYTSALLAGTITSGWTFGAGAALQIPFAMQMAYRFNGIGVTQNVLYENQKLIANQFNSAIGKIQDSLSSTASALGKLQDVVNQNAQALNTLVKQLSSNCGAISSVLNDILSRLDKVEAEVQIDRLITCRLQSLQTYVTQQLIRAAEIRASANLAATKMSECVLGQSKRVDFCGKGYHLMSFPQSAPHGVVFLHVTYVPAQEKNFTTAPAICHDGKAHFPREGVFVSNGTHWFVTQRNFYEPQIITTDNTFVSGNCDVVIGIVNNTVYDPLQPELDSGGGGSDIDPYKEFGSSYQLLNFLPLDFFPDLNALVDTATALYEEELTGREHCSPHHTAIRQALVCWDELTKLIAWMSSNITSEQVRTIIVNHVNDTWGLKVRQSLWFHLSCLTFGQHTVQEFLVSFGVWIRTPAPYRPPNAPILSTLPEHTVIC

SEQ ID NO: 11432 - protein, 1301 aa, Artificial Sequence
  SARS-CoV-2/China/WF0004/2020__EPI_ISL_413694 spike protein (1-1147)(F970C_G999C) WhcAg construct
MFVFLVLLPLVSSQCVNLTTRTQLPPAYTNSFTRGVYYPDKVFRSSVLHSTQDLFLPFFSNVTWFHAIHVSGTNGTKRFDNPVLPFNDGVYFASTEKSNIIRGWIFGTTLDSKTQSLLIVNNATNVVIKVCEFQFCNDPFLGVYYHKNNKSWTESEFRVYSSANNCTFEYVSQPFLMDLEGKQGNFKNLREFVFKNIDGYFKIYSKHTPINLVRDLPQGFSALEPLVDLPIGINITRFQTLLALHRSYLTPGDSSSGWTAGAAAYYVGYLQPRTFLLKYNENGTITDAVDCALDPLSETKCTLKSFTVEKGIYQTSNFRVQPTESIVRFPNITNLCPFGEVFNATRFASVYAWNRKRISNCVADYSVLYNSASFSTFKCYGVSPTKLNDLCFTNVYADSFVIRGDEVRQIAPGQTGKIADYNYKLPDDFTGCVIAWNSNNLDSKVGGNYNYLYRLFRKSNLKPFERDISTEIYQAGSTPCNGVEGFNCYFPLQSYGFQPTNGVGYQPYRVVVLSFELLHAPATVCGPKKSTNLVKNKCVNFNFNGLTGTGVLTESNKKFLPFQQFGRDIADTTDAVRDPQTLEILDITPCSFGGVSVITPGTNTSNQVAVLYQDVNCTEVPVAIHADQLTPTWRVYSTGSNVFQTRAGCLIGAEHVNNSYECDIPIGAGICASYQTQTNSPRRARSVASQSIIAYTMSLGAENSVAYSNNSIAIPTNFTISVTTEILPVSMTKTSVDCTMYICGDSTECSNLLLQYGSFCTQLNRALTGIAVEQDKNTQEVFAQVKQIYKTPPIKDFGGFNFSQILPDPSKPSKRSFIEDLLFNKVTLADAGFIKQYGDCLGDIAARDLICAQKFNGLTVLPPLLTDEMIAQYTSALLAGTITSGWTFGAGAALQIPFAMQMAYRFNGIGVTQNVLYENQKLIANQFNSAIGKIQDSLSSTASALGKLQDVVNQNAQALNTLVKQLSSNCGAISSVLNDILSRLDKVEAEVQIDRLITCRLQSLQTYVTQQLIRAAEIRASANLAATKMSECVLGQSKRFDFCGKGYHLMSFPQSAPHGVVFLHVTYVPAQEKNFTTAPAICHDGKAHFPREGVFVSNGTHWFVTQRNFYEPQIITTDNTFVSGNCDVVIGIVNNTVYDPLQPELDSGGGGSDIDPYKEFGSSYQLLNFLPLDFFPDLNALVDTATALYEEELTGREHCSPHHTAIRQALVCWDELTKLIAWMSSNITSEQVRTIIVNHVNDTWGLKVRQSLWFHLSCLTFGQHTVQEFLVSFGVWIRTPAPYRPPNAPILSTLPEHTVIC

SEQ ID NO: 11433 - protein, 1301 aa, Artificial Sequence
  SARS-CoV-2/China/WF0028/2020__EPI_ISL_413791 spike protein (1-1147)(F970C_G999C) WhcAg construct
MFVFLVLLPLVSSQCVNLTTRTQLPPAYTNSFTRGVYYPDKVFRSSVLHSTQDLFLPFFSNVTWFHAIHVSGTNGTKRFDNPVLPFNDGVYFASTEKSNIIRGWIFGTTLDSKTQSLLIVNNATNVVIKVCEFQFCNDPFLGVYYHKNNKSWMESEFRVYSSANNCTFEYVSQPFLMDLEGKQGNFKNLREFVFKNIDGYFKIYSKHTPINLVRDLPQGFSALEPLVDLPIGINITRFQTLLALHRSYLTPGDSSSGWTAGAAAYYVGYLQPRTFLLKYNENGTITDAVDCALDPLSETKCTLKSFTVEKGIYQTSNFRVQPTESIVRFPNITNLCPFGEVFNATRFASVYAWNRKRISNCVADYSVLYNSASFSTFKCYGVSPTKLNDLCFTNVYADSFVIRGDEVRQIAPGQTGKIADYNYKLPDDFTGCVIAWNSNNLDSKVGGNYNYLYRLFRKSNLKPFERDISTEIYQAGSTPCNGVEGFNCYFPLQSYGFQPTNGVGYQPYRVVVLSFELLHAPATVCGPKKSTNLVKNKCVNFNFNGLTGTGVLTESNKKFLPFQQFGRDIADTTDAVRDPQTLEILDITPCSFGGVSVITPGTNTSNQVAVLYQDVNCTEVPVAIHADQLTPTWRVYSTGSNVFQTRAGCLIGAEHVNNSYECDIPIGAGICASYQTQTNSPRRARSVASQSIIAYTMSLGAENSVAYSNNSIAIPTNFTISVTTEILPVSMTKTSVDCTMYICGDSTECSNLLLQYGSFCTQLNRALTGIAVEQDKNTQEVFAQVKQIYKTPPIKDFGGFNFSQILPDPSKPSKRSFIEDLLFNKVTLADAGFIKQYGDCLGDIAARDLICAQKFNGLTVLPPLLTDEMIAQYTSALLAGTITSGWTFGAGAALQIPFAMQMAYRFNGIGVTQNVLYENQKLIANQFNSAIGKIQDSLSSTASALGKLQDVVNQNAQALNTLVKQLSSNCGAISSVLNDILSRLDKVEAEVQIDRLITCRLQSLQTYVTQQLIRAAEIRASANLAATKMSECVLGQSKRVDFCGKGYHLMSFPQSAPHGVVFLHVTYVPAQEKNFTTAPAICHDGKAHFPREGVFVSNGTHWFVTQRNFYEPQIITTDNTFVSGNCDVVIGIVNNTVYDPLQPELESGGGGSDIDPYKEFGSSYQLLNFLPLDFFPDLNALVDTATALYEEELTGREHCSPHHTAIRQALVCWDELTKLIAWMSSNITSEQVRTIIVNHVNDTWGLKVRQSLWFHLSCLTFGQHTVQEFLVSFGVWIRTPAPYRPPNAPILSTLPEHTVIC

SEQ ID NO: 11434 - protein, 1301 aa, Artificial Sequence
  SARS-CoV-2/2019-nCoV/USA-CruiseA-18/2020__MT159716.1 spike protein (1-1147)(F970C_G999C) WhcAg construct
MFVFLVLLPLVSSQCVNLTTRTQLPPAYTNSFTRGVYYPDKVFRSSVLHSTQDLFLPFFSNVTWFHAIHVSGTNGTKRFDNPVLPFNDGVYFASTEKSNIIRGWIFGTTLDSKTQSLLIVNNATNVVIKVCEFQFCNDPFLGVYYHKNNKSWMESELRVYSSANNCTFEYVSQPFLMDLEGKQGNFKNLREFVFKNIDGYFKIYSKHTPINLVRDLPQGFSALEPLVDLPIGINITRFQTLLALHRSYLTPGDSSSGWTAGAAAYYVGYLQPRTFLLKYNENGTITDAVDCALDPLSETKCTLKSFTVEKGIYQTSNFRVQPTESIVRFPNITNLCPFGEVFNATRFASVYAWNRKRISNCVADYSVLYNSASFSTFKCYGVSPTKLNDLCFTNVYADSFVIRGDEVRQIAPGQTGKIADYNYKLPDDFTGCVIAWNSNNLDSKVGGNYNYLYRLFRKSNLKPFERDISTEIYQAGSTPCNGVEGFNCYFPLQSYGFQPTNGVGYQPYRVVVLSFELLHAPATVCGPKKSTNLVKNKCVNFNFNGLTGTGVLTESNKKFLPFQQFGRDIADTTDAVRDPQTLEILDITPCSFGGVSVITPGTNTSNQVAVLYQDVNCTEVPVAIHADQLTPTWRVYSTGSNVFQTRAGCLIGAEHVNNSYECDIPIGAGICASYQTQTNSPRRARSVASQSIIAYTMSLGAENSVAYSNNSIAIPTNFTISVTTEILPVSMTKTSVDCTMYICGDSTECSNLLLQYGSFCTQLNRALTGIAVEQDKNTQEVFAQVKQIYKTPPIKDFGGFNFSQILPDPSKPSKRSFIEDLLFNKVTLADAGFIKQYGDCLGDIAARDLICAQKFNGLTVLPPLLTDEMIAQYTSALLAGTITSGWTFGAGAALQIPFAMQMAYRFNGIGVTQNVLYENQKLIANQFNSAIGKIQDSLSSTASALGKLQDVVNQNAQALNTLVKQLSSNCGAISSVLNDILSRLDKVEAEVQIDRLITCRLQSLQTYVTQQLIRAAEIRASANLAATKMSECVLGQSKRVDFCGKGYHLMSFPQSAPHGVVFLHVTYVPAQEKNFTTAPAICHDGKAHFPREGVFVSNGTHWFVTQRNFYEPQIITTDNTFVSGNCDVVIGIVNNTVYDPLQPELDSGGGGSDIDPYKEFGSSYQLLNFLPLDFFPDLNALVDTATALYEEELTGREHCSPHHTAIRQALVCWDELTKLIAWMSSNITSEQVRTIIVNHVNDTWGLKVRQSLWFHLSCLTFGQHTVQEFLVSFGVWIRTPAPYRPPNAPILSTLPEHTVIC

SEQ ID NO: 11435 - protein, 1301 aa, Artificial Sequence
  SARS-CoV-2/SARS-CoV-2/Yunnan-01/human/2020/CHN__MT049951.1 spike protein (1-1147)(F970C_G999C) WhcAg construct
MFVFLVLLPLVSSQCVNLTTRTQLPPANTNSFTRGVYYPDKVFRSSVLHSTQDLFLPFFSNVTWFHAIHVSGTNGTKRFDNPVLPFNDGVYFASTEKSNIIRGWIFGTTLDSKTQSLLIVNNATNVVIKVCEFQFCNDPFLGVYYHKNNKSWMESEFRVYSSANNCTFEYVSQPFLMDLEGKQGNFKNLREFVFKNIDGYFKIYSKHTPINLVRDLPQGFSALEPLVDLPIGINITRFQTLLALHRSYLTPGDSSSGWTAGAAAYYVGYLQPRTFLLKYNENGTITDAVDCALDPLSETKCTLKSFTVEKGIYQTSNFRVQPTESIVRFPNITNLCPFGEVFNATRFASVYAWNRKRISNCVADYSVLYNSASFSTFKCYGVSPTKLNDLCFTNVYADSFVIRGDEVRQIAPGQTGKIADYNYKLPDDFTGCVIAWNSNNLDSKVGGNYNYLYRLFRKSNLKPFERDISTEIYQAGSTPCNGVEGFNCYFPLQSYGFQPTNGVGYQPYRVVVLSFELLHAPATVCGPKKSTNLVKNKCVNFNFNGLTGTGVLTESNKKFLPFQQFGRDIADTTDAVRDPQTLEILDITPCSFGGVSVITPGTNTSNQVAVLYQDVNCTEVPVAIHADQLTPTWRVYSTGSNVFQTRAGCLIGAEHVNNSYECDIPIGAGICASYQTQTNSPRRARSVASQSIIAYTMSLGAENSVAYSNNSIAIPTNFTISVTTEILPVSMTKTSVDCTMYICGDSTECSNLLLQYGSFCTQLNRALTGIAVEQDKNTQEVFAQVKQIYKTPPIKDFGGFNFSQILPDPSKPSKRSFIEDLLFNKVTLADAGFIKQYGDCLGDIAARDLICAQKFNGLTVLPPLLTDEMIAQYTSALLAGTITSGWTFGAGAALQIPFAMQMAYRFNGIGVTQNVLYENQKLIANQFNSAIGKIQDSLSSTASALGKLQDVVNQNAQALNTLVKQLSSNCGAISSVLNDILSRLDKVEAEVQIDRLITCRLQSLQTYVTQQLIRAAEIRASANLAATKMSECVLGQSKRVDFCGKGYHLMSFPQSAPHGVVFLHVTYVPAQEKNFTTAPAICHDGKAHFPREGVFVSNGTHWFVTQRNFYEPQIITTDNTFVSGNCDVVIGIVNNTVYDPLQPELDSGGGGSDIDPYKEFGSSYQLLNFLPLDFFPDLNALVDTATALYEEELTGREHCSPHHTAIRQALVCWDELTKLIAWMSSNITSEQVRTIIVNHVNDTWGLKVRQSLWFHLSCLTFGQHTVQEFLVSFGVWIRTPAPYRPPNAPILSTLPEHTVIC

SEQ ID NO: 11436 - protein, 1301 aa, Artificial Sequence
  SARS-CoV-2/USA/WA-UW292/2020__EPI_ISL_418077 spike protein (1-1147)(F970C_G999C) WhcAg construct
MFVFLVLLPLVSSQCVNLTTRTQLPPAYTNSFTRGVYYPDKVFRSSVLHSTQDLFLPFFSNVTWFHAIHVSGTNGTKRFDNPVLPFNDGVYFASTEKSNIIRGWIFGTTLDSKTQSLLIVNNATNVVIKVCEFQFCNDPFLGVYYHKNNKSWMESEFRVYSSANNCTFEYVSQPFLMDLEGKQGNFKNLREFVFKNIDGYFKIYSKHTPINLVRDLPQGFSALEPLVDLPIGINITRFQTLLALHRSYLTPGDSSSGWTAGAAAYYVGYLQPRTFLLKYNENGTITDAVDCALDPLSETKCTLKSFTVEKGIYQTSNFRVQPTESIVRFPNITNLCPFGEVFNATRFASVYAWNRKRISNCVADYSVLYNSASFSTFKCYGVSPTKLNDLCFTNVYADSFVIRGDEVRQIAPGQTGKIADYNYKLPDDFTGCVIAWNSNNLDSKVGGNYNYLYRLFRKSNLKPFERDISTEIYQASSTPCNGVEGFNCYFPLQSYGFQPTNGVGYQPYRVVVLSFELLHAPATVCGPKKSTNLVKNKCVNFNFNGLTGTGVLTESNKKFLPFQQFGRDIADTTDAVRDPQTLEILDITPCSFGGVSVITPGTNTSNQVAVLYQDVNCTEVPVAIHADQLTPTWRVYSTGSNVFQTRAGCLIGAEHVNNSYECDIPIGAGICASYQTQTNSPRRARSVASQSIIAYTMSLGAENSVAYSNNSIAIPTNFTISVTTEILPVSMTKTSVDCTMYICGDSTECSNLLLQYGSFCTQLNRALTGIAVEQDKNTQEVFAQVKQIYKTPPIKDFGGFNFSQILPDPSKPSKRSFIEDLLFNKVTLADAGFIKQYGDCLGDIAARDLICAQKFNGLTVLPPLLTDEMIAQYTSALLAGTITSGWTFGAGAALQIPFAMQMAYRFNGIGVTQNVLYENQKLIANQFNSAIGKIQDSLSSTASALGKLQDVVNQNAQALNTLVKQLSSNCGAISSVLNDILSRLDKVEAEVQIDRLITCRLQSLQTYVTQQLIRAAEIRASANLAATKMSECVLGQSKRVDFCGKGYHLMSFPQSAPHGVVFLHVTYVPAQEKNFTTAPAICHDGKAHFPREGVFVSNGTHWFVTQRNFYEPQIITTDNTFVSGNCDVVIGIVNNTVYDPLQPELDSGGGGSDIDPYKEFGSSYQLLNFLPLDFFPDLNALVDTATALYEEELTGREHCSPHHTAIRQALVCWDELTKLIAWMSSNITSEQVRTIIVNHVNDTWGLKVRQSLWFHLSCLTFGQHTVQEFLVSFGVWIRTPAPYRPPNAPILSTLPEHTVIC

SEQ ID NO: 11437 - protein, 1301 aa, Artificial Sequence
  SARS-CoV-2/Iceland/192/2020__EPI_ISL_417819 spike protein (1-1147)(F970C_G999C) WhcAg construct
MFVFFVLLPLVSSQCVNLTTRTQLPPAYTNSFTRGVYYPDKVFRSSVLHSTQDLFLPFFSNVTWFHAIHVSGTNGTKRFDNPVLPFNDGVYFASTEKSNIIRGWIFGTTLDSKTQSLLIVNNATNVVIKVCEFQFCNDPFLGVYYHKNNKSWMESEFRVYSSANNCTFEYVSQPFLMDLEGKQGNFKNLREFVFKNIDGYFKIYSKHTPINLVRDLPQGFSALEPLVDLPIGINITRFQTLLALHRSYLTPGDSSSGWTAGAAAYYVGYLQPRTFLLKYNENGTITDAVDCALDPLSETKCTLKSFTVEKGIYQTSNFRVQPTESIVRFPNITNLCPFGEVFNATRFASVYAWNRKRISNCVADYSVLYNSASFSTFKCYGVSPTKLNDLCFTNVYADSFVIRGDEVRQIAPGQTGKIADYNYKLPDDFTGCVIAWNSNNLDSKVGGNYNYLYRLFRKSNLKPFERDISTEIYQAGSTPCNGVEGFNCYFPLQSYGFQPTNGVGYQPYRVVVLSFELLHAPATVCGPKKSTNLVKNKCVNFNFNGLTGTGVLTESNKKFLPFQQFGRDIADTTDAVRDPQTLEILDITPCSFGGVSVITPGTNTSNQVAVLYQGVNCTEVPVAIHADQLTPTWRVYSTGSNVFQTRAGCLIGAEHVNNSYECDIPIGAGICASYQTQTNSPRRARSVASQSIIAYTMSLGAENSVAYSNNSIAIPTNFTISVTTEILPVSMTKTSVDCTMYICGDSTECSNLLLQYGSFCTQLNRALTGIAVEQDKNTQEVFAQVKQIYKTPPIKDFGGFNFSQILPDPSKPSKRSFIEDLLFNKVTLADAGFIKQYGDCLGDIAARDLICAQKFNGLTVLPPLLTDEMIAQYTSALLAGTITSGWTFGAGAALQIPFAMQMAYRFNGIGVTQNVLYENQKLIANQFNSAIGKIQDSLSSTASALGKLQDVVNQNAQALNTLVKQLSSNCGAISSVLNDILSRLDKVEAEVQIDRLITCRLQSLQTYVTQQLIRAAEIRASANLAATKMSECVLGQSKRVDFCGKGYHLMSFPQSAPHGVVFLHVTYVPAQEKNFTTAPAICHDGKAHFPREGVFVSNGTHWFVTQRNFYEPQIITTDNTFVSGNCDVVIGIVNNTVYDPLQPELDSGGGGSDIDPYKEFGSSYQLLNFLPLDFFPDLNALVDTATALYEEELTGREHCSPHHTAIRQALVCWDELTKLIAWMSSNITSEQVRTIIVNHVNDTWGLKVRQSLWFHLSCLTFGQHTVQEFLVSFGVWIRTPAPYRPPNAPILSTLPEHTVIC

SEQ ID NO: 11438 - protein, 1301 aa, Artificial Sequence
  SARS-CoV-2/Belgium/ULG-6939/2020__EPI_ISL_417020 spike protein (1-1147)(F970C_G999C) WhcAg construct
MFVFLVLLPLVSSQCVNLTTRTQLPPAYTNSFTRGVYYPDKVFRSSVLHSTQDLFLPFFSNVTWFHAIHVSGTNGTKRFDNPVLPFNDGVYFASTEKSNIIRGWIFGTTLDSKTQSLLIVNNATNVVIKVCEFQFCNDPFLGVYYHKNNKSWMESEFRVYSSANNCTFEYVSQPFLMDLEGKQGNFKNLREFVFKNIDGYFKIYSKHTPINLVRDLPQGFSALEPLVDLPIGINITRFQTLLALHRSYLTPGDSSSGWTAGAAAYYVGYLQPRTFLLKYNENGTITDAVDCALDPLSETKCTLKSFTVEKGIYQTSNFRVQPTESIVRFPNITNLCPFGEVFNATRFASVYAWNRKRISNCVADYSVLYNSASFSTFKCYGVSPTKLNDLCFTNVYADSFVIRGDEVRQIAPGQTGKIADYNYKLPDDFTGCVIAWNSNNLDSKVGGNYNYLYRLFRKSNLKPFERDISTEIYQAGSTPCNGVEGFNCYFPLQSYGFQPTNGVGYQPYRVVVLSFELLHAPATVCGPKKSTNLVKNKCVNFNFNGLTGTGVLTESNKKFLPFQQFGRDIADTTDAVRDPQTLEILDITPCSFGGVSVITPGTNTSNQVAVLYQGVNCTEVPVAIHADQLTPTWRVYSTGSNVFQTRAGCLIGAEHVNNSYECDIPIGAGICASYQTQTNSPRRARSVASQSIIAYTMSLGAENSVVYSNNSIAIPTNFTISVTTEILPVSMTKTSVDCTMYICGDSTECSNLLLQYGSFCTQLNRALTGIAVEQDKNTQEVFAQVKQIYKTPPIKDFGGFNFSQILPDPSKPSKRSFIEDLLFNKVTLADAGFIKQYGDCLGDIAARDLICAQKFNGLTVLPPLLTDEMIAQYTSALLAGTITSGWTFGAGAALQIPFAMQMAYRFNGIGVTQNVLYENQKLIANQFNSAIGKIQDSLSSTASALGKLQDVVNQNAQALNTLVKQLSSNCGAISSVLNDILSRLDKVEAEVQIDRLITCRLQSLQTYVTQQLIRAAEIRASANLAATKMSECVLGQSKRVDFCGKGYHLMSFPQSAPHGVVFLHVTYVPAQEKNFTTAPAICHDGKAHFPREGVFVSNGTHWFVTQRNFYEPQIITTDNTFVSGNCDVVIGIVNNTVYDPLQPELDSGGGGSDIDPYKEFGSSYQLLNFLPLDFFPDLNALVDTATALYEEELTGREHCSPHHTAIRQALVCWDELTKLIAWMSSNITSEQVRTIIVNHVNDTWGLKVRQSLWFHLSCLTFGQHTVQEFLVSFGVWIRTPAPYRPPNAPILSTLPEHTVIC

SEQ ID NO: 11439 - protein, 1301 aa, Artificial Sequence
  SARS-CoV-2/France/HF2496/2020__EPI_ISL_418231 spike protein (1-1147)(F970C_G999C) WhcAg construct
MFVFLVLLPLVSSQCVNLTTRTQLPPAYTNSFTRGVYYPDKVFRSSVLHSTQDLFLPFFSNVTWFHAIHVSGTNGTKRFDNPVLPFNDGVYFASTEKSNIIRGWIFGTTLDSKTQSLLIVNNATNVVIKVCEFQFCNDPFLGVYYHKNNKSWMESEFRVYSSANNCTFEYVSQPFLMDLEGKQGNFKNLREFVFKNIDGYFKIYSKHTPINLVRDLPQGFSALEPLVDLPIGINITRFQTLLALHRSYLTPGDSSSGWTAGAAAYYVGYLQPRTFLLKYNENGTITDAVDCALDPLSETKCTLKSFTVEKGIYQTSNFRVQPTESIVRFPNITNLCPFGEVFNATRFASVYAWNRKRISNCVADYSVLYNSASFSTFKCYGVSPTKLNDLCFTNVYADSFVIRGDEVRQIAPGQTGKIADYNYKLPDDFTGCVIAWNSNNLDSKVGGNYNYLYRLFRKSNLKPFERDISTEIYQAGSTPCNGVEGFNCYFPLQSYGFQPTNGVGYQPYRVVVLSFELLHAPATVCGPKKSTNLVKNKCVNFNFNGLTGTGVLTESNKKFLPFQQFGRDIADTTDAVRDPQTLEILDITPCSFGGVSVITPGTNTSNQVAVLYQGVNCTEVPVAIHADQLTPTWRVYSTGSNVFQTRAGCLIGAEHVNNSYECDIPIGAGICASYQTQTNSPRRARSVASQSIIAYTMSLGAENSVAYSNNSIAIPTNFTISVTTEILPVSMTKTSVDCTMYICGDSTECSNLLLQYGSFCTQLNRALTGIAVEQDKNTQEVFAQVKQIYKTPPIKDFGGFNFSQILPDPSKPSKRSFIEDLLFNKVTLADAGFIKQYGDCLGDIVARDLICAQKFNGLTVLPPLLTDEMIAQYTSALLAGTITSGWTFGAGAALQIPFAMQMAYRFNGIGVTQNVLYENQKLIANQFNSAIGKIQDSLSSTASALGKLQDVVNQNAQALNTLVKQLSSNCGAISSVLNDILSRLDKVEAEVQIDRLITCRLQSLQTYVTQQLIRAAEIRASANLAATKMSECVLGQSKRVDFCGKGYHLMSFPQSAPHGVVFLHVTYVPAQEKNFTTAPAICHDGKAHFPREGVFVSNGTHWFVTQRNFYEPQIITTDNTFVSGNCDVVIGIVNNTVYDPLQPELDSGGGGSDIDPYKEFGSSYQLLNFLPLDFFPDLNALVDTATALYEEELTGREHCSPHHTAIRQALVCWDELTKLIAWMSSNITSEQVRTIIVNHVNDTWGLKVRQSLWFHLSCLTFGQHTVQEFLVSFGVWIRTPAPYRPPNAPILSTLPEHTVIC

SEQ ID NO: 11440 - protein, 1301 aa, Artificial Sequence
  SARS-CoV-2/USA/WA-UW291/2020__EPI_ISL_418076 spike protein (1-1147)(F970C_G999C) WhcAg construct
MFVFLVLLPLVSSQCVNLTTRTQLPPAYTNSFTRGVYYPDKVFRSSVLHSTQDLFLPFFSNVTWFHAIHVSGTNGTKRFDNPVLPFNDGVYFASTEKSNIIRGWIFGTTLDSKTQSLLIVNNATNVVIKVCEFQFCNDPFLGVYYHKNNKSWMESEFRVYSSANNCTFEYVSQPFLMDLEGKQGNFKNLREFVFKNIDGYFKIYSKHTPINLVRDLPQGFSALEPLVDLPIGINITRFQTLLALHRSYLTPGDSSSGWTAGAAAYYVGYLQPRTFLLKYNENGTITDAVDCALDPLSETKCTLKSFTVEKGIYQTSNFRVQPTESIVRFPNITNLCPFGEVFNATRFASVYAWNRKRISNCVADYSVLYNSASFSTFKCYGVSPTKLNDLCFTNVYADSFVIRGDEVRQIAPGQTGKIADYNYKLPDDFTGCVIAWNSNNLDSKVGGNYNYLYRLFRKSNLKPFERDISTEIYQAGSTPCNGVEGFNCYFPLQSYGFQPTNGVGYQPYRVVVLSFELLHAPATVCGPKKSTNLVKNKCVNFNFNGLTGTGVLTESNKKFLPFQQFGRDIADTTDAVRDPQTLEILDITPCSFGGVSVITPGTNTSNQVAVLYQGVNCTEVPVAIHADQLTPTWRVYSTGSNVFQTRAGCLIGAEHVNNSYECDIPIGAGICASYQTQTNSPRRARSVASQSIIAYTMSLGAENSVAYSNNSIAIPTNFTISVTTEILPVSMTKTSVDCTMYICGDSTECSNLLLQYGSFCTQLNRALTGIAVEQDKNTQEVFAQVKQIYKTPPIKDFGGFNFSQILPDPSKPSKRSFIEDLLFNKVTLADAGFIKQYGDCLGDIAARDLICAQKFNGLTVLPPLLTDEMIAQYTSALLAGTITSGWTFGAGAALQIPFAMQMAYRFNGIGVTQNVLYENQKLIANQFNSAIGKIQYSLSSTASALGKLQDVVNQNAQALNTLVKQLSSNCGAISSVLNDILSRLDKVEAEVQIDRLITCRLQSLQTYVTQQLIRAAEIRASANLAATKMSECVLGQSKRVDFCGKGYHLMSFPQSAPHGVVFLHVTYVPAQEKNFTTAPAICHDGKAHFPREGVFVSNGTHWFVTQRNFYEPQIITTDNTFVSGNCDVVIGIVNNTVYDPLQPELDSGGGGSDIDPYKEFGSSYQLLNFLPLDFFPDLNALVDTATALYEEELTGREHCSPHHTAIRQALVCWDELTKLIAWMSSNITSEQVRTIIVNHVNDTWGLKVRQSLWFHLSCLTFGQHTVQEFLVSFGVWIRTPAPYRPPNAPILSTLPEHTVIC

SEQ ID NO: 11441 - protein, 1301 aa, Artificial Sequence; identical to SEQ ID NO: 11404
  SARS-CoV-2/Portugal/PT0034/2020__EPI_ISL_418019 spike protein (1-1147)(F970C_G999C) WhcAg construct

SEQ ID NO: 11442 - protein, 1301 aa, Artificial Sequence; identical to SEQ ID NO: 11396
  SARS-CoV-2/Iceland/202/2020__EPI_ISL_417750 spike protein (1-1147)(F970C_G999C) WhcAg construct

SEQ ID NO: 11443 - protein, 1301 aa, Artificial Sequence
  SARS-CoV-2/USA/WA-UW261/2020__EPI_ISL_418046 spike protein (1-1147)(F970C_G999C) WhcAg construct
MFVFLVLLPLVSSQCVNLTTRTQLPPAYTNSFTRGVYYPDKVFRSSVLHSTQDLFLPFFSNVTWFHAIHVSGTNGTKRFDNPVLPFNDGVYFASTEKSNIIRGWIFGTTLDSKTQSLLIVNNATNVVIKVCEFQFCNDPFLGVYYHKNNKSWMESEFRVYSSANNCTFEYVSQPFLMDLEGKQGNFKNLREFVFKNIDGYFKIYSKHTPINLVRDLPQGFSALEPLVDLPIGINITRFQTLLALHRSYLTPGDSSSGWTAGAAAYYVGYLQPRTFLLKYNENGTITDAVDCALDPLSETKCTLKSFTVEKGIYQTSNFRVQPTESIVRFPNITNLCPFGEVFNATRFTSVYAWNRKRISNCVADYSVLYNSASFSTFKCYGVSPTKLNDLCFTNVYADSFVIRGDEVRQIAPGQTGKIADYNYKLPDDFTGCVIAWNSNNLDSKVGGNYNYLYRLFRKSNLKPFERDISTEIYQAGSTPCNGVEGFNCYFPLQSYGFQPTNGVGYQPYRVVVLSFELLHAPATVCGPKKSTNLVKNKCVNFNFNGLTGTGVLTESNKKFLPFQQFGRDIADTTDAVRDPQTLEILDITPCSFGGVSVITPGTNTSNQVAVLYQDVNCTEVPVAIHADQLTPTWRVYSTGSNVFQTRAGCLIGAEHVNNSYECDIPIGAGICASYQTQTNSPRRARSVASQSIIAYTMSLGAENSVAYSNNSIAIPTNFTISVTTEILPVSMTKTSVDCTMYICGDSTECSNLLLQYGSFCTQLNRALTGIAVEQDKNTQEVFAQVKQIYKTPPIKDFGGFNFSQILPDPSKPSKRSFIEDLLFNKVTLADAGFIKQYGDCLGDIAARDLICAQKFNGLTVLPPLLTDEMIAQYTSALLAGTITSGWTFGAGAALQIPFAMQMAYRFNGIGVTQNVLYENQKLIANQFNSAIGKIQDSLSSTASALGKLQDVVNQNAQALNTLVKQLSSNCGAISSVLNDILSRLDKVEAEVQIDRLITCRLQSLQTYVTQQLIRAAEIRASANLAATKMSECVLGQSKRVDFCGKGYHLMSFPQSAPHGVVFLHVTYVPAQEKNFTTAPAICHDGKAHFPREGVFVSNGTHWFVTQRNFYEPQIITTDNTFVSGNCDVVIGIVNNTVYDPLQPELDSGGGGSDIDPYKEFGSSYQLLNFLPLDFFPDLNALVDTATALYEEELTGREHCSPHHTAIRQALVCWDELTKLIAWMSSNITSEQVRTIIVNHVNDTWGLKVRQSLWFHLSCLTFGQHTVQEFLVSFGVWIRTPAPYRPPNAPILSTLPEHTVIC

SEQ ID NO: 11444 - protein, 1301 aa, Artificial Sequence
  SARS-CoV-2/Portugal/PT0035/2020__EPI_ISL_418020 spike protein (1-1147)(F970C_G999C) WhcAg construct
MFVFLVLLPLVSSQCVNLTTRTQLPPAYTNSFTRGVYYPDKVFRSSVLHSTQDLFLPFFSNVTWFHAIHVSGTNGTKRFDNPVLPFNDGVYFASTEKSNIIRGWIFGTTLDSKTQSLLIVNNATNVVIKVCEFQFCNDPFLGVYYHKNNKSWMESEFRVYSSANNCTFEYVSQPFLMDLEGKQGNFKNLREFVFKNIDGYFKIYSKHTPINLVRDLPQGFSALEPLVDLPIGINITRFQTLLALHRSYLTPGDSSSGWTAGAAAYYVGYLQPRTFLLKYNENGTITDAVDCALDPLSETKCTLKSFTVEKGIYQTSNFRVQPTESIVRFPNITNLCPFGEVFNATRFASVYAWNRKRISNCVADYSVLYNSASFSTFKCYGVSPTKLNDLCFTNVYADSFVIRGDEVRQIAPGQTGKIADYNYKLPDDFTGCVIAWNSNNLDSKVGGNYNYLYRLFRKSNLKPFERDISTEIYQAGSTPCNGVEGFNCYFPLQSYGFQPTNGVGYQPYRVVVLSFELLHAPATVCGPKKSTNLVKNKCVNFNFNGLTGTGVLTESNKKFLPFQQFGRDIADTTDAVRDPQTLEILDITPCSFGGVSVITPGTNTSNQVAVLYQDVNCTEVPVAIHADQLTPTWRVYSTGSNVFQTRAGCLIGAEHVNNSYECDIPIGAGICASYQTQTNSPRRARSVASQSIIAYTMSLGAENSVAYSNNSIAIPTNFTISVTTEILPVSMTKTSVDCTMYICGDSTECSNLLLQYGSFCTQLNRALTGIAVEQDKNTQEVFAQVKQIYKTPPIKDFGGFNFSQILPDPSKPSKRSFIEDLLFNKVTLADAGFIKQYGDCLGDISARDLICAQKFNGLTVLPPLLTDEMIAQYTSALLAGTITSGWTFGAGAALQIPFAMQMAYRFNGIGVTQNVLYENQKLIANQFNSAIGKIQDSLSSTASALGKLQDVVNQNAQALNTLVKQLSSNCGAISSVLNDILSRLDKVEAEVQIDRLITCRLQSLQTYVTQQLIRAAEIRASANLAATKMSECVLGQSKRVDFCGKGYHLMSFPQSAPHGVVFLHVTYVPAQEKNFTTAPAICHDGKAHFPREGVFVSNGTHWFVTQRNFYEPQIITTDNTFVSGNCDVVIGIVNNTVYDPLQPELDSGGGGSDIDPYKEFGSSYQLLNFLPLDFFPDLNALVDTATALYEEELTGREHCSPHHTAIRQALVCWDELTKLIAWMSSNITSEQVRTIIVNHVNDTWGLKVRQSLWFHLSCLTFGQHTVQEFLVSFGVWIRTPAPYRPPNAPILSTLPEHTVIC

SEQ ID NO: 11445 - protein, 1301 aa, Artificial Sequence
  SARS-CoV-2/USA/NY-NYUMC7/2020__EPI_ISL_418192 spike protein (1-1147)(F970C_G999C) WhcAg construct
MFVFLVLLPLVSSQCVNLTTRTQLPPAYTNSFTRGVYYPDKVFRSSVLHSTQDLFLPFFSNVTWFHAIHVSGTNGTKRFDNPVLPFNDGVYFASTEKSNIIRGWIFGTTLDSKTQSLLIVNNATNVVIKVCEFQFCNDPFLGVYHHKNNKSWMESEFRVYSSANNCTFEYVSQPFLMDLEGKQGNFKNLREFVFKNIDGYFKIYSKHTPINLVRDLPQGFSALEPLVDLPIGINITRFQTLLALHRSYLTPGDSSSGWTAGAAAYYVGYLQPRTFLLKYNENGTITDAVDCALDPLSETKCTLKSFTVEKGIYQTSNFRVQPTESIVRFPNITNLCPFGEVFNATRFASVYAWNRKRISNCVADYSVLYNSASFSTFKCYGVSPTKLNDLCFTNVYADSFVIRGDEVRQIAPGQTGKIADYNYKLPDDFTGCVIAWNSNNLDSKVGGNYNYLYRLFRKSNLKPFERDISTEIYQAGSTPCNGVEGFNCYFPLQSYGFQPTNGVGYQPYRVVVLSFELLHAPATVCGPKKSTNLVKNKCVNFNFNGLTGTGVLTESNKKFLPFQQFGRDIADTTDAVRDPQTLEILDITPCSFGGVSVITPGTNTSNQVAVLYQGVNCTEVPVAIHADQLTPTWRVYSTGSNVFQTRAGCLIGAEHVNNSYECDIPIGAGICASYQTQTNSPRRARSVASQSIIAYTMSLGAENSVAYSNNSIAIPTNFTISVTTEILPVSMTKTSVDCTMYICGDSTECSNLLLQYGSFCTQLNRALTGIAVEQDKNTQEVFAQVKQIYKTPPIKDFGGFNFSQILPDPSKPSKRSFIEDLLFNKVTLADAGFIKQYGDCLGDIAARDLICAQKFNGLTVLPPLLTDEMIAQYTSALLAGTITSGWTFGAGAALQIPFAMQMAYRFNGIGVTQNVLYENQKLIANQFNSAIGKIQDSLSSTASALGKLQDVVNQNAQALNTLVKQLSSNCGAISSVLNDILSRLDKVEAEVQIDRLITCRLQSLQTYVTQQLIRAAEIRASANLAATKMSECVLGQSKRVDFCGKGYHLMSFPQSAPHGVVFLHVTYVPAQEKNFTTAPAICHDGKAHFPREGVFVSNGTHWFVTQRNFYEPQIITTDNTFVSGNCDVVIGIVNNTVYDPLQPELDSGGGGSDIDPYKEFGSSYQLLNFLPLDFFPDLNALVDTATALYEEELTGREHCSPHHTAIRQALVCWDELTKLIAWMSSNITSEQVRTIIVNHVNDTWGLKVRQSLWFHLSCLTFGQHTVQEFLVSFGVWIRTPAPYRPPNAPILSTLPEHTVIC

SEQ ID NO: 11446 - protein, 1301 aa, Artificial Sequence
  SARS-CoV-2/Iceland/189/2020__EPI_ISL_417709 spike protein (1-1147)(F970C_G999C) WhcAg construct
MFVFLVLLPLVSSQCVNLTTRTQLPPAYTNSFTRGVYYPDKVFRSSVLHSTQDLFLPFFSNVTWFHAIHVSGTNGTKRFDNPVLPFNDGVYFASTEKSNIIRGWIFGTTLDSKTQSLLIVNNATNVVIKVCEFQFCNDPFLGVYYHKNNKSWMESEFRVYSSANNCTFEYVSQPFLMDLEGKQGNFKNLREFVFKNIDGYFKIYSKHTPINLVRDLPQGFSALEPLVDLPIGINITRFQTLLALHRSYLTPGDSSSGWTAGAAAYYVGYLQPRTFLLKYNENGTITDAVDCALDPLSETKCTLKSFTVEKGIYQTSNFRVQPTESIVRFPNITNLCPFGEVFNATRFASVYAWNRKRISNCVADYSVLYNSASFSTFKCYGVSPTKLNDLCFTNVYADSFVIRGDEVRQIAPGQTGKIADYNYKLPDDFTGCVIAWNSNNLDSKVGGNYNYLYRLFRKSNLKPFERDISTEIYQAGSTPCNGVEGFNCYFPLQSYGFQPTNGVGYQPYRVVVLSFELLHAPATVCGPKKSTNLVKNKCVNFNFNGLTGTGVLTESNKKFLPFQQFGRDIADTTDAVRDPQTLEILDITPCSFGGVSVITPGTNTSNQVAVLYQGVNCTEVPVAIHADQLTPTWRVYSTGSNVFQTRAGCLIGAEHVNNSYECDIPIGAGICASYQTQTNSPRRARSVASQSIIAYTMSLGAENSVAYSNNSIAIPTNFTISVTTEILPVSMTKTSVDCTMYICGDSTECSNLLLQYGSFCTQLNRALTGIAVEQDKNTQEVFAQVKQIYKTPPIKDFGGFNFSQILPDPSKPSKRSFIEDLLFNKVTLADAGFTKQYGDCLGDIAARDLICAQKFNGLTVLPPLLTDEMIAQYTSALLAGTITSGWTFGAGAALQIPFAMQMAYRFNGIGVTQNVLYENQKLIANQFNSAIGKIQDSLSSTASALGKLQDVVNQNAQALNTLVKQLSSNCGAISSVLNDILSRLDKVEAEVQIDRLITCRLQSLQTYVTQQLIRAAEIRASANLAATKMSECVLGQSKRVDFCGKGYHLMSFPQSAPHGVVFLHVTYVPAQEKNFTTAPAICHDGKAHFPREGVFVSNGTHWFVTQRNFYEPQIITTDNTFVSGNCDVVIGIVNNTVYDPLQPELDSGGGGSDIDPYKEFGSSYQLLNFLPLDFFPDLNALVDTATALYEEELTGREHCSPHHTAIRQALVCWDELTKLIAWMSSNITSEQVRTIIVNHVNDTWGLKVRQSLWFHLSCLTFGQHTVQEFLVSFGVWIRTPAPYRPPNAPILSTLPEHTVIC

SEQ ID NO: 11447 - protein, 1301 aa, Artificial Sequence
  SARS-CoV-2/Australia/NSW56/2020__EPI_ISL_417408 spike protein (1-1147)(F970C_G999C) WhcAg construct
MFVFLVLLPLVSSQCVNLTTRTQLPPAYTNSFTRGVYYPDKVFRSSVLHSTQDLFLPFFSNVTWFHAIHVSGTNGTKRFDNPVLPFNDGVYFASTEKSNIIRGWIFGTTLDSKTQSLLIVNNATNVVIKVCEFQFCNDPFLGVYYHKNNKSWMESEFRVYSSANNCTFEYVSQPFLMDLEGKQGNFKNLREFVFKNIDGYFKIYSKHTPINLVRDLPQGFSALEPLVDLPIGINITRFQTLLALHRSYLTPGDSSSGWTAGAAAYYVGYLQPRTFLLKYNENGTITDAVDCALDPLSETKCTLKSFTVEKGIYQTSNFRVQPTESIVRFPNITNLCPFGEVFNATRFASVYAWNRKRISNCVADYSVLYNSASFSTFKCYGVSPTKLNDLCFTNVYADSFVIRGDEVRQIAPGQTGKIADYNYKLPDDFTGCVIAWNSNNLDSKVGGNYNYLYRLFRKSNLKPFERDISTEIYQAGSTPCNGVEGFNCYFPLQSYGFQPTNGVGYQPYRVVVLSFELLHAPATVCGPKKSTNLVKNKCVNFNFNGLTGTGVLTESNKKFLPFQQFGRDIADTTDAVRDPQTLEILDITPCSFGGVSVITPGTNTSNQVAVLYQDVNCTEVPVAIHADQLTPTWRVYSTGSNVFQTRAGCLIGAEHVNNSYECDIPIGAGICASYQTQTNSPRRARSVASQSIIAYTMSLGAENSVAYSNNSIAIPTNFTISVTTEILPVSMTKTSVDCTMYICGDSTECSNLLLQYGSFCTQLNRALTGIAVEQDKNTQEVFAQVKQIYKTPPIKDFGGFNFSQILPDSSKPSKRSFIEDLLFNKVTLADAGFIKQYGDCLGDIAARDLICAQKFNGLTVLPPLLTDEMIAQYTSALLAGTITSGWTFGAGAALQIPFAMQMAYRFNGIGVTQNVLYENQKLIANQFNSAIGKIQDSLSSTASALGKLQDVVNQNAQALNTLVKQLSSNCGAISSVLNDILSRLDKVEAEVQIDRLITCRLQSLQTYVTQQLIRAAEIRASANLAATKMSECVLGQSKRVDFCGKGYHLMSFPQSAPHGVVFLHVTYVPAQEKNFTTAPAICHDGKAHFPREGVFVSNGTHWFVTQRNFYEPQIITTDNTFVSGNCDVVIGIVNNTVYDPLQPELDSGGGGSDIDPYKEFGSSYQLLNFLPLDFFPDLNALVDTATALYEEELTGREHCSPHHTAIRQALVCWDELTKLIAWMSSNITSEQVRTIIVNHVNDTWGLKVRQSLWFHLSCLTFGQHTVQEFLVSFGVWIRTPAPYRPPNAPILSTLPEHTVIC

SEQ ID NO: 11448 - protein, 1301 aa, Artificial Sequence
  SARS-CoV-2/Iceland/280/2020__EPI_ISL_417608 spike protein (1-1147)(F970C_G999C) WhcAg construct
MFVFLVLLPLVSSQCVNLTTRTQLPPAYTNSFTRGVYYPDKVFRSSVLHSTQDLFLPFFSNVTWFHAIHVSGTNGTKRFDNPVLPFNDGVYFASTEKSNIIRGWIFGTTLDSKTQSLLIVNNATNVVIKVCEFQFCNDPFLGVYYHKNNKSWMESEFRVYSSANNCTFEYVSQPFLMDLEGKQGNFKNLREFVFKNIDGYFKIYSKHTPINLVRDLPQGFSALEPLVDLPIGINITRFQTLLALHRSYLTPGDSSSGWTAGAAAYYVGYLQPRTFLLKYNENGTITDAVDCALDPLSETKCTLKSFTVEKGIYQTSNFRVQPTESIVRFPNITNLCPFGEVFNATRFASVYAWNRKRISNCVADYSVLYNSASFSTFKCYGVSPTKLNDLCFTNVYADSFVIRGDEVRQIAPGQTGKIADYNYKLPDDFTGCVIAWNSNNLDSKVGGNYNYLYRLFRKSNLKPFERDISTEIYQAGSTPCNGVEGFNCYFPLQSYGFQPTNGVGYQPYRVVVLSFELLHAPATVCGPKKSTNLVKNKCVNFNFNGLTGTGVLTESNKKFLPFQQFGRDIADTTDAVRDPQTLEILDITPCSFGGVSVITPGTNTSNQVAVLYQGVNCTEVPVAIHADQLTPTWRVYSTGSNVFQTRAGCLIGAEHVNNSYECDIPIGAGICASYHTQTNSPRRARSVASQSIIAYTMSLGAENSVAYSNNSIAIPTNFTISVTTEILPVSMTKTSVDCTMYICGDSTECSNLLLQYGSFCTQLNRALTGIAVEQDKNTQEVFAQVKQIYKTPPIKDFGGFNFSQILPDPSKPSKRSFIEDLLFNKVTLADAGFIKQYGDCLGDIAARDLICAQKFNGLTVLPPLLTDEMIAQYTSALLAGTITSGWTFGAGAALQIPFAMQMAYRFNGIGVTQNVLYENQKLIANQFNSAIGKIQDSLSSTASALGKLQDVVNQNAQALNTLVKQLSSNCGAISSVLNDILSRLDKVEAEVQIDRLITCRLQSLQTYVTQQLIRAAEIRASANLAATKMSECVLGQSKRVDFCGKGYHLMSFPQSAPHGVVFLHVTYVPAQEKNFTTAPAICHDGKAHFPREGVFVSNGTHWFVTQRNFYEPQIITTDNTFVSGNCDVVIGIVNNTVYDPLQPELDSGGGGSDIDPYKEFGSSYQLLNFLPLDFFPDLNALVDTATALYEEELTGREHCSPHHTAIRQALVCWDELTKLIAWMSSNITSEQVRTIIVNHVNDTWGLKVRQSLWFHLSCLTFGQHTVQEFLVSFGVWIRTPAPYRPPNAPILSTLPEHTVIC

SEQ ID NO: 11449 - protein, 1301 aa, Artificial Sequence; identical to SEQ ID NO: 11404
  SARS-CoV-2/Iceland/247/2020__EPI_ISL_417575 spike protein (1-1147)(F970C_G999C) WhcAg construct

SEQ ID NO: 11450 - protein, 1301 aa, Artificial Sequence
  SARS-CoV-2/Iceland/238/2020__EPI_ISL_417566 spike protein (1-1147)(F970C_G999C) WhcAg construct
MFVFLVLLPLVSSQCVNLTTRTQLPPAYTNSFTRGVYYPDKVFRSSVLHSTQDLFLPFFSNVTWFHAIHVSGTNGTKRFDNPVLPFNDGVYFASTEKSNIIRGWIFGTTLDSKTQSLLIVNNATNVVIKVCEFQFCNDPFLGVYYHKNNKSWMESEFRVYSSANNCTFEYVSQPFLMDLEGKQGNFKNLREFVFKNIDGYFKIYSKHTPINLVRDLPQGFSALEPLVDLPIGINITRFQTLLALHRSYLTPGDSSSGWTAGAAAYYVGYLQPRTFLLKYNENGTITDAVDCALDPLSETKCTLKSFTVEKGIYQTSNFRVQPTESIVRFPNITNLCPFGEVFNATRFASVYAWNRKRISNCVADYSVLYNSASFSTFKCYGVSPTKLNDLCFTNVYADSFVIRGDEVRQIAPGQTGKIADYNYKLPDDFTGCVIAWNSNNLDSKVGGNYNYLYRLFRKSNLKPFERDISTEIYQAGSTPCNGVEGFNCYFPLQSYGFQPTNGVGYQPYRVVVLSFELLHAPATVCGPKKSTNLVKNKCVNFNFNGLTGTGVLTESNKKFLPFQQFGRDIADTTDAVRDPQTLEILDITPCSFGGVSVITPGTNTSNQVAVLYQGVNCTEVPVAIHADQLTPTWRVYSTGSNVFQTRAGCLIGAEHVNNSYECDIPIGAGICASYQTQTNSPRRARSVASQSIIAYTMSLGAENSVAYSNNSIAIPTNFTISVTTEILPVSMTKTSVDCTMYICGDSTECSNLLLQYGSFCTQLNRALTGIAVEQDKNTQEVFAQVKQIYKTPPIKDFGGFNFSQILPDPSKPSKRSFIEDLLFNKVTLADVGFIKQYGDCLGDIAARDLICAQKFNGLTVLPPLLTDEMIAQYTSALLAGTITSGWTFGAGAALQIPFAMQMAYRFNGIGVTQNVLYENQKLIANQFNSAIGKIQDSLSSTASALGKLQDVVNQNAQALNTLVKQLSSNCGAISSVLNDILSRLDKVEAEVQIDRLITCRLQSLQTYVTQQLIRAAEIRASANLAATKMSECVLGQSKRVDFCGKGYHLMSFPQSAPHGVVFLHVTYVPAQEKNFTTAPAICHDGKAHFPREGVFVSNGTHWFVTQRNFYEPQIITTDNTFVSGNCDVVIGIVNNTVYDPLQPELDSGGGGSDIDPYKEFGSSYQLLNFLPLDFFPDLNALVDTATALYEEELTGREHCSPHHTAIRQALVCWDELTKLIAWMSSNITSEQVRTIIVNHVNDTWGLKVRQSLWFHLSCLTFGQHTVQEFLVSFGVWIRTPAPYRPPNAPILSTLPEHTVIC

SEQ ID NO: 11451 - protein, 1301 aa, Artificial Sequence
  SARS-CoV-2/Greece/16/2020__EPI_ISL_418265 spike protein (1-1147)(F970C_G999C) WhcAg construct
MFVFLVLLPLVSSQCVNLTTRTQLPPAYTNSFTRGVYYPDKVFRSSVLHSTQDLFLPFFSNVTWFHAIHVSGTNGTKRFDNPVLPFNDGVYFASTEKSNIIRGWIFGTTLDSKTQSLLIVNNATNVVIKVCEFQFCNDPFLGVYYHKNNKSWMESEFRVYSSANNCTFEYVSQPFLMDLEGKQGNFKNLREFVFKNVDGYFKIYSKHTPINLVRDLPQGFSALEPLVDLPIGINITRFQTLLALHRSYLTPGDSSSGWTAGAAAYYVGYLQPRTFLLKYNENGTITDAVDCALDPLSETKCTLKSFTVEKGIYQTSNFRVQPTESIVRFPNITNLCPFGEVFNATRFASVYAWNRKRISNCVADYSVLYNSASFSTFKCYGVSPTKLNDLCFTNVYADSFVIRGDEVRQIAPGQTGKIADYNYKLPDDFTGCVIAWNSNNLDSKVGGNYNYLYRLFRKSNLKPFERDISTEIYQAGSTPCNGVEGFNCYFPLQSYGFQPTNGVGYQPYRVVVLSFELLHAPATVCGPKKSTNLVKNKCVNFNFNGLTGTGVLTESNKKFLPFQQFGRDIADTTDAVRDPQTLEILDITPCSFGGVSVITPGTNTSNQVAVLYQDVNCTEVPVAIHADQLTPTWRVYSTGSNVFQTRAGCLIGAEHVNNSYECDIPIGAGICASYQTQTNSPRRARSVASQSIIAYTMSLGAENSVAYSNNSIAIPTNFTISVTTEILPVSMTKTSVDCTMYICGDSTECSNLLLQYGSFCTQLNRALTGIAVEQDKNTQEVFAQVKQIYKTPPIKDFGGFNFSQILPDPSKPSKRSFIEDLLFNKVTLADAGFIKQYGDCLGDIAARDLICAQKFNGLTVLPPLLTDEMIAQYTSALLAGTITSGWTFGAGAALQIPFAMQMAYRFNGIGVTQNVLYENQKLIANQFNSAIGKIQDSLSSTASALGKLQDVVNQNAQALNTLVKQLSSNCGAISSVLNDILSRLDKVEAEVQIDRLITCRLQSLQTYVTQQLIRAAEIRASANLAATKMSECVLGQSKRVDFCGKGYHLMSFPQSAPHGVVFLHVTYVPAQEKNFTTAPAICHDGKAHFPREGVFVSNGTHWFVTQRNFYEPQIITTDNTFVSGNCDVVIGIVNNTVYDPLQPELDSGGGGSDIDPYKEFGSSYQLLNFLPLDFFPDLNALVDTATALYEEELTGREHCSPHHTAIRQALVCWDELTKLIAWMSSNITSEQVRTIIVNHVNDTWGLKVRQSLWFHLSCLTFGQHTVQEFLVSFGVWIRTPAPYRPPNAPILSTLPEHTVIC

SEQ ID NO: 11452 - protein, 1301 aa, Artificial Sequence
  SARS-CoV-2/Iceland/319/2020__EPI_ISL_417648 spike protein (1-1147)(F970C_G999C) WhcAg construct
MFVFLVLLPLVSSQCVNLTTRTQLPPAYTNSFTRGVYYPDKVFRSSVLHSTQDLFLPFFSNVTWFHAIHVSGTNGTKRFDNPVLPFNDGVYFASTEKSNIIRGWIFGTTLDSKTQSLLIVNNATNVVIKVCEFQFCNDPFLGVYYHKNNKSWMESEFRVYSSANNCTFEYVSQPFLIDLEGKQGNFKNLREFVFKNIDGYFKIYSKHTPINLVRDLPQGFSALEPLVDLPIGINITRFQTLLALHRSYLTPGDSSSGWTAGAAAYYVGYLQPRTFLLKYNENGTITDAVDCALDPLSETKCTLKSFTVEKGIYQTSNFRVQPTESIVRFPNITNLCPFGEVFNATRFASVYAWNRKRISNCVADYSVLYNSASFSTFKCYGVSPTKLNDLCFTNVYADSFVIRGDEVRQIAPGQTGKIADYNYKLPDDFTGCVIAWNSNNLDSKVGGNYNYLYRLFRKSNLKPFERDISTEIYQAGSTPCNGVEGFNCYFPLQSYGFQPTNGVGYQPYRVVVLSFELLHAPATVCGPKKSTNLVKNKCVNFNFNGLTGTGVLTESNKKFLPFQQFGRDIADTTDAVRDPQTLEILDITPCSFGGVSVITPGTNTSNQVAVLYQGVNCTEVPVAIHADQLTPTWRVYSTGSNVFQTRAGCLIGAEHVNNSYECDIPIGAGICASYQTQTNSPRRARSVASQSIIAYTMSLGAENSVAYSNNSIAIPTNFTISVTTEILPVSMTKTSVDCTMYICGDSTECSNLLLQYGSFCTQLNRALTGIAVEQDKNTQEVFAQVKQIYKTPPIKDFGGFNFSQILPDPSKPSKRSFIEDLLFNKVTLADAGFIKQYGDCLGDIAARDLICAQKFNGLTVLPPLLTDEMIAQYTSALLAGTITSGWTFGAGAALQIPFAMQMAYRFNGIGVTQNVLYENQKLIANQFNSAIGKIQDSLSSTASALGKLQDVVNQNAQALNTLVKQLSSNCGAISSVLNDILSRLDKVEAEVQIDRLITCRLQSLQTYVTQQLIRAAEIRASANLAATKMSECVLGQSKRVDFCGKGYHLMSFPQSAPHGVVFLHVTYVPAQEKNFTTAPAICHDGKAHFPREGVFVSNGTHWFVTQRNFYEPQIITTDNTFVSGNCDVVIGIVNNTVYDPLQPELDSGGGGSDIDPYKEFGSSYQLLNFLPLDFFPDLNALVDTATALYEEELTGREHCSPHHTAIRQALVCWDELTKLIAWMSSNITSEQVRTIIVNHVNDTWGLKVRQSLWFHLSCLTFGQHTVQEFLVSFGVWIRTPAPYRPPNAPILSTLPEHTVIC

SEQ ID NO: 11453 - protein, 1301 aa, Artificial Sequence
  SARS-CoV-2/Congo/94/2020__EPI_ISL_417947 spike protein (1-1147)(F970C_G999C) WhcAg construct
MFVFLVLLPLVSSQCVNLTTRTQLPPAYTNSFTRGVYYPDKVFRSSVLHSTQDLFLPFFSNVTWFHAIHVSGTNGTKRFDNPVLPFNDGVYFASTEKSNIIRGWIFGTTLDSKTQSLLIVNNATNVVIKVCEFQFCNDPFLGVYYHKNNKSWMESEFRVYSSANNCTFEYVSQPFLMDLEGKQGNFKNLREFVFKNIDGYFKIYSKHTPINLVRDLPQGFSALEPLVDLPIGINITRFQTLLALHRSYLTPGDSSSGWTAGAAAYYVGYLQPRTFLLKYNENGTITDAVDCALDPLSETKCTLKSFTVEKGIYQTSNFRVQPTESIVRFPNITNLCPFGEVFNATRFASVYAWNRKRISNCVADYSVLYNSASFSTFKCYGVSPTKLNDLCFTNVYADSFVIRGDEVRQIAPGQTGKIADYNYKLPDDFTGCVIAWNSNNLDSKVGGNYNYLYRLFRKSNLKPFERDISTEIYQAGSTPCNGVEGFNCYFPLQSYGFQPTNGVGYQPYRVVVLSFELLHAPATVCGPKKSTNLVKNKCVNFNFNGLTGTGVLTESNKKFLPFQQFGRDIADTTDAVRDPQTLEILDITPCSFGGVSVITPGTNTSNQVAVLYQGVNCTEVPVAIHADQLTPTWRVYSTGSNVFQTRAGCLIGAEHVNNSYECDIPIGAGICASYQTQTNSPRRARSVASQSIIAYTMSLGAENSVAYSNNSIAIPTNFTISVTTEILPVSMTKTSVDCTMYICGDSTECSNLLLQYGSFCTQLNRALTGIAVEQDKNTQEVFAQVKQIYKTPPIKDFGGFNFSQILPDPSKPSKRSFIEDILFNKVTLADAGFIKQYGDCLGDIAARDLICAQKFNGLTVLPPLLTDEMIAQYTSALLAGTITSGWTFGAGAALQIPFAMQMAYRFNGIGVTQNVLYENQKLIANQFNSAIGKIQDSLSSTASALGKLQDVVNQNAQALNTLVKQLSSNCGAISSVLNDILSRLDKVEAEVQIDRLITCRLQSLQTYVTQQLIRAAEIRASANLAATKMSECVLGQSKRVDFCGKGYHLMSFPQSAPHGVVFLHVTYVPAQEKNFTTAPAICHDGKAHFPREGVFVSNGTHWFVTQRNFYEPQIITTDNTFVSGNCDVVIGIVNNTVYDPLQPELDSGGGGSDIDPYKEFGSSYQLLNFLPLDFFPDLNALVDTATALYEEELTGREHCSPHHTAIRQALVCWDELTKLIAWMSSNITSEQVRTIIVNHVNDTWGLKVRQSLWFHLSCLTFGQHTVQEFLVSFGVWIRTPAPYRPPNAPILSTLPEHTVIC

SEQ ID NO: 11454 - protein, 1301 aa, Artificial Sequence
  SARS-CoV-2/Congo/158/2020__EPI_ISL_417950 spike protein (1-1147)(F970C_G999C) WhcAg construct
MFVFLVLLPLVSSQCVNLTTRTQLPPAYTNSFTRGVYYPDKVFRSSVLHSTQDLFLPFFSNVTWFHAIHVSGTNGTKRFDNPVLPFNDGVYFASTEKSNIIRGWIFGTTLDSKTQSLLIVNNATNVVIKVCEFQFCNDPFLGVYYHKNNKSWMESEFRVYSSANNCTFEYVSQPFLMDLEGKQGNFKNLREFVFKNIDGYFKIYSKHTPINLVRDLPQGFSALEPLVDLPIGINITRFQTLLALHRSYLTPGDSSSGWTAGAAAYYVGYLQPRTFLLKYNENGTITDAVDCALDPLSETKCTLKSFTVEKGIYQTSNFRVQPTESIVRFPNITNLCPFGEVFNATRFASVYAWNRKRISNCVADYSVLYNSASFSTFKCYGVSPTKLNDLCFTNVYADSFVIRGDEVRQIAPGQTGKIADYNYKLPDDFTGCVIAWNSNNLDSKVGGNYNYLYRLFRKSNLKPFERDISTEIYQAGSTPCNGVEGFNCYFPLQSYGFQPTNGVGYQPYRVVVLSFELLHAPATVCGPKKSTNLVKNKCVNFNFNGLTGTGVLTESNKKFLPFQQFGRDIADTTDAVRDPQTLEILDITPCSFGGVSVITPGTNTSNQVAVLYQDVNCTEVPVAIHADQLTPTWRVYSTGSNVFQTRAGCLIGAEHVNNSYECDIPIGAGICASYQTQTNSPRRARSVASQSIIAYTMSLGAENSVAYSNNSIAIPTNFTISVTTEILPVSMTKTSVDCTMYICGDSTECSNLLLQYGSFCTQLNRALTGIAVEQDKNTQEVFAQVKQIYKTPPIKDFGGFNFSQILPDPSKPSKRSFIEDLLFNKVTLADAGFIKQYGDCLGDIAARDLICAQKFNGLTVLPPLLTDEMIAQYTSALLAGTITSGWTFGAGAALQIPFAMQMAYRFNGIGVTQNVLYENQKLIANQFNSAIGKIQDSLSSTASALGKLQDVVNQNAQALNTLVKQLSSNCGAISSVLNDILSRLDKVEAEVQIDRLITCRLQSLQTYVTQQLIRAAEIRASANLAATKMSECVLGQSKRVDFCGKGYHLMSFPQSAPHGVVFLHVTYVPAQEKNFTTAPAICHDGKAHFPREGVFVSNGTHWFVTQRNFYEPQIITTDNTFLSGNCDVVIGIVNNTVYDPLQPELDSGGGGSDIDPYKEFGSSYQLLNFLPLDFFPDLNALVDTATALYEEELTGREHCSPHHTAIRQALVCWDELTKLIAWMSSNITSEQVRTIIVNHVNDTWGLKVRQSLWFHLSCLTFGQHTVQEFLVSFGVWIRTPAPYRPPNAPILSTLPEHTVIC

SEQ ID NO: 11455 - protein, 1301 aa, Artificial Sequence
  SARS-CoV-2/USA/UT-00034/2020__EPI_ISL_417977 spike protein (1-1147)(F970C_G999C) WhcAg construct
MFVFLVLLPLVSSQCVNLTTRTQLPPAYTNSFTRGVYYPDKVFRSSVLHSTQDLFLPFFSNVTWFHAIHVSGTNGTKRFDNPVLPFNDGVYFASTEKSNIIRGWIFGTTLDSKTQSLLIVNNATNVVIKVCEFQFCNDPFLGVYYYKNNKSWMESEFRVYSSANNCTFEYVSQPFLMDLEGKQGNFKNLREFVFKNIDGYFKIYSKHTPINLVRDLPQGFSALEPLVDLPIGINITRFQTLLALHRSYLTPGDSSSGWTAGAAAYYVGYLQPRTFLLKYNENGTITDAVDCALDPLSETKCTLKSFTVEKGIYQTSNFRVQPTESIVRFPNITNLCPFGEVFNATRFASVYAWNRKRISNCVADYSVLYNSASFSTFKCYGVSPTKLNDLCFTNVYADSFVIRGDEVRQIAPGQTGKIADYNYKLPDDFTGCVIAWNSNNLDSKVGGNYNYLYRLFRKSNLKPFERDISTEIYQAGSTPCNGVEGFNCYFPLQSYGFQPTNGVGYQPYRVVVLSFELLHAPATVCGPKKSTNLVKNKCVNFNFNGLTGTGVLTESNKKFLPFQQFGRDIADTTDAVRDPQTLEILDITPCSFGGVSVITPGTNTSNQVAVLYQGVNCTEVPVAIHADQLTPTWRVYSTGSNVFQTRAGCLIGAEHVNNSYECDIPIGAGICASYQTQTNSPRRARSVASQSIIAYTMSLGAENSVAYSNNSIAIPTNFTISVTTEILPVSMTKTSVDCTMYICGDSTECSNLLLQYGSFCTQLNRALTGIAVEQDKNTQEVFAQVKQIYKTPPIKDFGGFNFSQILPDPSKPSKRSFIEDLLFNKVTLADAGFIKQYGDCLGDIAARDLICAQKFNGLTVLPPLLTDEMIAQYTSALLAGTITSGWTFGAGAALQIPFAMQMAYRFNGIGVTQNVLYENQKLIANQFNSAIGKIQDSLSSTASALGKLQDVVNQNAQALNTLVKQLSSNCGAISSVLNDILSRLDKVEAEVQIDRLITCRLQSLQTYVTQQLIRAAEIRASANLAATKMSECVLGQSKRVDFCGKGYHLMSFPQSAPHGVVFLHVTYVPAQEKNFTTAPAICHDGKAHFPREGVFVSNGTHWFVTQRNFYEPQIITTDNTFVSGNCDVVIGIVNNTVYDPLQPELDSGGGGSDIDPYKEFGSSYQLLNFLPLDFFPDLNALVDTATALYEEELTGREHCSPHHTAIRQALVCWDELTKLIAWMSSNITSEQVRTIIVNHVNDTWGLKVRQSLWFHLSCLTFGQHTVQEFLVSFGVWIRTPAPYRPPNAPILSTLPEHTVIC

SEQ ID NO: 11456 - protein, 1301 aa, Artificial Sequence
  SARS-CoV-2/USA/UT-00033/2020__EPI_ISL_417976 spike protein (1-1147)(F970C_G999C) WhcAg construct
MFVFLVLLPLVSSQCVNLTTRTQLPPAYTNSFTRGVYYPDKVFRSSVLHSTQDLFLPFFSNVTWFHAIHVSGTNGTKRFDNPVLPFNDGVYFASTEKSNIIRGWIFGTTLDSKTQSLLIVNNATNVVIKVCEFQFCNDPFLGVYYHKNNKSWMESEFRVYSSANNCTFEYVSQPFLMDLEGKQGNFKNLREFVFKNIDGYFKIYSKHTPINLVRDLPQGFSALEPLVDLPIGINITRFQTLLALHRSYLTPGDSSSGLTAGAAAYYVGYLQPRTFLLKYNENGTITDAVDCALDPLSETKCTLKSFTVEKGIYQTSNFRVQPTESIVRFPNITNLCPFGEVFNATRFASVYAWNRKRISNCVADYSVLYNSASFSTFKCYGVSPTKLNDLCFTNVYADSFVIRGDEVRQIAPGQTGKIADYNYKLPDDFTGCVIAWNSNNLDSKVGGNYNYLYRLFRKSNLKPFERDISTEIYQAGSTPCNGVEGFNCYFPLQSYGFQPTNGVGYQPYRVVVLSFELLHAPATVCGPKKSTNLVKNKCVNFNFNGLTGTGVLTESNKKFLPFQQFGRDIADTTDAVRDPQTLEILDITPCSFGGVSVITPGTNTSNQVAVLYQGVNCTEVPVAIHADQLTPTWRVYSTGSNVFQTRAGCLIGAEHVNNSYECDIPIGAGICASYQTQTNSPRRARSVASQSIIAYTMSLGAENSVAYSNNSIAIPTNFTISVTTEILPVSMTKTSVDCTMYICGDSTECSNLLLQYGSFCTQLNRALTGIAVEQDKNTQEVFAQVKQIYKTPPIKDFGGFNFSQILPDPSKPSKRSFIEDLLFNKVTLADAGFIKQYGDCLGDIAARDLICAQKFNGLTVLPPLLTDEMIAQYTSALLAGTITSGWTFGAGAALQIPFAMQMAYRFNGIGVTQNVLYENQKLIANQFNSAIGKIQDSLSSTASALGKLQDVVNQNAQALNTLVKQLSSNCGAISSVLNDILSRLDKVEAEVQIDRLITCRLQSLQTYVTQQLIRAAEIRASANLAATKMSECVLGQSKRVDFCGKGYHLMSFPQSAPHGVVFLHVTYVPAQEKNFTTAPAICHDGKAHFPREGVFVSNGTHWFVTQRNFYEPQIITTDNTFVSGNCDVVIGIVNNTVYDPLQPELDSGGGGSDIDPYKEFGSSYQLLNFLPLDFFPDLNALVDTATALYEEELTGREHCSPHHTAIRQALVCWDELTKLIAWMSSNITSEQVRTIIVNHVNDTWGLKVRQSLWFHLSCLTFGQHTVQEFLVSFGVWIRTPAPYRPPNAPILSTLPEHTVIC

SEQ ID NO: 11457 - protein, 1301 aa, Artificial Sequence
  SARS-CoV-2/USA/WI-13/2020__EPI_ISL_417516 spike protein (1-1147)(F970C_G999C) WhcAg construct
MFVFLVLLPLVSSQCVNLTTRTQLPPAYTNSFTRGVYYPDKVFRSSVLHSTQDLFLPFFSNVTWFHAIHVSGTNGTKRFDNPVLPFNDGVYFASTEKSNIIRGWIFGTTLDSKTQSLLIVNNATNVVIKVCEFQFCNDPFLGVYYHKNNKSWMESEFRVYSSANNCTFEYVSQPFLMDLEGKQGNFKNLREFVFKNIDGYFKIYSKHTPINLVRDLPQGFSALEPLVDLPIGINITRFQTLLALHRSYLTPGDSSSGWTAGAAAYYVGYLQPRTFLLKYNENGTITDAVDCALDPLSETKCTLKSFTVEKGIYQTSNFRVLPTESIVRFPNITNLCPFGEVFNATRFASVYAWNRKRISNCVADYSVLYNSASFSTFKCYGVSPTKLNDLCFTNVYADSFVIRGDEVRQIAPGQTGKIADYNYKLPDDFTGCVIAWNSNNLDSKVGGNYNYLYRLFRKSNLKPFERDISTEIYQAGSTPCNGVEGFNCYFPLQSYGFQPTNGVGYQPYRVVVLSFELLHAPATVCGPKKSTNLVKNKCVNFNFNGLTGTGVLTESNKKFLPFQQFGRDIADTTDAVRDPQTLEILDITPCSFGGVSVITPGTNTSNQVAVLYQGVNCTEVPVAIHADQLTPTWRVYSTGSNVFQTRAGCLIGAEHVNNSYECDIPIGAGICASYQTQTNSPRRARSVASQSIIAYTMSLGAENSVAYSNNSIAIPTNFTISVTTEILPVSMTKTSVDCTMYICGDSTECSNLLLQYGSFCTQLNRALTGIAVEQDKNTQEVFAQVKQIYKTPPIKDFGGFNFSQILPDPSKPSKRSFIEDLLFNKVTLADAGFIKQYGDCLGDIAARDLICAQKFNGLTVLPPLLTDEMIAQYTSALLAGTITSGWTFGAGAALQIPFAMQMAYRFNGIGVTQNVLYENQKLIANQFNSAIGKIQDSLSSTASALGKLQDVVNQNAQALNTLVKQLSSNCGAISSVLNDILSRLDKVEAEVQIDRLITCRLQSLQTYVTQQLIRAAEIRASANLAATKMSECVLGQSKRVDFCGKGYHLMSFPQSAPHGVVFLHVTYVPAQEKNFTTAPAICHDGKAHFPREGVFVSNGTHWFVTQRNFYEPQIITTDNTFVSGNCDVVIGIVNNTVYDPLQPELDSGGGGSDIDPYKEFGSSYQLLNFLPLDFFPDLNALVDTATALYEEELTGREHCSPHHTAIRQALVCWDELTKLIAWMSSNITSEQVRTIIVNHVNDTWGLKVRQSLWFHLSCLTFGQHTVQEFLVSFGVWIRTPAPYRPPNAPILSTLPEHTVIC

SEQ ID NO: 11458 - protein, 1300 aa, Artificial Sequence
  SARS-CoV-2/India/1-27/2020__EPI_ISL_413522 spike protein (1-1146)(F969C_G998C) WhcAg construct
MFVFLVLLPLVSSQCVNLTTRTQLPPAYTNSFTRGVYYPDKVFRSSVLHSTQDLFLPFFSNVTWFHAIHVSGTNGTKRFDNPVLPFNDGVYFASTEKSNIIRGWIFGTTLDSKTQSLLIVNNATNVVIKVCEFQFCNDPFLGVYHKNNKSWMESEFRVYSSANNCTFEYVSQPFLMDLEGKQGNFKNLREFVFKNIDGYFKIYSKHTPINLVRDLPQGFSALEPLVDLPIGINITRFQTLLALHRSYLTPGDSSSGWTAGAAAYYVGYLQPRTFLLKYNENGTITDAVDCALDPLSETKCTLKSFTVEKGIYQTSNFRVQPTESIVRFPNITNLCPFGEVFNATRFASVYAWNRKRISNCVADYSVLYNSASFSTFKCYGVSPTKLNDLCFTNVYADSFVIRGDEVIQIAPGQTGKIADYNYKLPDDFTGCVIAWNSNNLDSKVGGNYNYLYRLFRKSNLKPFERDISTEIYQAGSTPCNGVEGFNCYFPLQSYGFQPTNGVGYQPYRVVVLSFELLHAPATVCGPKKSTNLVKNKCVNFNFNGLTGTGVLTESNKKFLPFQQFGRDIADTTDAVRDPQTLEILDITPCSFGGVSVITPGTNTSNQVAVLYQDVNCTEVPVAIHADQLTPTWRVYSTGSNVFQTRAGCLIGAEHVNNSYECDIPIGAGICASYQTQTNSPRRARSVASQSIIAYTMSLGAENSVAYSNNSIAIPTNFTISVTTEILPVSMTKTSVDCTMYICGDSTECSNLLLQYGSFCTQLNRALTGIAVEQDKNTQEVFAQVKQIYKTPPIKDFGGFNFSQILPDPSKPSKRSFIEDLLFNKVTLADAGFIKQYGDCLGDIAARDLICAQKFNGLTVLPPLLTDEMIAQYTSALLAGTITSGWTFGAGAALQIPFAMQMAYRFNGIGVTQNVLYENQKLIANQFNSAIGKIQDSLSSTASALGKLQDVVNQNAQALNTLVKQLSSNCGAISSVLNDILSRLDKVEAEVQIDRLITCRLQSLQTYVTQQLIRAAEIRASANLAATKMSECVLGQSKRVDFCGKGYHLMSFPQSAPHGVVFLHVTYVPAQEKNFTTAPAICHDGKAHFPREGVFVSNGTHWFVTQRNFYEPQIITTDNTFVSGNCDVVIGIVNNTVYDPLQPELDSGGGGSDIDPYKEFGSSYQLLNFLPLDFFPDLNALVDTATALYEEELTGREHCSPHHTAIRQALVCWDELTKLIAWMSSNITSEQVRTIIVNHVNDTWGLKVRQSLWFHLSCLTFGQHTVQEFLVSFGVWIRTPAPYRPPNAPILSTLPEHTVIC

SEQ ID NO: 11459 - protein, 1295 aa, Artificial Sequence
  SARS-CoV-2/pangolin/Guangxi/P4L/2017__EPI_ISL_410538 spike protein (1-1141)(F964C_G993C) WhcAg construct
MFVFLFVLPLVSSQCVNLTTRTGIPPGYTNSSTRGVYYPDKVFRSSILHLTQDLFLPFFSNVTWFNTINYQGGFKKFDNPVLPFNDGVYFASTEKSNIIRGWIFGTTLDARTQSLLIVNNATNVVIKVCEFQFCTDPFLGVYYHNNNKTWVENEFRVYSSANNCTFEYISQPFLMDLEGKQGNFKNLREFVFKNVDGYFKIYSKHTPIDLVRDLPRGFAALEPLVDLPIGINITRFQTLLALHRSYLTPGNLESGWTTGAAAYYVGYLQQRTFLLSYNQNGTITDAVDCSLDPLSETKCTLKSLTVEKGIYQTSNFRVQPTISIVRFPNITNLCPFGEVFNASKFASVYAWNRKRISNCVADYSVLYNSTSFSTFKCYGVSPTKLNDLCFTNVYADSFVVKGDEVRQIAPGQTGVIADYNYKLPDDFTGCVIAWNSVKQDALTGGNYGYLYRLFRKSKLKPFERDISTEIYQAGSTPCNGQVGLNCYYPLERYGFHPTTGVNYQPFRVVVLSFELLNGPATVCGPKLSTTLVKDKCVNFNFNGLTGTGVLTTSKKQFLPFQQFGRDISDTTDAVRDPQTLEILDITPCSFGGVSVITPGTNTSNQVAVLYQDVNCTEVPMAIHAEQLTPAWRVYSAGANVFQTRAGCLVGAEHVNNSYECDIPVGAGICASYHSMSSLRSVNQRSIIAYTMSLGAENSVAYSNNSIAIPTNFTISVTTEILPVSMTKTSVDCTMYICGDSIECSNLLLQYGSFCTQLNRALTGIAVEQDKNTQEVFAQVKQIYKTPPIKDFGGFNFSQILPDPSKPSKRSFIEDLLFNKVTLADAGFIKQYGDCLGDIAARDLICAQKFNGLTVLPPLLTDEMIAQYTSALLAGTITSGWTFGAGAALQIPFAMQMAYRFNGIGVTQNVLYENQKLIANQFNSAIGKIQDSLSSTASALGKLQDVVNQNAQALNTLVKQLSSNCGAISSVLNDILSRLDKVEAEVQIDRLITCRLQSLQTYVTQQLIRAAEIRASANLAATKMSECVLGQSKRVDFCGKGYHLMSFPQSAPHGVVFLHVTYVPAQEKNFTTAPAICHEGKAHFPREGVFVSNGTHWFITQRNFYEPQIITTDNTFVSGSCDVVIGIVNNTVYDPLQPELDSGGGGSDIDPYKEFGSSYQLLNFLPLDFFPDLNALVDTATALYEEELTGREHCSPHHTAIRQALVCWDELTKLIAWMSSNITSEQVRTIIVNHVNDTWGLKVRQSLWFHLSCLTFGQHTVQEFLVSFGVWIRTPAPYRPPNAPILSTLPEHTVIC

SEQ ID NO: 11460 - protein, 1295 aa, Artificial Sequence
  SARS-CoV-2/pangolin/Guangxi/P5L/2017__EPI_ISL_410540 spike protein (1-1141)(F964C_G993C) WhcAg construct
MFVFLFVLPLVSSQCVNLTTRTGIPPGYTNSSTRGVYYPDKVFRSSILHLTQDLFLPFFSNVTWFNTINYQGGFKKFDNPVLPFNDGVYFASTEKSNIIRGWIFGTTLDARTQSLLIVNNATNVVIKVCEFQFCTDPFLGVYYHNNNKTWVENEFRVYSSANNCTFEYISQPFLMDLEGKQGNFKNLREFVFKNVDGYFKIYSKHTPIDLVRDLPRGFAALEPLVDLPIGINITRFQTLLALHRSYLTPGKLESGWTTGAAAYYVGYLQQRTFLLSYNQNGTITDAVDCSLDPLSETKCTLKSLTVEKGIYQTSNFRVQPTISIVRFPNITNLCPFGEVFNASKFASVYAWNRKRISNCVADYSVLYNSTSFSTFKCYGVSPTKLNDLCFTNVYADSFVVKGDEVRQIAPGQTGVIADYNYKLPDDFTGCVIAWNSVKQDALTGGNYGYLYRLFRKSKLKPFERDISTEIYQAGSTPCNGQVGLNCYYPLERYGFHPTTGVNYQPFRVVVLSFELLNGPATVCGPKLSTTLVKDKCVNFNFNGLTGTGVLTTSKKQFLPFQQFGRDISDTTDAVRDPQTLEILDITPCSFGGVSVITPGTNTSNQVAVLYQDVNCTEVPMAIHAEQLTPAWRVYSAGANVFQTRAGCLVGAEHVNNSYECDIPVGAGICASYHSMSSFRSVNQRSIIAYTMSLGAENSVAYSNNSIAIPTNFTISVTTEILPVSMTKTSVDCTMYICGDSIECSNLLLQYGSFCTQLNRALTGIAVEQDKNTQEVFAQVKQIYKTPPIKDFGGFNFSQILPDPSKPSKRSFIEDLLFNKVTLADAGFIKQYGDCLGDIAARDLICAQKFNGLTVLPPLLTDEMIAQYTSALLAGTITSGWTFGAGAALQIPFAMQMAYRFNGIGVTQNVLYENQKLIANQFNSAIGKIQDSLSSTASALGKLQDVVNQNAQALNTLVKQLSSNCGAISSVLNDILSRLDKVEAEVQIDRLITCRLQSLQTYVTQQLIRAAEIRASANLAATKMSECVLGQSKRVDFCGKGYHLMSFPQSAPHGVVFLHVTYVPAQEKNFTTAPAICHEGKAHFPREGVFVSNGTHWFITQRNFYEPQIITTDNTFVSGSCDVVIGIVNNTVYDPLQPELDSGGGGSDIDPYKEFGSSYQLLNFLPLDFFPDLNALVDTATALYEEELTGREHCSPHHTAIRQALVCWDELTKLIAWMSSNITSEQVRTIIVNHVNDTWGLKVRQSLWFHLSCLTFGQHTVQEFLVSFGVWIRTPAPYRPPNAPILSTLPEHTVIC

SEQ ID NO: 11461 - protein, 1295 aa, Artificial Sequence
  SARS-CoV-2/pangolin/Guangxi/P5E/2017__EPI_ISL_410541 spike protein (1-1141)(F964C_G993C) WhcAg construct
MFVFLFVLPLVSSQCVNLTTRTGIPPGYTNSSTRGVYYPDKVFRSSILHLTQDLFLPFFSNVTWFNTITYQGGSKKFDNPVLPFNDGVYFASTEKSNIIRGWIFGTTLDARTQSLLIVNNATNVVIKVCEFQFCTDPFLGVYYHNNNKTWVENEFRVYSSANNCTFEYISQPFLMDLEGKQGNFKNLREFVFKNVDGYFKIYSKHTPIDLVRDLPRGFAALEPLVDLPIGINITRFQTLLALHRSYLTPGKLESGWTTGAAAYYVGYLQQRTFLLSYNQNGTITDAVDCSLDPLSETKCTLKSLTVEKGIYQTSNFRVQPTISIVRFPNITNLCPFGEVFNASKFASVYAWNRKRISNCVADYSVLYNSTSFSTFKCYGVSPTKLNDLCFTNVYADSFVVKGDEVRQIAPGQTGVIADYNYKLPDDFTGCVIAWNSVKQDALTGDNYGYLYRLFRKSKLKPFERDISTEIYQAGSTPCNGQVGLNCYYPLERYGFHPTTGVNYQPFRVVVLSFELLNGPATVCGPKLSTTLVKDKCVNFNFNGLTGTGVLTTSKKQFLPFQQFGRDISDTTDAVRDPQTLEILDITPCSFGGVSVITPGTNTSNQVAVLYQDVNCTEVPMAIHAEQLTPAWRVYSAGANVFQTRAGCLVGAEHVNNSYECDIPVGAGICASYHSMSSFRSVNQRSIIAYTMSLGAENSVAYSNNSIAIPTNFTISVTTEILPVSMTKTSVDCTMYICGDSIECSNLLLQYGSFCTQLNRALTGIAVEQDKNTQEVFAQVKQIYKTPPIKDFGGFNFSQILPDPSKPSKRSFIEDLLFNKVTLADAGFIKQYGDCLGDIAARDLICAQKFNGLTVLPPLLTDEMIAQYTSALLAGTITSGWTFGAGAALQIPFAMQMAYRFNGIGVTQNVLYENQKLIANQFNSAIGKIQDSLSSTASALGKLQDVVNQNAQALNTLVKQLSSNCGAISSVLNDILSRLDKVEAEVQIDRLITCRLQSLQTYVTQQLIRAAEIRASANLAATKMSECVLGQSKRVDFCGKGYHLMSFPQSAPHGVVFLHVTYVPAQEKNFTTAPAICHEGKAHFPREGVFVSNGTHWFITQRNFYEPQIITTDNTFVSGSCDVVIGIVNNTVYDPLQPELDSGGGGSDIDPYKEFGSSYQLLNFLPLDFFPDLNALVDTATALYEEELTGREHCSPHHTAIRQALVCWDELTKLIAWMSSNITSEQVRTIIVNHVNDTWGLKVRQSLWFHLSCLTFGQHTVQEFLVSFGVWIRTPAPYRPPNAPILSTLPEHTVIC

SEQ ID NO: 11462 - protein, 1293 aa, Artificial Sequence
  SARS-CoV-2/pangolin/Guangxi/P1E/2017__EPI_ISL_410539 spike protein (1-1139)(F962C_G991C) WhcAg construct
MFVFLFVLPLVSSQCVNLTTRTGIQPGYTNSSTRGVYYPDKVFRSSILHLTQDLFLPFFSNVTWFNTINYQGGFKKFDNPVLPFNDGVYFASTEKSNIIRGWIFGTTLDARTQSLLIVNNATNVVIKVCEFQFCTDPFLGVYYHNNNKTWVENEFRVYSSANNCTFEYISQPFLMDLEGKQGNFKNLREFVFKNVDGYFKIYSKHTPIDLVRDLPRGFAALEPLVDLPIGINITRFQTLLALHRSYLTPGKLESGWTTGAAAYYVGYLQQRTFLLSYNQNGTITDAVDCSLDPLSETKCTLKSLTVEKGIYQTSNFRVQPTISIVRFPNITNLCPFGEVFNASKFASVYAWNRKRISNCVADYSVLYNSTSFSTFKCYGVSPTKLNDLCFTNVYADSFVVKGDEVRQIAPGQTGVIADYNYKLPDDFTGCVIAWNSVKQDALTGGNYLYRLFRKSKLKPFERDISTEIYQAGSTPCNGQVGLNCYYPLERYGFHPTTGVNYQPFRVVVLSFELLNGPATVCGPKLSTTLVKDKCVNFNFNGLTGTGVLTTSKKQFLPFQQFGRDISDTTDAVRDPQTLEILDITPCSFGGVSVITPGTNTSNQVAVLYQDVNCTEVPMAIHAEQLTPAWRVYSAGANVFQTRAGCLVGAEHVNNSYECDIPVGAGICASYHSMSSLRSVNQRSIIAYTMSLGAENSVAYSNNSIAIPTNFTISVTTEILPVSMTKTSVDCTMYICGDSIECSNLLLQYGSFCTQLNRALTGIAVEQDKNTQEVFAQVKQIYKTPPIKDFGGFNFSQILPDPSKPSKRSFIEDLLFNKVTLADAGFIKQYGDCLGDIAARDLICAQKFNGLTVLPPLLTDEMIAQYTSALLAGTITSGWTFGAGAALQIPFAMQMAYRFNGIGVTQNVLYENQKLIANQFNSAIGKIQDSLSSTASALGKLQDVVNQNAQALNTLVKQLSSNCGAISSVLNDILSRLDKVEAEVQIDRLITCRLQSLQTYVTQQLIRAAEIRASANLAATKMSECVLGQSKRVDFCGKGYHLMSFPQSAPHGVVFLHVTYVPAQEKNFTTAPAICHEGKAHFPREGVFVSNGTHWFITQRNFYEPQIITTDNTFVSGSCDVVIGIVNNTVYDPLQPELDSGGGGSDIDPYKEFGSSYQLLNFLPLDFFPDLNALVDTATALYEEELTGREHCSPHHTAIRQALVCWDELTKLIAWMSSNITSEQVRTIIVNHVNDTWGLKVRQSLWFHLSCLTFGQHTVQEFLVSFGVWIRTPAPYRPPNAPILSTLPEHTVIC

SEQ ID NO: 11463 - protein, 1301 aa, Artificial Sequence
  SARS-CoV-2/Wuhan/WIV05/2019__EPI_ISL_402128 spike protein (1-1147)(A972C_R995C) WhcAg construct
MFVFLVLLPLVSSQCVNLTTRTQLPPAYTNSFTRGVYYPDKVFRSSVLHSTQDLFLPFFSNVTWFHAIHVSGTNGTKRFDNPVLPFNDGVYFASTEKSNIIRGWIFGTTLDSKTQSLLIVNNATNVVIKVCEFQFCNDPFLGVYYHKNNKSWMESEFRVYSSANNCTFEYVSQPFLMDLEGKQGNFKNLREFVFKNIDGYFKIYSKHTPINLVRDLPQGFSALEPLVDLPIGINITRFQTLLALHRSYLTPGDSSSGWTAGAAAYYVGYLQPRTFLLKYNENGTITDAVDCALDPLSETKCTLKSFTVEKGIYQTSNFRVQPTESIVRFPNITNLCPFGEVFNATRFASVYAWNRKRISNCVADYSVLYNSASFSTFKCYGVSPTKLNDLCFTNVYADSFVIRGDEVRQIAPGQTGKIADYNYKLPDDFTGCVIAWNSNNLDSKVGGNYNYLYRLFRKSNLKPFERDISTEIYQAGSTPCNGVEGFNCYFPLQSYGFQPTNGVGYQPYRVVVLSFELLHAPATVCGPKKSTNLVKNKCVNFNFNGLTGTGVLTESNKKFLPFQQFGRDIADTTDAVRDPQTLEILDITPCSFGGVSVITPGTNTSNQVAVLYQDVNCTEVPVAIHADQLTPTWRVYSTGSNVFQTRAGCLIGAEHVNNSYECDIPIGAGICASYQTQTNSPRRARSVASQSIIAYTMSLGAENSVAYSNNSIAIPTNFTISVTTEILPVSMTKTSVDCTMYICGDSTECSNLLLQYGSFCTQLNRALTGIAVEQDKNTQEVFAQVKQIYKTPPIKDFGGFNFSQILPDPSKPSKRSFIEDLLFNKVTLADAGFIKQYGDCLGDIAARDLICAQKFNGLTVLPPLLTDEMIAQYTSALLAGTITSGWTFGAGAALQIPFAMQMAYRFNGIGVTQNVLYENQKLIANQFNSAIGKIQDSLSSTASALGKLQDVVNQNAQALNTLVKQLSSNFGCISSVLNDILSRLDKVEAEVQIDCLITGRLQSLQTYVTQQLIRAAEIRASANLAATKMSECVLGQSKRVDFCGKGYHLMSFPQSAPHGVVFLHVTYVPAQEKNFTTAPAICHDGKAHFPREGVFVSNGTHWFVTQRNFYEPQIITTDNTFVSGNCDVVIGIVNNTVYDPLQPELDSGGGGSDIDPYKEFGSSYQLLNFLPLDFFPDLNALVDTATALYEEELTGREHCSPHHTAIRQALVCWDELTKLIAWMSSNITSEQVRTIIVNHVNDTWGLKVRQSLWFHLSCLTFGQHTVQEFLVSFGVWIRTPAPYRPPNAPILSTLPEHTVIC

SEQ ID NO: 11464 - protein, 1297 aa, Artificial Sequence
  SARS-CoV-2/bat/Yunnan/RaTG13/2013__EPI_ISL_402131 spike protein (1-1143)(A968C_R991C) WhcAg construct
MFVFLVLLPLVSSQCVNLTTRTQLPPAYTNSSTRGVYYPDKVFRSSVLHLTQDLFLPFFSNVTWFHAIHVSGTNGIKRFDNPVLPFNDGVYFASTEKSNIIRGWIFGTTLDSKTQSLLIVNNATNVVIKVCEFQFCNDPFLGVYYHKNNKSWMESEFRVYSSANNCTFEYVSQPFLMDLEGKQGNFKNLREFVFKNIDGYFKIYSKHTPINLVRDLPPGFSALEPLVDLPIGINITRFQTLLALHRSYLTPGDSSSGWTAGAAAYYVGYLQPRTFLLKYNENGTITDAVDCALDPLSETKCTLKSFTVEKGIYQTSNFRVQPTDSIVRFPNITNLCPFGEVFNATTFASVYAWNRKRISNCVADYSVLYNSTSFSTFKCYGVSPTKLNDLCFTNVYADSFVITGDEVRQIAPGQTGKIADYNYKLPDDFTGCVIAWNSKHIDAKEGGNFNYLYRLFRKANLKPFERDISTEIYQAGSKPCNGQTGLNCYYPLYRYGFYPTDGVGHQPYRVVVLSFELLNAPATVCGPKKSTNLVKNKCVNFNFNGLTGTGVLTESNKKFLPFQQFGRDIADTTDAVRDPQTLEILDITPCSFGGVSVITPGTNASNQVAVLYQDVNCTEVPVAIHADQLTPTWRVYSTGSNVFQTRAGCLIGAEHVNNSYECDIPIGAGICASYQTQTNSRSVASQSIIAYTMSLGAENSVAYSNNSIAIPTNFTISVTTEILPVSMTKTSVDCTMYICGDSTECSNLLLQYGSFCTQLNRALTGIAVEQDKNTQEVFAQVKQIYKTPPIKDFGGFNFSQILPDPSKPSKRSFIEDLLFNKVTLADAGFIKQYGDCLGDIAARDLICAQKFNGLTVLPPLLTDEMIAQYTSALLAGTITSGWTFGAGAALQIPFAMQMAYRFNGIGVTQNVLYENQKLIANQFNSAIGKIQDSLSSTASALGKLQDVVNQNAQALNTLVKQLSSNFGCISSVLNDILSRLDKVEAEVQIDCLITGRLQSLQTYVTQQLIRAAEIRASANLAATKMSECVLGQSKRVDFCGKGYHLMSFPQSAPHGVVFLHVTYVPAQEKNFTTAPAICHDGKAHFPREGVFVSNGTHWFVTQRNFYEPQIITTDNTFVSGSCDVVIGIVNNTVYDPLQPELDSGGGGSDIDPYKEFGSSYQLLNFLPLDFFPDLNALVDTATALYEEELTGREHCSPHHTAIRQALVCWDELTKLIAWMSSNITSEQVRTIIVNHVNDTWGLKVRQSLWFHLSCLTFGQHTVQEFLVSFGVWIRTPAPYRPPNAPILSTLPEHTVIC

SEQ ID NO: 11465 - protein, 1301 aa, Artificial Sequence
  SARS-CoV-2/Wuhan/HBCDC-HB-01/2019__EPI_ISL_402132 spike protein (1-1147)(A972C_R995C) WhcAg construct
MFVFLVLLPLVSSQCVNLTTRTQLPPAYTNSITRGVYYPDKVFRSSVLHSTQDLFLPFFSNVTWFHAIHVSGTNGTKRFDNPVLPFNDGVYFASTEKSNIIRGWIFGTTLDSKTQSLLIVNNATNVVIKVCEFQFCNDPFLGVYYHKNNKSWMESEFRVYSSANNCTFEYVSQPFLMDLEGKQGNFKNLREFVFKNIDGYFKIYSKHTPINLVRDLPQGFSALEPLVDLPIGINITRFQTLLALHRSYLTPGDSSSGWTAGAAAYYVGYLQPRTFLLKYNENGTITDAVDCALDPLSETKCTLKSFTVEKGIYQTSNFRVQPTESIVRFPNITNLCPFGEVFNATRFASVYAWNRKRISNCVADYSVLYNSASFSTFKCYGVSPTKLNDLCFTNVYADSFVIRGDEVRQIAPGQTGKIADYNYKLPDDFTGCVIAWNSNNLDSKVGGNYNYLYRLFRKSNLKPFERDISTEIYQAGSTPCNGVEGFNCYFPLQSYGFQPTNGVGYQPYRVVVLSFELLHAPATVCGPKKSTNLVKNKCVNFNFNGLTGTGVLTESNKKFLPFQQFGRDIADTTDAVRDPQTLEILDITPCSFGGVSVITPGTNTSNQVAVLYQDVNCTEVPVAIHADQLTPTWRVYSTGSNVFQTRAGCLIGAEHVNNSYECDIPIGAGICASYQTQTNSPRRARSVASQSIIAYTMSLGAENSVAYSNNSIAIPTNFTISVTTEILPVSMTKTSVDCTMYICGDSTECSNLLLQYGSFCTQLNRALTGIAVEQDKNTQEVFAQVKQIYKTPPIKDFGGFNFSQILPDPSKPSKRSFIEDLLFNKVTLADAGFIKQYGDCLGDIAARDLICAQKFNGLTVLPPLLTDEMIAQYTSALLAGTITSGWTFGAGAALQIPFAMQMAYRFNGIGVTQNVLYENQKLIANQFNSAIGKIQDSLSSTASALGKLQDVVNQNAQALNTLVKQLSSNFGCISSVLNDILSRLDKVEAEVQIDCLITGRLQSLQTYVTQQLIRAAEIRASANLAATKMSECVLGQSKRVDFCGKGYHLMSFPQSAPHGVVFLHVTYVPAQEKNFTTAPAICHDGKAHFPREGVFVSNGTHWFVTQRNFYEPQIITTDNTFVSGNCDVVIGIVNNTVYDPLQPELDSGGGGSDIDPYKEFGSSYQLLNFLPLDFFPDLNALVDTATALYEEELTGREHCSPHHTAIRQALVCWDELTKLIAWMSSNITSEQVRTIIVNHVNDTWGLKVRQSLWFHLSCLTFGQHTVQEFLVSFGVWIRTPAPYRPPNAPILSTLPEHTVIC

SEQ ID NO: 11466 - protein, 1301 aa, Artificial Sequence
  SARS-CoV-2/Guangdong/20SF028/2020__EPI_ISL_403936 spike protein (1-1147)(A972C_R995C) WhcAg construct
MFVFLVLLPLVSSQCVNLTTRTQLPPAYTNSFTRGVYYPDKVFRSSVLYSTQDLFLPFFSNVTWFHAIHVSGTNGTKRFDNPVLPFNDGVYFASTEKSNIIRGWIFGTTLDSKTQSLLIVNNATNVVIKVCEFQFCNDPFLGVYYHKNNKSWMESEFRVYSSANNCTFEYVSQPFLMDLEGKQGNFKNLREFVFKNIDGYFKIYSKHTPINLVRDLPQGFSALEPLVDLPIGINITRFQTLLALHRSYLTPGDSSSGWTAGAAAYYVGYLQPRTFLLKYNENGTITDAVDCALDPLSETKCTLKSFTVEKGIYQTSNFRVQPTESIVRFPNITNLCPFGEVFNATRFASVYAWNRKRISNCVADYSVLYNSASFSTFKCYGVSPTKLNDLCFTNVYADSFVIRGDEVRQIAPGQTGKIADYNYKLPDDFTGCVIAWNSNNLDSKVGGNYNYLYRLFRKSNLKPFERDISTEIYQAGSTPCNGVEGFNCYFPLQSYGFQPTNGVGYQPYRVVVLSFELLHAPATVCGPKKSTNLVKNKCVNFNFNGLTGTGVLTESNKKFLPFQQFGRDIADTTDAVRDPQTLEILDITPCSFGGVSVITPGTNTSNQVAVLYQDVNCTEVPVAIHADQLTPTWRVYSTGSNVFQTRAGCLIGAEHVNNSYECDIPIGAGICASYQTQTNSPRRARSVASQSIIAYTMSLGAENSVAYSNNSIAIPTNFTISVTTEILPVSMTKTSVDCTMYICGDSTECSNLLLQYGSFCTQLNRALTGIAVEQDKNTQEVFAQVKQIYKTPPIKDFGGFNFSQILPDPSKPSKRSFIEDLLFNKVTLADAGFIKQYGDCLGDIAARDLICAQKFNGLTVLPPLLTDEMIAQYTSALLAGTITSGWTFGAGAALQIPFAMQMAYRFNGIGVTQNVLYENQKLIANQFNSAIGKIQDSLSSTASALGKLQDVVNQNAQALNTLVKQLSSNFGCISSVLNDILSRLDKVEAEVQIDCLITGRLQSLQTYVTQQLIRAAEIRASANLAATKMSECVLGQSKRVDFCGKGYHLMSFPQSAPHGVVFLHVTYVPAQEKNFTTAPAICHDGKAHFPREGVFVSNGTHWFVTQRNFYEPQIITTDNTFVSGNCDVVIGIVNNTVYDPLQPELDSGGGGSDIDPYKEFGSSYQLLNFLPLDFFPDLNALVDTATALYEEELTGREHCSPHHTAIRQALVCWDELTKLIAWMSSNITSEQVRTIIVNHVNDTWGLKVRQSLWFHLSCLTFGQHTVQEFLVSFGVWIRTPAPYRPPNAPILSTLPEHTVIC

SEQ ID NO: 11467 - protein, 1301 aa, Artificial Sequence
  SARS-CoV-2/Shenzhen/SZTH-001/2020__EPI_ISL_406592 spike protein (1-1147)(A972C_R995C) WhcAg construct
MFVFLVLLPLVSSQCVNLTTRTQLPPAYTNSFTRGVYYPDKVFRSSVLHSTQDLFLPFFSNVTWFHAIHVSGTNGTKRFDNPVLPFNDGVYFASTEKSNIIRGWIFGTTLDSKTQSLLIVNNATNVVIKVCEFQFCNDPFLGVYYHKNNKSWMESEFRVYSSANNCTFEYVSQPFLMDLEGKQGNFKNLREFVFKNIDGYFKIYSKHTPINLVRDLPQGFSALEPLVDLPIGINITRFQTLLALHRSYLTPGDSSSGWTAGAAAYYVGYLQPRTFLLKYNENGTITDAVDCALDPLSETKCTLKSFTVEKGIYQTSNFRVQPTESIVRFPNITNLCPFGEVFNATRFASVYAWNRKRISNCVADYSVLYNSASFSTFKCYGVSPTKLNDLCFTNVYADSFVIRGDEVRQIAPGQTGKIADYNYKLPDDFTGCVIAWNSNNLDSKVGGNYNYLYRLFRKSNLKPFERDISTEIYQAGSTPCNGVEGFNCYFPLQSYGFQPTNGVGYQPYRVVVLSFELLHAPATVCGPKKSTNLVKNKCVNFNFNGLTGTGVLTESNKKFLPFQQFGRDIADTTDAVRDPQTLEILDITPCSFGGVSVITPGTNTSNQVAVLYQDVNCTEVPVAIHADQLTPTWRVYSTGSNVFQTRAGCLIGAEHVNNSYECDIPIGAGICASYQTQTNSPRRARSVASQSIIAYTMSLGAENSVAYSNNSIAIPTNFTISVTTEILPVSMTKTSVDCTMYICGDSTECSNLLLQYGSFCTQLNRALTGIAVEQDKNTQEVFAQVKQIYKTPPIKDFGGFNFSQILPDPSKPSKRSFIEDLLFNKVTLADAGFIKQYGDCLGDIAARDLICAQKFNGLTVLPPLLTDEMIAQYTSALLAGTITSGWTFGAGAALQIPFAMQMAYRFNGIGVTQNVLYENQKLIANQFNSAIGKIQDSLSSTASALGKLQDVVNQNAQALNTLVKQLSSNFGCISSVLNDILSRLDKVEAEVQIDCLITGRLQSLQTYVTQQLIRAAEIRASANLAATKMSECVLGQSKRVDFCGKGYHLMSFPQSAPHGVVFLHVTYVPAQEKNFTTAPAICHDGKAHFPREGVFVSNGTHWFVTQRNFYEPQIITTDNTFVSGNCDVLIGIVNNTVYDPLQPELDSGGGGSDIDPYKEFGSSYQLLNFLPLDFFPDLNALVDTATALYEEELTGREHCSPHHTAIRQALVCWDELTKLIAWMSSNITSEQVRTIIVNHVNDTWGLKVRQSLWFHLSCLTFGQHTVQEFLVSFGVWIRTPAPYRPPNAPILSTLPEHTVIC

SEQ ID NO: 11468 - protein, 1301 aa, Artificial Sequence
  SARS-CoV-2/Shenzhen/SZTH-004/2020__EPI_ISL_406595 spike protein (1-1147)(A972C_R995C) WhcAg construct
MFVFLVLLPLVSSQCVNLTTRTQLPPAYTNSFTRGVYYPDKVFRSSVLHSTQDLFLPFFSNVTWFHAIHVSGTNGTKRFDNPVLPFNDGVYFASTEKSNIIRGWIFGTTLDSKTQSLLIVNNATNVVIKVCEFQFCNDPFLGVYYHKNNKSWMESEFRVYSSANNCTFEYVSQPFLMDLEGKQGNFKNLREFVFKNIDGYFKIYSKHTPINLVRDLPQGFSALEPLVDLPIGINITRFQTLLALHRSYLTPGDSSSGWTAGAAAYYVGYLQPRTFLLKYNENGTITDAVDCALDPLSETKCTLKSFTVEKGIYQTSNFRVQPTESIVRFPNITNLCPFGEVFNATRFASVYAWDRKRISNCVAYYSVLYNSASFSTFKCYGVSPTKLNDLCFTNVYADSFVIRGDEVRQIAPGQTGKIADYNYKLPDDFTGCVIAWNSNNLDSKVGGNYNYLYRLFRKSNLKPFERDISTEIYQAGSTPCNGVEGFNCYFPLQSYGFQPTNGVGYQPYRVVVLSFELLHAPATVCGPKKSTNLVKNKCVNFNFNGLTGTGVLTESNKKFLPFQQFGRDIADTTDAVRDPQTLEILDITPCSFGGVSVITPGTNTSNQVAVLYQDVNCTEVPVAIHADQLTPTWRVYSTGSNVFQTRAGCLIGAEHVNNSYECDIPIGAGICASYQTQTNSPRRARSVASQSIIAYTMSLGAENSVAYSNNSIAIPTNFTISVTTEILPVSMTKTSVDCTMYICGDSTECSNLLLQYGSFCTQLNRALTGIAVEQDKNTQEVFAQVKQIYKTPPIKDFGGFNFSQILPDPSKPSKRSFIEDLLFNKVTLADAGFIKQYGDCLGDIAARDLICAQKFNGLTVLPPLLTDEMIAQYTSALLAGTITSGWTFGAGAALQIPFAMQMAYRFNGIGVTQNVLYENQKLIANQFNSAIGKIQDSLSSTASALGKLQDVVNQNAQALNTLVKQLSSNFGCISSVLNDILSRLDKVEAEVQIDCLITGRLQSLQTYVTQQLIRAAEIRASANLAATKMSECVLGQSKRVDFCGKGYHLMSFPQSAPHGVVFLHVTYVPAQEKNFTTAPAICHDGKAHFPREGVFVSNGTHWFVTQRNFYEPQIITTDNTFVSGNCDVVIGIVNNTVYDPLQPELDSGGGGSDIDPYKEFGSSYQLLNFLPLDFFPDLNALVDTATALYEEELTGREHCSPHHTAIRQALVCWDELTKLIAWMSSNITSEQVRTIIVNHVNDTWGLKVRQSLWFHLSCLTFGQHTVQEFLVSFGVWIRTPAPYRPPNAPILSTLPEHTVIC

SEQ ID NO: 11469 - protein, 1301 aa, Artificial Sequence
  SARS-CoV-2/France/IDF0372/2020__EPI_ISL_406596 spike protein (1-1147)(A972C_R995C) WhcAg construct
MFVFLVLLPLVSSQCVNLTTRTQLPPAYTNSFTRGVYYPDKVFRSSVLHSTQDLFLPFFSNVTWFHAIHVSGTNGTKRFDNPVLPFNDGVYFASTEKSNIIRGWIFGTTLDSKTQSLLIVNNATNVVIKVCEFQFCNDPFLGVYYHKNNKSWMESEFRVYSSANNCTFEYVSQPFLMDLEGKQGNFKNLREFVFKNIDGYFKIYSKHTPINLVRDLPQGFSALEPLVDLPIGINITRFQTLLALHRSYLTPGDSSSGWTAGAAAYYVGYLQPRTFLLKYNENGTITDAVDCALDPLSETKCTLKSFTVEKGIYQTSNFRVQPTESIVRFPNITNLCPFGEVFNATRFASVYAWNRKRISNCVADYSFLYNSASFSTFKCYGVSPTKLNDLCFTNVYADSFVIRGDEVRQIAPGQTGKIADYNYKLPDDFTGCVIAWNSNNLDSKVGGNYNYLYRLFRKSNLKPFERDISTEIYQAGSTPCNGVEGFNCYFPLQSYGFQPTNGVGYQPYRVVVLSFELLHAPATVCGPKKSTNLVKNKCVNFNFNGLTGTGVLTESNKKFLPFQQFGRDIADTTDAVRDPQTLEILDITPCSFGGVSVITPGTNTSNQVAVLYQDVNCTEVPVAIHADQLTPTWRVYSTGSNVFQTRAGCLIGAEHVNNSYECDIPIGAGICASYQTQTNSPRRARSVASQSIIAYTMSLGAENSVAYSNNSIAIPTNFTISVTTEILPVSMTKTSVDCTMYICGDSTECSNLLLQYGSFCTQLNRALTGIAVEQDKNTQEVFAQVKQIYKTPPIKDFGGFNFSQILPDPSKPSKRSFIEDLLFNKVTLADAGFIKQYGDCLGDIAARDLICAQKFNGLTVLPPLLTDEMIAQYTSALLAGTITSGWTFGAGAALQIPFAMQMAYRFNGIGVTQNVLYENQKLIANQFNSAIGKIQDSLSSTASALGKLQDVVNQNAQALNTLVKQLSSNFGCISSVLNDILSRLDKVEAEVQIDCLITGRLQSLQTYVTQQLIRAAEIRASANLAATKMSECVLGQSKRVDFCGKGYHLMSFPQSAPHGVVFLHVTYVPAQEKNFTTAPAICHDGKAHFPREGVFVSNGTHWFVTQRNFYEPQIITTDNTFVSGNCDVVIGIVNNTVYDPLQPELDSGGGGSDIDPYKEFGSSYQLLNFLPLDFFPDLNALVDTATALYEEELTGREHCSPHHTAIRQALVCWDELTKLIAWMSSNITSEQVRTIIVNHVNDTWGLKVRQSLWFHLSCLTFGQHTVQEFLVSFGVWIRTPAPYRPPNAPILSTLPEHTVIC

SEQ ID NO: 11470 - protein, 1301 aa, Artificial Sequence
  SARS-CoV-2/Australia/VIC01/2020__EPI_ISL_406844 spike protein (1-1147)(A972C_R995C) WhcAg construct
MFVFLVLLPLVSSQCVNLTTRTQLPPAYTNSFTRGVYYPDKVFRSSVLHSTQDLFLPFFSNVTWFHAIHVSGTNGTKRFDNPVLPFNDGVYFASTEKSNIIRGWIFGTTLDSKTQSLLIVNNATNVVIKVCEFQFCNDPFLGVYYHKNNKSWMESEFRVYSSANNCTFEYVSQPFLMDLEGKQGNFKNLREFVFKNIDGYFKIYSKHTPINLVRDLPQGFSALEPLVDLPIGINITRFQTLLALHRRYLTPGDSSSGWTAGAAAYYVGYLQPRTFLLKYNENGTITDAVDCALDPLSETKCTLKSFTVEKGIYQTSNFRVQPTESIVRFPNITNLCPFGEVFNATRFASVYAWNRKRISNCVADYSVLYNSASFSTFKCYGVSPTKLNDLCFTNVYADSFVIRGDEVRQIAPGQTGKIADYNYKLPDDFTGCVIAWNSNNLDSKVGGNYNYLYRLFRKSNLKPFERDISTEIYQAGSTPCNGVEGFNCYFPLQSYGFQPTNGVGYQPYRVVVLSFELLHAPATVCGPKKSTNLVKNKCVNFNFNGLTGTGVLTESNKKFLPFQQFGRDIADTTDAVRDPQTLEILDITPCSFGGVSVITPGTNTSNQVAVLYQDVNCTEVPVAIHADQLTPTWRVYSTGSNVFQTRAGCLIGAEHVNNSYECDIPIGAGICASYQTQTNSPRRARSVASQSIIAYTMSLGAENSVAYSNNSIAIPTNFTISVTTEILPVSMTKTSVDCTMYICGDSTECSNLLLQYGSFCTQLNRALTGIAVEQDKNTQEVFAQVKQIYKTPPIKDFGGFNFSQILPDPSKPSKRSFIEDLLFNKVTLADAGFIKQYGDCLGDIAARDLICAQKFNGLTVLPPLLTDEMIAQYTSALLAGTITSGWTFGAGAALQIPFAMQMAYRFNGIGVTQNVLYENQKLIANQFNSAIGKIQDSLSSTASALGKLQDVVNQNAQALNTLVKQLSSNFGCISSVLNDILSRLDKVEAEVQIDCLITGRLQSLQTYVTQQLIRAAEIRASANLAATKMSECVLGQSKRVDFCGKGYHLMSFPQSAPHGVVFLHVTYVPAQEKNFTTAPAICHDGKAHFPREGVFVSNGTHWFVTQRNFYEPQIITTDNTFVSGNCDVVIGIVNNTVYDPLQPELDSGGGGSDIDPYKEFGSSYQLLNFLPLDFFPDLNALVDTATALYEEELTGREHCSPHHTAIRQALVCWDELTKLIAWMSSNITSEQVRTIIVNHVNDTWGLKVRQSLWFHLSCLTFGQHTVQEFLVSFGVWIRTPAPYRPPNAPILSTLPEHTVIC

SEQ ID NO: 11471 - protein, 1301 aa, Artificial Sequence
  SARS-CoV-2/Germany/BavPat1/2020__EPI_ISL_406862 spike protein (1-1147)(A972C_R995C) WhcAg construct
MFVFLVLLPLVSSQCVNLTTRTQLPPAYTNSFTRGVYYPDKVFRSSVLHSTQDLFLPFFSNVTWFHAIHVSGTNGTKRFDNPVLPFNDGVYFASTEKSNIIRGWIFGTTLDSKTQSLLIVNNATNVVIKVCEFQFCNDPFLGVYYHKNNKSWMESEFRVYSSANNCTFEYVSQPFLMDLEGKQGNFKNLREFVFKNIDGYFKIYSKHTPINLVRDLPQGFSALEPLVDLPIGINITRFQTLLALHRSYLTPGDSSSGWTAGAAAYYVGYLQPRTFLLKYNENGTITDAVDCALDPLSETKCTLKSFTVEKGIYQTSNFRVQPTESIVRFPNITNLCPFGEVFNATRFASVYAWNRKRISNCVADYSVLYNSASFSTFKCYGVSPTKLNDLCFTNVYADSFVIRGDEVRQIAPGQTGKIADYNYKLPDDFTGCVIAWNSNNLDSKVGGNYNYLYRLFRKSNLKPFERDISTEIYQAGSTPCNGVEGFNCYFPLQSYGFQPTNGVGYQPYRVVVLSFELLHAPATVCGPKKSTNLVKNKCVNFNFNGLTGTGVLTESNKKFLPFQQFGRDIADTTDAVRDPQTLEILDITPCSFGGVSVITPGTNTSNQVAVLYQGVNCTEVPVAIHADQLTPTWRVYSTGSNVFQTRAGCLIGAEHVNNSYECDIPIGAGICASYQTQTNSPRRARSVASQSIIAYTMSLGAENSVAYSNNSIAIPTNFTISVTTEILPVSMTKTSVDCTMYICGDSTECSNLLLQYGSFCTQLNRALTGIAVEQDKNTQEVFAQVKQIYKTPPIKDFGGFNFSQILPDPSKPSKRSFIEDLLFNKVTLADAGFIKQYGDCLGDIAARDLICAQKFNGLTVLPPLLTDEMIAQYTSALLAGTITSGWTFGAGAALQIPFAMQMAYRFNGIGVTQNVLYENQKLIANQFNSAIGKIQDSLSSTASALGKLQDVVNQNAQALNTLVKQLSSNFGCISSVLNDILSRLDKVEAEVQIDCLITGRLQSLQTYVTQQLIRAAEIRASANLAATKMSECVLGQSKRVDFCGKGYHLMSFPQSAPHGVVFLHVTYVPAQEKNFTTAPAICHDGKAHFPREGVFVSNGTHWFVTQRNFYEPQIITTDNTFVSGNCDVVIGIVNNTVYDPLQPELDSGGGGSDIDPYKEFGSSYQLLNFLPLDFFPDLNALVDTATALYEEELTGREHCSPHHTAIRQALVCWDELTKLIAWMSSNITSEQVRTIIVNHVNDTWGLKVRQSLWFHLSCLTFGQHTVQEFLVSFGVWIRTPAPYRPPNAPILSTLPEHTVIC

SEQ ID NO: 11472 - protein, 1301 aa, Artificial Sequence
  SARS-CoV-2/Wuhan/HBCDC-HB-02/2020__EPI_ISL_412978 spike protein (1-1147)(A972C_R995C) WhcAg construct
MFVFLVLLPLVSSQCVNLTTRTQLPPAYTNSFTRGVYYPDKVFRSSVLHSTQDLFLPFFSNVTWFHAIHVSGTNGTKRFDNPVLPFNDGVYFASTEKSNIIRGWIFGTTLDSKTQSLLIVNNATNVVIKVCEFQFCNDPFLGVYYHKNNKSWMESEFRVYSSANNCTFEYVSQPFLMDLEGKQGNFKNLREFVFKNIDGYFKIYSKHTPINLVRDLPQGFSALEPLVDLPIGINITRFQTLLALHRSYLTPGDSSSGWTAGAAAYYVGYLQPRTFLLKYNENGTITDAVDCALDPLSETKCTLKSFTVEKGIYQTSNFRVQPTESIVRFPNITNLCPFGEVFNATRFASVYAWNRKRISNCVADYSVLYNSASFSTFKCYGVSPTKLNDLCFTNVYADSFVIRGDEVRQIAPGQTGKIADYNYKLPDDFTGCVIAWNSNNLDSKVGGNYNYLYRLFRKSNLKPFERDISTEIYQAGSTPCNGVEGFNCYFPLQSYGFQPTNGVGYQPYRVVVLSFELLHAPATVCGPKKSTNLVKNKCVNFNFNGLTGTGVLTESNKKFLPFQQFGRDIADTTDAVRDPQTLEILDITPCSFGGVSVITPGTNTSNQVAVLYQDVNCTEVPVAIHADQLTPTWRVYSTGSNVFQTRAGCLIGAEHVNNSYECDIPIGAGICASYQTQTNSPRRARSVASQSIIAYTMSLGAENSVAYSNNSIAIPTNFTISVTTEILPVSMTKTSVDCTMYICGDSTECSNFLLQYGSFCTQLNRALTGIAVEQDKNTQEVFAQVKQIYKTPPIKDFGGFNFSQILPDPSKPSKRSFIEDLLFNKVTLADAGFIKQYGDCLGDIAARDLICAQKFNGLTVLPPLLTDEMIAQYTSALLAGTITSGWTFGAGAALQIPFAMQMAYRFNGIGVTQNVLYENQKLIANQFNSAIGKIQDSLSSTASALGKLQDVVNQNAQALNTLVKQLSSNFGCISSVLNDILSRLDKVEAEVQIDCLITGRLQSLQTYVTQQLIRAAEIRASANLAATKMSECVLGQSKRVDFCGKGYHLMSFPQSAPHGVVFLHVTYVPAQEKNFTTAPAICHDGKAHFPREGVFVSNGTHWFVTQRNFYEPQIITTDNTFVSGNCDVVIGIVNNTVYDPLQPELDSGGGGSDIDPYKEFGSSYQLLNFLPLDFFPDLNALVDTATALYEEELTGREHCSPHHTAIRQALVCWDELTKLIAWMSSNITSEQVRTIIVNHVNDTWGLKVRQSLWFHLSCLTFGQHTVQEFLVSFGVWIRTPAPYRPPNAPILSTLPEHTVIC

SEQ ID NO: 11473 - protein, 1301 aa, Artificial Sequence
  SARS-CoV-2/Australia/QLD02/2020__EPI_ISL_407896 spike protein (1-1147)(A972C_R995C) WhcAg construct
MFVFLVLLPLVSSQCVNLTTRTQLPPAYTNSFTRGVYYPDKVFRSSVLHSTQDLFLPFFSNVTWFHAIHVSGTNGTKRFDNPVLPFNDGVYFASTEKSNIIRGWIFGTTLDSKTQSLLIVNNATNVVIKVCEFQFCNDPFLGVYYHKNNKSWMESEFRVYSSANNCTFEYVSQPFLMDLEGKQGNFKNLREFVFKNIDGYFKIYSKHTPINLVRDLPQGFSALEPLVDLPIGINITRFQTLLALHRSYLTPGDSSSGWTAGAAAYYVGYLQPRTFLLKYNENGTITDAVDCALDPLSETKCTLKSFTVEKGIYQTSNFRVQPTESIVRFPNITNLCPFGEVFNATRFASVYAWNRKRISNCVADYSVLYNSASFSTFKCYGVSPTKLNDLCFTNVYADSFVIRGDEVRQIAPGQTGKIADYNYKLPDDFTGCVIAWNSNNLDSKVGGNYNYLYRLFRKSNLKPFERDISTEIYQAGSTPCNGVEGFNCYFPLQSYGFQPTNGVGYQPYRVVVLSFELLHAPATVCGPKKSTNLVKNKCVNFNFNGLTGTGVLTESNKKFLPFQQFGRDIADTTDAVRDPQTLEILDITPCSFGGVSVITPGTNTSNQVAVLYQDVNCTEVPVAIHADQLTPTWRVYSTGSNVFQTRAGCLIGAEHVNNSYECDIPIGAGICASYQTQTNSPRRARSVASQSIIAYTMSLGAENSVAYSNNSIAIPTNFTISVTTEILPVSMTKTSVDCTMYICGDSTECSNLLLQYGSFCTQLNRALTGIAVEQDKNTQEVFAQVKQIYKTPPIKDFGGFNFSQILPDPSKPSKRSFIEDLLFNKVTLADAGFIKQYGDCLGDIAARDLICAQKFNGLTVLPPLLTDEMIAQYTSALLAGTITSGWTFGAGAALQIPFAMQMAYRFNGIGVTQNVLYENQKLIANQFNSAIGKIQDSLSSTASALGKLQDVVNQNAQALNTLVKQLSSNFGCISSVLNDILSRLDKVEAEVQIDCLITGRLQSLQTYVTQQLIRAAEIRASANLAATKMSECVLGQSKRVDFCGKGYHLMSFPQSAPHGVVFLHVTYVPAQEKNFTTAPAICHDGKAHFPREGVFVSNGTHWFVTQRNFYEPQIITTDNTFVSGNCDVVIGIVNNTVYDPLQLELDSGGGGSDIDPYKEFGSSYQLLNFLPLDFFPDLNALVDTATALYEEELTGREHCSPHHTAIRQALVCWDELTKLIAWMSSNITSEQVRTIIVNHVNDTWGLKVRQSLWFHLSCLTFGQHTVQEFLVSFGVWIRTPAPYRPPNAPILSTLPEHTVIC

SEQ ID NO: 11474 - protein, 1301 aa, Artificial Sequence
  SARS-CoV-2/India/1-31/2020__EPI_ISL_413523 spike protein (1-1147)(A972C_R995C) WhcAg construct
MFVFLVLLPLVSSQCVNLTTRTQLPPAYTNSFTRGVYYPDKVFRSSVLHSTQDLFLPFFSNVTWFHAIHVSGTNGTKRFDNPVLPFNDGVYFASTEKSNIIRGWIFGTTLDSKTQSLLIVNNATNVVIKVCEFQFCNDPFLGVYYHKNNKSWMESEFRVYSSANNCTFEYVSQPFLMDLEGKQGNFKNLREFVFKNIDGYFKIYSKHTPINLVRDLPQGFSALEPLVDLPIGINITRFQTLLALHRSYLTPGDSSSGWTAGAAAYYVGYLQPRTFLLKYNENGTITDAVDCALDPLSETKCTLKSFTVEKGIYQTSNFRVQPTESIVRFPNITNLCPFGEVFNATRFASVYAWNRKRISNCVADYSVLYNSASFSTFKCYGVSPTKLNDLCFTNVYADSFVIRGDEVRQIAPGQTGKIADYNYKLPDDFTGCVIAWNSNNLDSKVGGNYNYLYRLFRKSNLKPFERDISTEIYQAGSTPCNGVEGFNCYFPLQSYGFQPTNGVGYQPYRVVVLSFELLHAPATVCGPKKSTNLVKNKCVNFNFNGLTGTGVLTESNKKFLPFQQFGRDIADTTDAVRDPQTLEILDITPCSFGGVSVITPGTNTSNQVAVLYQDVNCTEVPVAIHADQLTPTWRVYSTGSNVFQTRAGCLIGAEHVNNSYECDIPIGAGICASYQTQTNSPRRARSVASQSIIAYTMSLGAENSVAYSNNSIAIPTNFTISVTTEILPVSMTKTSVDCTMYICGDSTECSNLLLQYGSFCTQLNRALTGIAVEQDKNTQEVFAQVKQIYKTPPIKDFGGFNFSQILPDPSKPSKRSFIEDLLFNKVTLADAGFIKQYGDCLGDIAARDLICAQKFNGLTVLPPLLTDEMIAQYTSALLAGTITSGWTFGAGAALQIPFAMQMAYRFNGIGVTQNVLYENQKLIANQFNSVIGKIQDSLSSTASALGKLQDVVNQNAQALNTLVKQLSSNFGCISSVLNDILSRLDKVEAEVQIDCLITGRLQSLQTYVTQQLIRAAEIRASANLAATKMSECVLGQSKRVDFCGKGYHLMSFPQSAPHGVVFLHVTYVPAQEKNFTTAPAICHDGKAHFPREGVFVSNGTHWFVTQRNFYEPQIITTDNTFVSGNCDVVIGIVNNTVYDPLQPELDSGGGGSDIDPYKEFGSSYQLLNFLPLDFFPDLNALVDTATALYEEELTGREHCSPHHTAIRQALVCWDELTKLIAWMSSNITSEQVRTIIVNHVNDTWGLKVRQSLWFHLSCLTFGQHTVQEFLVSFGVWIRTPAPYRPPNAPILSTLPEHTVIC

SEQ ID NO: 11475 - protein, 1301 aa, Artificial Sequence
  SARS-CoV-2/Hong Kong/case42_VM20002493/2020__EPI_ISL_414527 spike protein (1-1147)(F970C_G999C) WhcAg construct
MFVFLVLLPLVSSQCVNLTTRTQLPPAYTNSFTRGVYYPDKVFRSSVLHSTQDLFLPFFSNVTWFHAIHVSGTNGTKRFDNPVLPFNDGVYFASTEKSNIIRGWIFGTTLDSKTQSLLIVNNATNVVIKVCEFQFCNDPFLGVYYHKNNKSWMESEFRVYSSANNCTFEYVSQPFLMDLEGKQGNFKNLREFVFKNIDGYFKIYSKHTPINLVRDLPQGFSALEPLVDLPIGINITRFQTLLALHRSYLTPGDSSSGWTAGAAAYYVGYLQPRTFLLKYNENGTITDAVDCALDPLSETKCTLKSFTVEKGIYQTSNFRVQPTESIVRFPNITNLCPFGEVFNATRFASVYAWNRKRISNCVADYSVLYNSASFSTFKCYGVSPTKLNDLCFTNVYADSFVIRGDEVREIAPGQTGKIADYNYKLPDDFTGCVIAWNSNNLDSKVGGNYNYLYRLFRKSNLKPFERDISTEIYQAGSTPCNGVEGFNCYFPLQSYGFQPTNGVGYQPYRVVVLSFELLHAPATVCGPKKSTNLVKNKCVNFNFNGLTGTGVLTESNKKFLPFQQFGRDIADTTDAVRDPQTLEILDITPCSFGGVSVITPGTNTSNQVAVLYQDVNCTEVPVAIHADQLTPTWRVYSTGSNVFQTRAGCLIGAEHVNNSYECDIPIGAGICASYQTQTNSPRRARSVASQSIIAYTMSLGAENSVAYSNNSIAIPTNFTISVTTEILPVSMTKTSVDCTMYICGDSTECSNLLLQYGSFCTQLNRALTGIAVEQDKNTQEVFAQVKQIYKTPPIKDFGGFNFSQILPDPSKPSKRSFIEDLLFNKVTLADAGFIKQYGDCLGDIAARDLICAQKFNGLTVLPPLLTDEMIAQYTSALLAGTITSGWTFGAGAALQIPFAMQMAYRFNGIGVTQNVLYENQKLIANQFNSAIGKIQDSLSSTASALGKLQDVVNQNAQALNTLVKQLSSNFGCISSVLNDILSRLDKVEAEVQIDCLITGRLQSLQTYVTQQLIRAAEIRASANLAATKMSECVLGQSKRVDFCGKGYHLMSFPQSAPHGVVFLHVTYVPAQEKNFTTAPAICHDGKAHFPREGVFVSNGTHWFVTQRNFYEPQIITTDNTFVSGNCDVVIGIVNNTVYDPLQPELDSGGGGSDIDPYKEFGSSYQLLNFLPLDFFPDLNALVDTATALYEEELTGREHCSPHHTAIRQALVCWDELTKLIAWMSSNITSEQVRTIIVNHVNDTWGLKVRQSLWFHLSCLTFGQHTVQEFLVSFGVWIRTPAPYRPPNAPILSTLPEHTVIC

SEQ ID NO: 11476 - protein, 1301 aa, Artificial Sequence
  SARS-CoV-2/Sweden/01/2020__EPI_ISL_411951 spike protein (1-1147)(A972C_R995C) WhcAg construct
MFVFLVLLPLVSSQCVNLTTRTQLPPAYTNSFTRGVYYPDKVFRSSVLHSTQDLFLPFFSNVTWFHAIHVSGTNGTKRFDNPVLPFNDGVYFASTEKSNIIRGWIFGTTLDSKTQSLLIVNNATNVVIKVCEFQFCNDPFLGVYYHKNNKSWMESEFRVYSSANNCTFEYVSQPFLMDLEGKQGNFKNLREFVFKNIDGYFKIYSKHTPINLVRDLPQGFSALEPLVDLPIGINITRFQTLLALHRSYLTPGDSSSGWTAGAAAYYVGYLQPRTFLLKYNENGTITDAVDCALDPLSETKCTLKSFTVEKGIYQTSNFRVQPTESIVRFPNITNLCPFGEVFNATRFASVYAWNRKRISNCVADYSVLYNSASFSTFKCYGVSPTKLNDLCFTNVYADSFVIRGDEVRQIAPGQTGKIADYNYKLPDDFTGCVIAWNSNNLDSKVGGNYNYLYRLFRKSNLKPFERDISTEIYQAGSTPCNGVEGFNCYFPLQSYGFQPTNGVGYQPYRVVVLSFELLHAPATVCGPKKSTNLVKNKCVNFNFNGLTGTGVLTESNKKFLPFQQFGRDIADTTDAVRDPQTLEILDITPCSFGGVSVITPGTNTSNQVAVLYQDVNCTEVPVAIHADQLTPTWRVYSTGSNVFQTRAGCLIGAEHVNNSYECDIPIGAGICASYQTQTNSPRRARSVASQSIIAYTMSLGAENSVAYSNNSIAIPTNFTISVTTEILPVSMTKTSVDCTMYICGDSTECSNLLLQYGSFCTQLNRALTGIAVEQDKNTQEVFAQVKQIYKTPPIKDCGGFNFSQILPDPSKPSKRSFIEDLLFNKVTLADAGFIKQYGDCLGDIAARDLICAQKFNGLTVLPPLLTDEMIAQYTSALLAGTITSGWTFGAGAALQIPFAMQMAYRFNGIGVTQNVLYENQKLIANQFNSAIGKIQDSLSSTASALGKLQDVVNQNAQALNTLVKQLSSNFGCISSVLNDILSRLDKVEAEVQIDCLITGRLQSLQTYVTQQLIRAAEIRASANLAATKMSECVLGQSKRVDFCGKGYHLMSFPQSAPHGVVFLHVTYVPAQEKNFTTAPAICHDGKAHFPREGVFVSNGTHWFVTQRNFYEPQIITTDNTFVSGNCDVVIGIVNNTVYDPLQPELDSGGGGSDIDPYKEFGSSYQLLNFLPLDFFPDLNALVDTATALYEEELTGREHCSPHHTAIRQALVCWDELTKLIAWMSSNITSEQVRTIIVNHVNDTWGLKVRQSLWFHLSCLTFGQHTVQEFLVSFGVWIRTPAPYRPPNAPILSTLPEHTVIC

SEQ ID NO: 11477 - protein, 1301 aa, Artificial Sequence
  SARS-CoV-2/Hong Kong/case85_VM20002868/2020__EPI_ISL_414519 spike protein (1-1147)(F970C_G999C) WhcAg construct
MFVFLVLLPLVSSQCVNLTTRTQLPPAYTNSFTRGVYYPDKVFRSSVLHSTQDLFLPFFSNVTWFHAIHVSGTNGTKRFDNPVLPFNDGVYFASTEKSNIIRGWIFGTTLDSKTQSLLIVNNATNVVIKVCEFQFCNDPFLGVYYHKNNKSWMESEFRVYSSANNCTFEYVSQPFLMDLEGKQGNFKNLREFVFKNIDGYFKIYSKHTPINLVRDLPQGFSALEPLVDLPIGINITRFQTLLALHRSYLTPGDSSSGWTAGAAAYYVGYLQPRTFLLKYNENGTITDAVDCALDPLSETKCTLKSFTVEKGIYQTSNFRVQPTESIVRFPNITNLCPFGEVFNATRFASVYAWNRKRISNCVADYSVLYNSASFSTFKCYGVSPTKLNDLCFTNVYADSFVIRGDEVRQIAPGQTGKIADYNYKLPDDFTGCVIAWNSNNLDSKVGGNYNYLYRLFRKSNLKPFERDISTEIYQAGSTPCNGVEGFNCYFPLQSYGFQPTNGVGYQPYRVVVLSFELLHAPATVCGPKKSTNLVKNKCVNFNFNGLTGTGVLTESNKKFLPFQQFGRDIADTTDAVRDPQTLEILDITPCSFGGVSVITPGTNTSNQVAVLYQDLNCTEVPVAIHADQLTPTWRVYSTGSNVFQTRAGCLIGAEHVNNSYECDIPIGAGICASYQTQTNSPRRARSVASQSIIAYTMSLGAENSVAYSNNSIAIPTNFTISVTTEILPVSMTKTSVDCTMYICGDSTECSNLLLQYGSFCTQLNRALTGIAVEQDKNTQEVFAQVKQIYKTPPIKDFGGFNFSQILPDPSKPSKRSFIEDLLFNKVTLADAGFIKQYGDCLGDIAARDLICAQKFNGLTVLPPLLTDEMIAQYTSALLAGTITSGWTFGAGAALQIPFAMQMAYRFNGIGVTQNVLYENQKLIANQFNSAIGKIQDSLSSTASALGKLQDVVNQNAQALNTLVKQLSSNFGCISSVLNDILSRLDKVEAEVQIDCLITGRLQSLQTYVTQQLIRAAEIRASANLAATKMSECVLGQSKRVDFCGKGYHLMSFPQSAPHGVVFLHVTYVPAQEKNFTTAPAICHDGKAHFPREGVFVSNGTHWFVTQRNFYEPQIITTDNTFVSGNCDVVIGIVNNTVYDPLQPELDSGGGGSDIDPYKEFGSSYQLLNFLPLDFFPDLNALVDTATALYEEELTGREHCSPHHTAIRQALVCWDELTKLIAWMSSNITSEQVRTIIVNHVNDTWGLKVRQSLWFHLSCLTFGQHTVQEFLVSFGVWIRTPAPYRPPNAPILSTLPEHTVIC

SEQ ID NO: 11478 - protein, 1301 aa, Artificial Sequence
  SARS-CoV-2/Hong Kong/case42_VM20002493/2020__EPI_ISL_414527 spike protein (1-1147)(A972C_R995C) WhcAg construct
MFVFLVLLPLVSSQCVNLTTRTQLPPAYTNSFTRGVYYPDKVFRSSVLHSTQDLFLPFFSNVTWFHAIHVSGTNGTKRFDNPVLPFNDGVYFASTEKSNIIRGWIFGTTLDSKTQSLLIVNNATNVVIKVCEFQFCNDPFLGVYYHKNNKSWMESEFRVYSSANNCTFEYVSQPFLMDLEGKQGNFKNLREFVFKNIDGYFKIYSKHTPINLVRDLPQGFSALEPLVDLPIGINITRFQTLLALHRSYLTPGDSSSGWTAGAAAYYVGYLQPRTFLLKYNENGTITDAVDCALDPLSETKCTLKSFTVEKGIYQTSNFRVQPTESIVRFPNITNLCPFGEVFNATRFASVYAWNRKRISNCVADYSVLYNSASFSTFKCYGVSPTKLNDLCFTNVYADSFVIRGDEVRQIAPGQTGKIADYNYKLPDDFTGCVIAWNSNNLDSKVGGNYNYLYRLFRKSNLKPFERDISTEIYQAGSTPCNGVEGFNCYFPLQSYGFQPTNGVGYQPYRVVVLSFELLHAPATVCGPKKSTNLVKNKCVNFNFNGLTGTGVLTESNKKFLPFQQFGRDIADTTDAVRDPQTLEILDITPCSFGGVSVITPGTNTSNQVAVLYQDVNCTEVPVAIHADQLTPTWRVYSTGSNVFQTRAGCLIGAEHVNNSYECDIPIGAGICASYQTQTNSPRRARSVASQSIIAYTMSLGAENSVAYSNNSIAIPTNFAISVTTEILPVSMTKTSVDCTMYICGDSTECSNLLLQYGSFCTQLNRALTGIAVEQDKNTQEVFAQVKQIYKTPPIKDFGGFNFSQILPDPSKPSKRSFIEDLLFNKVTLADAGFIKQYGDCLGDIAARDLICAQKFNGLTVLPPLLTDEMIAQYTSALLAGTITSGWTFGAGAALQIPFAMQMAYRFNGIGVTQNVLYENQKLIANQFNSAIGKIQDSLSSTASALGKLQDVVNQNAQALNTLVKQLSSNFGCISSVLNDILSRLDKVEAEVQIDCLITGRLQSLQTYVTQQLIRAAEIRASANLAATKMSECVLGQSKRVDFCGKGYHLMSFPQSAPHGVVFLHVTYVPAQEKNFTTAPAICHDGKAHFPREGVFVSNGTHWFVTQRNFYEPQIITTDNTFVSGNCDVVIGIVNNTVYDPLQPELDSGGGGSDIDPYKEFGSSYQLLNFLPLDFFPDLNALVDTATALYEEELTGREHCSPHHTAIRQALVCWDELTKLIAWMSSNITSEQVRTIIVNHVNDTWGLKVRQSLWFHLSCLTFGQHTVQEFLVSFGVWIRTPAPYRPPNAPILSTLPEHTVIC

SEQ ID NO: 11479 - protein, 1301 aa, Artificial Sequence
  SARS-CoV-2/Australia/NSW09/2020__EPI_ISL_413595 spike protein (1-1147)(F970C_G999C) WhcAg construct
MFVFLVLLPLVSSQCVNLTTRTQLPPAYTNSFTRGVYYPDKVFRSSVLHSTQDLFLPFFSNVTWFHAIHVSGTNGTKRFDNPVLPFNDGVYFASTEKSNIIRGWIFGTTLDSKTQSLLIVNNATNVVIKVCEFQFCNDPFLGVYYHKNNKSWMESEFRVYSSANNCTFEYVSQPFLMDLEVKQGNFKNLREFVFKNIDGYFKIYSKHTPINLVRDLPQGFSALEPLVDLPIGINITRFQTLLALHRSYLTPGDSSSGWTAGAAAYYVGYLQPRTFLLKYNENGTITDAVDCALDPLSETKCTLKSFTVEKGIYQTSNFRVQPTESIVRFPNITNLCPFGEVFNATRFASVYAWNRKRISNCVADYSVLYNSASFSTFKCYGVSPTKLNDLCFTNVYADSFVIRGDEVRQIAPGQTGKIADYNYKLPDDFTGCVIAWNSNNLDSKVGGNYNYLYRLFRKSNLKPFERDISTEIYQAGSTPCNGVEGFNCYFPLQSYGFQPTNGVGYQPYRVVVLSFELLHAPATVCGPKKSTNLVKNKCVNFNFNGLTGTGVLTESNKKFLPFQQFGRDIADTTDAVRDPQTLEILDITPCSFGGVSVITPGTNTSNQVAVLYQDVNCTEVPVAIHADQLTPTWRVYSTGSNVFQTRAGCLIGAEHVNNSYECDIPIGAGICASYQTQTNSPRRARSVASQSIIAYTMSLGAENSVAYSNNSIAIPTNFTISVTTEILPVSMTKTSVDCTMYICGDSTECSNLLLQYGSFCTQLNRALTGIAVEQDKNTQEVFAQVKQIYKTPPIKDFGGFNFSQILPDPSKPSKRSFIEDLLFNKVTLADAGFIKQYGDCLGDIAARDLICAQKFNGLTVLPPLLTDEMIAQYTSALLAGTITSGWTFGAGAALQIPFAMQMAYRFNGIGVTQNVLYENQKLIANQFNSAIGKIQDSLSSTASALGKLQDVVNQNAQALNTLVKQLSSNFGCISSVLNDILSRLDKVEAEVQIDCLITGRLQSLQTYVTQQLIRAAEIRASANLAATKMSECVLGQSKRVDFCGKGYHLMSFPQSAPHGVVFLHVTYVPAQEKNFTTAPAICHDGKAHFPREGVFVSNGTHWFVTQRNFYEPQIITTDNTFVSGNCDVVIGIVNNTVYDPLQPELDSGGGGSDIDPYKEFGSSYQLLNFLPLDFFPDLNALVDTATALYEEELTGREHCSPHHTAIRQALVCWDELTKLIAWMSSNITSEQVRTIIVNHVNDTWGLKVRQSLWFHLSCLTFGQHTVQEFLVSFGVWIRTPAPYRPPNAPILSTLPEHTVIC

SEQ ID NO: 11480 - protein, 1301 aa, Artificial Sequence
  SARS-CoV-2/Hong Kong/case85_VM20002868/2020__EPI_ISL_414519 spike protein (1-1147)(A972C_R995C) WhcAg construct
MFVFLVLVPLVSSQCVNLTTRTQLPPAYTNSFTRGVYYPDKVFRSSVLHSTQDLFLPFFSNVTWFHAIHVSGTNGTKRFDNPVLPFNDGVYFASTEKSNIIRGWIFGTTLDSKTQSLLIVNNATNVVIKVCEFQFCNDPFLGVYYHKNNKSWMESEFRVYSSANNCTFEYVSQPFLMDLEGKQGNFKNLREFVFKNIDGYFKIYSKHTPINLVRDLPQGFSALEPLVDLPIGINITRFQTLLALHRSYLTPGDSSSGWTAGAAAYYVGYLQPRTFLLKYNENGTITDAVDCALDPLSETKCTLKSFTVEKGIYQTSNFRVQPTESIVRFPNITNLCPFGEVFNATRFASVYAWNRKRISNCVADYSVLYNSASFSTFKCYGVSPTKLNDLCFTNVYADSFVIRGDEVRQIAPGQTGKIADYNYKLPDDFTGCVIAWNSNNLDSKVGGNYNYLYRLFRKSNLKPFERDISTEIYQAGSTPCNGVEGFNCYFPLQSYGFQPTNGVGYQPYRVVVLSFELLHAPATVCGPKKSTNLVKNKCVNFNFNGLTGTGVLTESNKKFLPFQQFGRDIADTTDAVRDPQTLEILDITPCSFGGVSVITPGTNTSNQVAVLYQDVNCTEVPVAIHADQLTPTWRVYSTGSNVFQTRAGCLIGAEHVNNSYECDIPIGAGICASYQTQTNSPRRARSVASQSIIAYTMSLGAENSVAYSNNSIAIPTNFTISVTTEILPVSMTKTSVDCTMYICGDSTECSNLLLQYGSFCTQLNRALTGIAVEQDKNTQEVFAQVKQIYKTPPIKDFGGFNFSQILPDPSKPSKRSFIEDLLFNKVTLADAGFIKQYGDCLGDIAARDLICAQKFNGLTVLPPLLTDEMIAQYTSALLAGTITSGWTFGAGAALQIPFAMQMAYRFNGIGVTQNVLYENQKLIANQFNSAIGKIQDSLSSTASALGKLQDVVNQNAQALNTLVKQLSSNFGCISSVLNDILSRLDKVEAEVQIDCLITGRLQSLQTYVTQQLIRAAEIRASANLAATKMSECVLGQSKRVDFCGKGYHLMSFPQSAPHGVVFLHVTYVPAQEKNFTTAPAICHDGKAHFPREGVFVSNGTHWFVTQRNFYEPQIITTDNTFVSGNCDVVIGIVNNTVYDPLQPELDSGGGGSDIDPYKEFGSSYQLLNFLPLDFFPDLNALVDTATALYEEELTGREHCSPHHTAIRQALVCWDELTKLIAWMSSNITSEQVRTIIVNHVNDTWGLKVRQSLWFHLSCLTFGQHTVQEFLVSFGVWIRTPAPYRPPNAPILSTLPEHTVIC

SEQ ID NO: 11481 - protein, 1301 aa, Artificial Sequence; identical to SEQ ID NO: 11471
  SARS-CoV-2/England/200990660/2020__EPI_ISL_414523 spike protein (1-1147)(A972C_R995C) WhcAg construct

SEQ ID NO: 11482 - protein, 1301 aa, Artificial Sequence
  SARS-CoV-2/Belgium/BA-02291/2020__EPI_ISL_415159 spike protein (1-1147)(F970C_G999C) WhcAg construct
MFVFLVLLPLVSSQCVNLTTRTQLPPAYTNSFTRGVYYPDKVFRSSVLHSTQDLFLPFFSNVTWFHAIHVSGTNGTKRFDNPVLPFNDGVYFASTEKSNIIRGWIFGTTLDSKTQSLLIVNNATNVVIKVCEFQFCNDPFLGVYYHKNNKSWMESEFRVYSSANNCTFEYVSQPFLMDLEGKQGNFKNLREFVFKNIDGYFKIYSKHTPINLVRDLPQGFSALEPLVDLPIGINITRFQTLLALHRSYLTPGDSSSGWTAGAAAYYVGYLQPRTFLLKYNENGTITDAVDCALDPLSETKCTLKSFTVEKGIYQTSNFRVQPTESIVRFPNITNLCPFGEVFNATRFASVYAWNRKRISNCVADYSVLYNSASFSTFKCYGVSPTKLNDLCFTNVYADSFVIRGDEVRQIAPGQTGKIADYNYKLPDDFTGCVIAWNSNNLDSKVGGNYNYLYRLFRKSNLKPFERDISTEIYQAGSTPCNGVEGFNCYFPLQSYGFQPTNGVGYQPYRVVVLSFELLHAPATVCGPKKSTNLVKNKCVNFNFNGLTGTGVLTESNKKFLPFQQFGRDIADTTDAVRDPQTLEILDITPCSFGGVSVITPGTNTSNQVAVLYQDVNCTEVPVAIHADQLTPTWRVYSTGSNVFQTRAGCLIGAEHVNNSYECDIPIGAGICASYQTQTNSPRRARSVASQSIIAYTMSLGAENSVAYSNNSIAIPTNFTISVTTEILPVSMTKTSVDCTMYICGDSTECSNLLLQYGSFCTQLNRALTGIAVEQDKNTQEVFAQVKQIYKTPPIKDFGGFNFSQILPDPSKPSKRSFIEDLLFNKVTLADAGFIKQYGDCLGDIAARDLICAQKFNGLTVLPPLLTDEMIAQYTSALLAGTITSGWTFGAGAALQIPFAMQMAYRFNGIGVTQNVLYENQKLIANQFNSAIGKIQDSLSFTASALGKLQDVVNQNAQALNTLVKQLSSNFGCISSVLNDILSRLDKVEAEVQIDCLITGRLQSLQTYVTQQLIRAAEIRASANLAATKMSECVLGQSKRVDFCGKGYHLMSFPQSAPHGVVFLHVTYVPAQEKNFTTAPAICHDGKAHFPREGVFVSNGTHWFVTQRNFYEPQIITTDNTFVSGNCDVVIGIVNNTVYDPLQPELDSGGGGSDIDPYKEFGSSYQLLNFLPLDFFPDLNALVDTATALYEEELTGREHCSPHHTAIRQALVCWDELTKLIAWMSSNITSEQVRTIIVNHVNDTWGLKVRQSLWFHLSCLTFGQHTVQEFLVSFGVWIRTPAPYRPPNAPILSTLPEHTVIC

SEQ ID NO: 11483 - protein, 1301 aa, Artificial Sequence; identical to SEQ ID NO: 11463
  SARS-CoV-2/USA/WA8-UW5/2020__EPI_ISL_413486 spike protein (1-1147)(F970C_G999C) WhcAg construct

SEQ ID NO: 11484 - protein, 1301 aa, Artificial Sequence
  SARS-CoV-2/Switzerland/1000477797/2020__EPI_ISL_413023 spike protein (1-1147)(A972C_R995C) WhcAg construct
MFVFLVLLPLVSSQCVNLTTRTQLPPAYTNSFTRGVYYPDKVFRSSVLHSTQDLFLPFFSNVTWFHAIHVSGTNGTKRFDNPVLPFNDGVYFASTEKSNIIRGWIFGTTLDSKTQSLLIVNNATNVVIKVCEFQFCNDPFLGVYYHKNNKSWMESEFRVYSSANNCTFEYVSQPFLMDLEGKQGNFKNLREFVFKNIDGYFNIYSKHTPINLVRDLPQGFSALEPLVDLPIGINITRFQTLLALHRSYLTPGDSSSGWTAGAAAYYVGYLQPRTFLLKYNENGTITDAVDCALDPLSETKCTLKSFTVEKGIYQTSNFRVQPTESIVRFPNITNLCPFGEVFNATRFASVYAWNRKRISNCVADYSVLYNSASFSTFKCYGVSPTKLNDLCFTNVYADSFVIRGDEVRQIAPGQTGKIADYNYKLPDDFTGCVIAWNSNNLDSKVGGNYNYLYRLFRKSNLKPFERDISTEIYQAGSTPCNGVEGFNCYFPLQSYGFQPTNGVGYQPYRVVVLSFELLHAPATVCGPKKSTNLVKNKCVNFNFNGLTGTGVLTESNKKFLPFQQFGRDIADTTDAVRDPQTLEILDITPCSFGGVSVITPGTNTSNQVAVLYQGVNCTEVPVAIHADQLTPTWRVYSTGSNVFQTRAGCLIGAEHVNNSYECDIPIGAGICASYQTQTNSPRRARSVASQSIIAYTMSLGAENSVAYSNNSIAIPTNFTISVTTEILPVSMTKTSVDCTMYICGDSTECSNLLLQYGSFCTQLNRALTGIAVEQDKNTQEVFAQVKQIYKTPPIKDFGGFNFSQILPDPSKPSKRSFIEDLLFNKVTLADAGFIKQYGDCLGDIAARDLICAQKFNGLTVLPPLLTDEMIAQYTSALLAGTITSGWTFGAGAALQIPFAMQMAYRFNGIGVTQNVLYENQKLIANQFNSAIGKIQDSLSSTASALGKLQDVVNQNAQALNTLVKQLSSNFGCISSVLNDILSRLDKVEAEVQIDCLITGRLQSLQTYVTQQLIRAAEIRASANLAATKMSECVLGQSKRVDFCGKGYHLMSFPQSAPHGVVFLHVTYVPAQEKNFTTAPAICHDGKAHFPREGVFVSNGTHWFVTQRNFYEPQIITTDNTFVSGNCDVVIGIVNNTVYDPLQPELDSGGGGSDIDPYKEFGSSYQLLNFLPLDFFPDLNALVDTATALYEEELTGREHCSPHHTAIRQALVCWDELTKLIAWMSSNITSEQVRTIIVNHVNDTWGLKVRQSLWFHLSCLTFGQHTVQEFLVSFGVWIRTPAPYRPPNAPILSTLPEHTVIC

SEQ ID NO: 11485 - protein, 1301 aa, Artificial Sequence
  SARS-CoV-2/Belgium/BA-02291/2020__EPI_ISL_415159 spike protein (1-1147)(A972C_R995C) WhcAg construct
MFVFLVLLPLVSSQCVNLTTRTQLPPAYTNSFTRGVYYPDKVFRSSVLHSTQDLFLPFFSNVTWFHAIHVSGTNGTKRFDNPVLPFNDGVYFASTEKSNIIRGWIFGTTLDSKTQSLLIVNNATNVVIKVCEFQFCNDPFLGVYYHKNNKSWMESEFRVYSSANNCTFEYVSQPFLMDLEGKQGNFKNLREFVFKNIDGYFKIYSKHTPINLVRDLPQGFSALEPLVDLPIGINITRFQTLLALHRSYLTPGDSSSGWTAGAAAYYVGYLQPRTFLLKYNENGTITDAVDCALDPLSETKCTLKSFTVEKGIYQTSNFRVQPTESIVRFPNITNLCPFGEVFNATRFASVYAWNRKRISNCVADYSVLYNSASFSTFKCYGVSPTKLNDLCFTNVYADSFVIRGDEVRQIAPGQTGKIADYNYKLPDDFTGCVIAWNSNNLDSKVGGNYNYLYRLFRRSNLKPFERDISTEIYQAGSTPCNGVEGFNCYFPLQSYGFQPTNGVGYQPYRVVVLSFELLPAPATVCGPKKSTNLVKNKCVNFNFNGLTGTGVLTESNKKFLPFQQFGRDIADTTDAVRDPQTLEILDITPCSFGGVSVITPGTNTSNQVAVLYQGVNCTEVPVAIHADQLTPTWRVYSTGSNVFQTRAGCLIGAEHVNNSYECDIPIGAGICASYQTQTNSPRRARSVASQSIIAYTMSLGAENSVAYSNNSIAIPTNFTISVTTEILPVSMTKTSVDCTMYICGDSTECSNLLLQYGSFCTQLNRALTGIAVEQDKNTQEVFAQVKQIYKTPPIKDFGGFNFSQILPDPSKPSKRSFIEDLLFNKVTLADAGFIKQYGDCLGDIAARDLICAQKFNGLTVLPPLLTDEMIAQYTSALLAGTITSGWTFGAGAALQIPFAMQMAYRFNGIGVTQNVLYENQKLIANQFNSAIGKIQDSLSSAAPALGKLQDVVNQNAQALNTLVKQLSSNFGCISSVLNDILSRLDKVEAEVQIDCLITGRLQSLQTYVTQQLIRAAEIRASANLAATKMSECVLGQSKRVDFCGKGYHLMSFPQSAPHGVVFLHVTYVPAQEKNFTTAPAICHDGKAHFPREGVFVSNGTHWFVTQRNFYEPQIITTDNTFVSGNCDVVIGIVNNTVYDPLQPELDSGGGGSDIDPYKEFGSSYQLLNFLPLDFFPDLNALVDTATALYEEELTGREHCSPHHTAIRQALVCWDELTKLIAWMSSNITSEQVRTIIVNHVNDTWGLKVRQSLWFHLSCLTFGQHTVQEFLVSFGVWIRTPAPYRPPNAPILSTLPEHTVIC

SEQ ID NO: 11486 - protein, 1301 aa, Artificial Sequence
  SARS-CoV-2/USA/WA8-UW5/2020__EPI_ISL_413486 spike protein (1-1147)(A972C_R995C) WhcAg construct
MFVFLVLLPLVSSQCVNLTTRTQLPPAYTNSFTRGVYYPDKVFRSSVLHSTQDLFLPFFSNVTWFHAIHVSGTNGTKRFDNPVLPFNDGVYFASTEKSNIIRGWIFGTTLDSKTQSLLIVNNATNVVIKVCEFQFCNDPFLGVYYHKNNKSWMESEFRVYSSANNCTFEYVSQPFLMDLEGKQGNFKNLREFVFKNIDGYFKIYSKHTPINLVRDLPQGFSALEPLVDLPIGINITRFQTLLALHRSYLTPGDSSSGWTAGAAAYYVGYLQPRTFLLKYNENGTITDAVDCALDPLSETKCTLKSFTVEKGIYQTSNFRVQPTESIVRFPNITNLCPFGEVFNATRFASVYAWNRKRISNCVADYSVLYNSASFSTFKCYGVSPTKLNDLCFTNVYADSFVIRGDEVRQIAPGQTGKIADYNYKLPDDFTGCVIAWNSNNLDSKVGGNYNYLYRLFRKSNLKPFERDISTEIYQAGSTPCNGVEGFNCYFPLQSYGFQPTNGVGYQPYRVVVLSFELLHAPATVCGPKKSTNLVKNKCVNFNFNGLTGTGVLTESNKKFLPFQQFGRDIADTTDAVRDPQTLEILDITPCSFGGVSVITPGTNTSNQVAVLYQDVNCTEVPVAIHADQLTPTWRVYSTGSNVFQTRAGCLIGAEYVNNSYECDIPIGAGICASYQTQTNSPRRARSVASQSIIAYTMSLGAENSVAYSNNSIAIPTNFTISVTTEILPVSMTKTSVDCTMYICGDSTECSNLLLQYGSFCTQLNRALTGIAVEQDKNTQEVFAQVKQIYKTPPIKDFGGFNFSQILPDPSKPSKRSFIEDLLFNKVTLADAGFIKQYGDCLGDIAARDLICAQKFNGLTVLPPLLTDEMIAQYTSALLAGTITSGWTFGAGAALQIPFAMQMAYRFNGIGVTQNVLYENQKLIANQFNSAIGKIQDSLSSTASALGKLQDVVNQNAQALNTLVKQLSSNFGCISSVLNDILSRLDKVEAEVQIDCLITGRLQSLQTYVTQQLIRAAEIRASANLAATKMSECVLGQSKRVDFCGKGYHLMSFPQSAPHGVVFLHVTYVPAQEKNFTTAPAICHDGKAHFPREGVFVSNGTHWFVTQRNFYEPQIITTDNTFVSGNCDVVIGIVNNTVYDPLQPELDSGGGGSDIDPYKEFGSSYQLLNFLPLDFFPDLNALVDTATALYEEELTGREHCSPHHTAIRQALVCWDELTKLIAWMSSNITSEQVRTIIVNHVNDTWGLKVRQSLWFHLSCLTFGQHTVQEFLVSFGVWIRTPAPYRPPNAPILSTLPEHTVIC

SEQ ID NO: 11487 - protein, 1301 aa, Artificial Sequence
  SARS-CoV-2/England/20102000506/2020__EPI_ISL_415147 spike protein (1-1147)(A972C_R995C) WhcAg construct
MFVFLVLLPLVSSQCVNLTTRTQLPPAYTNSFTRGVYYPDKVFRSSVLHSTQDLFLPFFSNVTWFHAIHVSGTNGTKRFDNPVLPFNDGVYFASTEKSNIIRGWIFGTTLDSKTQSLLIVNNATNVVIKVCEFQFCNDPFLGVYYHKNNKSWMESEFRVYSSANNCTFEYVSQPFLMDLEGKQGNFKNLREFVFKNIDGYFKIYSKHTPINLVRDLPQGFSALEPLVDLPIGINITRFQTLLALHRSYLTPGDSSSGWTAGAAAYYVGYLQPRTFLLKYNENGTITDAVDCALDPLSETKCTLKSFTVEKGIYQTSNFRVQPTESIVRFPNITNLCPFGEVFNATRFASVYAWNRKRISNCVADYSVLYNSASFSTFKCYGVSPTKLNDLCFTNVYADSFVIRGDEVRQIAPGQTGKIADYNYKLPDDFTGCVIAWNSNNLDSKVGGNYNYLYRLFRKSNLKPFERDISTEIYQAGSTPCNGVEGFNCYFPLQSYGFQPTNGVGYQPYRVVVLSFELLHAPATVCGPKKSTNLVKNKCVNFNFNGLTGTGVLTESNKKFLPFQQFGRDIADTTDAVRDPQTLEILDITPCSFGGVSVITPGTNTSNQVAVLYQGVNCTEVPVAIHADQLTPTWRVYSTGSNVFQTRAGCLIGAEHVNNSYECDIPIGAGICASYQTQTNSPRRARSVASQSIIAYTMSLGAENSVAYSNNSIAIPTNFTISVTTEILPVSMTKTSVDCTMYICGDSTECSNLLLQYGSFCTQLNRALTGIAVEQDKNTQEVFAQVKQIYKTPPIKDFGGFNFSQILPDPSKPSKRSFIEDLLFNKVTLADAGFIKQYGYCLGDIAARDLICAQKFNGLTVLPPLLTDEMIAQYTSALLAGTITSGWTFGAGAALQIPFAMQMAYRFNGIGVTQNVLYENQKLIANQFNSAIGKIQDSLSSTASALGKLQDVVNQNAQALNTLVKQLSSNFGCISSVLNDILSRLDKVEAEVQIDCLITGRLQSLQTYVTQQLIRAAEIRASANLAATKMSECVLGQSKRVDFCGKGYHLMSFPQSAPHGVVFLHVTYVPAQEKNFTTAPAICHDGKAHFPREGVFVSNGTHWFVTQRNFYEPQIITTDNTFVSGNCDVVIGIVNNTVYDPLQPELDSGGGGSDIDPYKEFGSSYQLLNFLPLDFFPDLNALVDTATALYEEELTGREHCSPHHTAIRQALVCWDELTKLIAWMSSNITSEQVRTIIVNHVNDTWGLKVRQSLWFHLSCLTFGQHTVQEFLVSFGVWIRTPAPYRPPNAPILSTLPEHTVIC

SEQ ID NO: 11488 - protein, 1301 aa, Artificial Sequence
  SARS-CoV-2/Belgium/VAG-03013/2020__EPI_ISL_415155 spike protein (1-1147)(A972C_R995C) WhcAg construct
MFVFLVLLPLVSSQCVNLTTRTQLPPAYTNSFTRGVYYPDKVFRSSVLHSTQDLFLPFFSNVTWFHAIHVSGTNGTKRFDNPVLPFNDGVYFASTEKSNIIRGWIFGTTLDSKTQSLLIVNNATNVVIKVCEFQFCNDPFLGVYYHKNNKSWMESEFRVYSSANNCTFEYVSQPFLMDLEGKQGNFKNLREFVFKNIDGYFKIYSKHTPINLVRDLPQGFSALEPLVDLPIGINITRFQTLLALHRSYLTPGDSSSGWTAGAAAYYVGYLQPRTFLLKYNENGTITDAVDCALDPLSETKCTLKSFTVEKGIYQTSNFRVQPTESIVRFPNITNLCPFGEVFNATRFASVYAWNRKRISNCVADYSVLYNSASFSTFKCYGVSPTKLNDLCFTNVYADSFVIRGDEVRQIAPGQTGKIADYNYKLPDDFTGCVIAWNSNNLDSKVGGNYNYLYRLFRKSNLKPFERDISTEIYQAGSTPCNGVEGFNCYFPLQSYGFQPTNGVGYQPYRVVVLSFELLHAPATVCGPKKSTNLVKNKCVNFNFNGLTGTGVLTESNKKFLPFQQFGRDIADTTDAVRDPQTLEILDITPCSFGGVSVITPGTNTSNQVAVLYQGVNCTEVPVAIHADQLTPTWRVYSTGSNVFQTRAGCLIGAEHVNNSYECDIPIGAGICASYQTQTNSPRRARSVASQSIIAYTMSLGAENSVAYSNNSIAIPTNFTISVTTEILPVSMTKTSVDCTMYICGDSTECSNLLLQYGSFCTQLNRALTGIAVEQDKNTQEVFAQVKQIYKTPPIKDFGGFNFSQILPDPSKPSKRSFIEDLLFNKVTLADAGFIKQYGDCLGDIAARDLICAQKFNGLTVLPPLLTDEMIAQYTSALLAGTITSGWTFGAGAALQIPFAMQMAYRFNGIGVTQNVLYENQKLIANQFNSAIGKIQDSLSSTATALGKLQDVVNQNAQALNTLVKQLSSNFGCISSVLNDILSRLDKVEAEVQIDCLITGRLQSLQTYVTQQLIRAAEIRASANLAATKMSECVLGQSKRVDFCGKGYHLMSFPQSAPHGVVFLHVTYVPAQEKNFTTAPAICHDGKAHFPREGVFVSNGTHWFVTQRNFYEPQIITTDNTFVSGNCDVVIGIVNNTVYDPLQPELDSGGGGSDIDPYKEFGSSYQLLNFLPLDFFPDLNALVDTATALYEEELTGREHCSPHHTAIRQALVCWDELTKLIAWMSSNITSEQVRTIIVNHVNDTWGLKVRQSLWFHLSCLTFGQHTVQEFLVSFGVWIRTPAPYRPPNAPILSTLPEHTVIC

SEQ ID NO: 11489 - protein, 1301 aa, Artificial Sequence
  SARS-CoV-2/Belgium/BC-03016/2020__EPI_ISL_415157 spike protein (1-1147)(A972C_R995C) WhcAg construct
MFVFLVLLPLVSSQCVNLTTRTQLPPAYTNSFTRGVYYPDKVFRSSVLHSTQDLFLPFFSNVTWFHAIHVSGTNGTKRFDNPVLPFNDGVYFASTEKSNIIRGWIFGTTLDSKTQSLLIVNNATNVVIKVCEFQFCNDPFLGVYYHKNNKSWMESEFRVYSSANNCTFEYVSQPFLMDLEGKQGNFKNLREFVFKNIDGYFKIYSKHTPINLVRDLPQGFSALEPLVDLPIGINITRFQTLLALHRSYLTPGDSSSGWTAGAAAYYVGYLQPRTFLLKYNENGTITDAVDCALDPLSETKCTLKSFTVEKGIYQTSNFRVQPTESIVRFPNITNLCPFGEVFNATRFASVYAWNRKRISNCVADYSVLYNSASFSTFKCYGVSPTKLNDLCFTNVYADSFVIRGDEVRQIAPGQTGKIADYNYKLPDDFTGCVIAWNSNNLDSKVGGNYNYLYRLFRKSNLKPFERDISTEIYQAGSTPCNGVEGFNCYFPLQSYGFQPTNGVGYQPYRVVVLSFELLHAPATVCGPKKSTNLVKNKCVNFNFNGLTGTGVLTESNKKFLPFQQFGRDIADTTDAVRDPQTLEILDITPCSFGGVSVITPGTNTSNQVAVLYQGVNCTEVPVAIHADQLTPTWRVYSTGSNVFQTRAGCLIGAEHVNNSYECDIPIGAGICASYQTQTNSPRRARSVASQSIIAYTMSLGAENSVAYSNNSIAIPTNFTISVTTEILPVSMTKTSVDCTMYICGDSTECSNLLLQYGSFCTQLNRALTGIAVEQDKNTQEVFAQVKQIYKTPPIKDFGGFNFSQILPDPSKPSKRSFIEDLLFNKVTLADAGFIKQYGDCLGDIAARDLICAQKFNGLTVLPPLLTDEMIAQYTSALLAGTITSGWTFGAGAALQIPFAMQMAYRFNGIGVTQNVLYENQKLIANQFNSAIGKIQDSLSSTAPALGKLQDVVNQNAQALNTLVKQLSSNFGCISSVLNDILSRLDKVEAEVQIDCLITGRLQSLQTYVTQQLIRAAEIRASANLAATKMSECVLGQSKRVDFCGKGYHLMSFPQSAPHGVVFLHVTYVPAQEKNFTTAPAICHDGKAHFPREGVFVSNGTHWFVTQRNFYEPQIITTDNTFVSGNCDVVIGIVNNTVYDPLQPELDSGGGGSDIDPYKEFGSSYQLLNFLPLDFFPDLNALVDTATALYEEELTGREHCSPHHTAIRQALVCWDELTKLIAWMSSNITSEQVRTIIVNHVNDTWGLKVRQSLWFHLSCLTFGQHTVQEFLVSFGVWIRTPAPYRPPNAPILSTLPEHTVIC

SEQ ID NO: 11490 - protein, 1301 aa, Artificial Sequence
  SARS-CoV-2/Germany/BavPat3/2020__EPI_ISL_414521 spike protein (1-1147)(A972C_R995C) WhcAg construct
MFVFLVLLPLVSSQCVNLTTRTQLPPAYTNSFTRGVYYPDKVFRSSVLHSTQDLFLPFFSNVTWFHAIHVSGTNGTKRFDNPVLPFNDGVYFASTEKSNIIRGWIFGTTLDSKTQSLLIVNNATNVVIKVCEFQFCNDPFLGVYYHKNNKSWMESEFRVYSSANNCTFEYVSQPFLMDLEGKQGNFKNLREFVFKNIDGYFKIYSKHTPINLVRDLPQGFSALEPLVDLPIGINITRFQTLLALHRSYLTPGDSSSGWTAGAAAYYVGYLQPRTFLLKYNENGTITDAVDCALDPLSETKCTLKSFTVEKGIYQTSNFRVQPTESIVRFPNITNLCPFGEVFNATRFASVYAWNRKRISNCVADYSVLYNSASFSTFKCYGVSPTKLNDLCFTNVYADSFVIRGDEVRQIAPGQTGKIADYNYKLPDDFTGCVIAWNSNNLDSKVGGNYNYLYRLFRKSNLKPFERDISTEIYQAGSTPCNGVEGFNCYFPLQSYGFQPTNGVGYQPYRVVVLSFELLHAPATVCGPKKSTNLVKNKCVNFNFNGLTGTGVLTESNKKFLPFQQFGRDIADTTDAVRDPQTLEILDITPCSFGGVSVITPGTNTSNQVAVLYQDVNCTEVPVAIHADQLTPTWRVYSTGSNVFQTRAGCLIGAEHVNNSYECDIPIGAGICASYQTQTNSPRRARSVASQSIIAYTMSLGAENSVAYSNNSIAIPTNFTISVTTEILPVSMTKTSVDCTMYICGDSTECSNLLLQYGSFCTQLNRALTGIAVEQDKNTQQVFAQVKQIYKTPPIKDFGGFNFSQILPDPSKPSKRSFIEDLLFNKVTLADAGFIKQYGDCLGDIAARDLICAQKFNGLTVLPPLLTDEMIAQYTSALLAGTITSGWTFGAGAALQIPFAMQMAYRFNGIGVTQNVLYENQKLIANQFNSAIGKIQDSLSSTASALGKLQDVVNQNAQALNTLVKQLSSNFGCISSVLNDILSRLDKVEAEVQIDCLITGRLQSLQTYVTQQLIRAAEIRASANLAATKMSECVLGQSKRVDFCGKGYHLMSFPQSAPHGVVFLHVTYVPAQEKNFTTAPAICHDGKAHFPREGVFVSNGTHWFVTQRNFYEPQIITTDNTFVSGNCDVVIGIVNNTVYDPLQPELDSGGGGSDIDPYKEFGSSYQLLNFLPLDFFPDLNALVDTATALYEEELTGREHCSPHHTAIRQALVCWDELTKLIAWMSSNITSEQVRTIIVNHVNDTWGLKVRQSLWFHLSCLTFGQHTVQEFLVSFGVWIRTPAPYRPPNAPILSTLPEHTVIC

SEQ ID NO: 11491 - protein, 1301 aa, Artificial Sequence
  SARS-CoV-2/France/HF1805/2020__EPI_ISL_414628 spike protein (1-1147)(A972C_R995C) WhcAg construct
MFVFLVLLPLVSSQCVNLTTRTQLPPAYTNSFTRGVYYPDKVFRSSVLHSTQDLFLPFFSNVTWFHAIHVSGTNGTKRFDNPVLPFNDGVYFASTEKSNIIRGWIFGTTLDSKTQSLLIVNNATNVVIKVCEFQFCNDPFLGVYYHKNNKSWMESEFRVYSSANNCTFEYVSQPFLMDLEGKQGNFKNLREFVFKNIDGYFKIYSKHTPINLVRDLPQGFSALEPLVDLPIGINITRFQTLLALHRSYLTPGDSSSGWTAGAAAYYVGYLQPRTFLLKYNENGTITDAVDCALDPLSETKCTLKSFTVEKGIYQTSNFRVQPTESIVRFPNITNLCPFGEVFNATRFASVYAWNRKRISNCVADYSVLYNSASFSTFKCYGVSPTKLNDLCFTNVYADSFVIRGDEVRQIAPGQTGKIADYNYKLPDDFTGCVIAWNSNNLDSKVGGNYNYLYRLFRKSNLKPFERDISTEIYQAGSTPCNGVEGFNCYFPLQSYGFQPTNGVGYQPYRVVVLSFELLHAPATVCGPKKSTNLVKNKCVNFNFNGLTGTGVLTESNKKFLPFQQFGRDIADTTDAVRDPQTLEILDITPCSFGGVSVITPGTNTSNQVAVLYQGVNCTEVPVAIHADQLTPTWRVYSTGSNVFQTRAGCLIGAEHVNNSYECDIPIGAGICASYQTQTNSPRRARSVASQSIIAYTMSLGAENSVAYSNNSIAIPTNFTISVTTEILPVSMTKTSVDCTMYICGDSTECSNLLLQYGSFCTQLNRALTGIAVEQDKNTQEVFAQVKQIYKTPPIKDFGGFNFSQILPDPSKPSKRSFIEDLLFNKVTLADAGFIKQYGDCLGDIAARDLICAQKFNGLTVLPPLLTDEMIAQYTSALLAGTITSGWTFGAGAALQIPFAMQMAYRFNGIGVTQNVLYENQKLIANQFNSAIGKIQDSLSSTASALGKLQDVVNQNAQALNTLVKQLSSNFGCISSVLNDILSRLDKVEAEVQIDCLITGRLQSLQTYVTQQLIRAAEIRASANLAATKMSECVLGQSKRVDFCGKGYHLMSFPQSAPHGVVFLHVTYVPAQEKNFTTAPAICHDGKAHFPREGVFVSNGTHWFVTQRNFYEPQIITTDNTFVSGNCDVVIGVVNNTVYDPLQPELDSGGGGSDIDPYKEFGSSYQLLNFLPLDFFPDLNALVDTATALYEEELTGREHCSPHHTAIRQALVCWDELTKLIAWMSSNITSEQVRTIIVNHVNDTWGLKVRQSLWFHLSCLTFGQHTVQEFLVSFGVWIRTPAPYRPPNAPILSTLPEHTVIC

SEQ ID NO: 11492 - protein, 1301 aa, Artificial Sequence
  SARS-CoV-2/Netherlands/ZuidHolland_9/2020__EPI_ISL_414445 spike protein (1-1147)(A972C_R995C) WhcAg construct
MFVFLVLLPLVSSQCVNLTTRTQLPPAYTNSFTRGVYYPDKVFRSSVLHSTQDLFLPFFSNVTWFHAIHVSGTNGTKRFDNPVLPFNDGVYFASTEKSNIIRGWIFGTTLDSKTQSLLIVNNATNVVIKVCEFQFCNDPFLGVYYHKNNKSWMESEFRVYSSANNCTFEYVSQPFLMDLEGKQGNFKNLREFVFKNIDGYFKIYSKHTPINLVRDLPQGFSALEPLVDLPIGINITRFQTLLALHRSYLTPGDSSSGWTAGAAAYYVGYLQPRTFLLKYNENGTITDAVDCALDPLSETKCTLKSFTVEKGIYQTSNFRVQPTESIVRFPNITNLCPFGEVFNATRFASVYAWNRKRISNCVADYSVLYNSASFSTFKCYGVSPTKLNDLCFTNVYADSFVIRGDEVRQIAPGQTGKIADYNYKLPDDFTGCVIAWNSNNLDSKVGGNYNYLYRLFRKSNLKPFERDISTEIYQAGSTPCNGVEGFNCYFPLQSYGFQPTNGVGYQPYRVVVLSFELLHAPATVCGPKKSTNLVKNKCVNFNFNGLTGTGVLTESNKKFLPFQQFGRDIADTTDAVRDPQTLEILDITPCSFGGVSVITPGTNTSNQVAVLYQGVNCTEVPVAIHADQLTPTWRVYSTGSNVFQTRAGCLIGAEHVNNSYECDIPIGAGICASYQTQTNSPRRARSVASQSIIAYTMSLGAENSVAYSNNSIAIPTNFTISVTTEILPVSMTKTSVDCTMYICGDSTECSNLLLQYGSFCTQLNRALTGIAVEQDKNTQEVFAQVKQIYKTPPIKDFGGFNFSQILPDPSKPSKRSFIEDLLFNKVTLADAGFIKQYGDCLGDIAARDLICVQKFNGLTVLPPLLTDEMIAQYTSALLAGTITSGWTFGAGAALQIPFAMQMAYRFNGIGVTQNVLYENQKLIANQFNSAIGKIQDSLSSTASALGKLQDVVNQNAQALNTLVKQLSSNFGCISSVLNDILSRLDKVEAEVQIDCLITGRLQSLQTYVTQQLIRAAEIRASANLAATKMSECVLGQSKRVDFCGKGYHLMSFPQSAPHGVVFLHVTYVPAQEKNFTTAPAICHDGKAHFPREGVFVSNGTHWFVTQRNFYEPQIITTDNTFVSGNCDVVIGIVNNTVYDPLQPELDSGGGGSDIDPYKEFGSSYQLLNFLPLDFFPDLNALVDTATALYEEELTGREHCSPHHTAIRQALVCWDELTKLIAWMSSNITSEQVRTIIVNHVNDTWGLKVRQSLWFHLSCLTFGQHTVQEFLVSFGVWIRTPAPYRPPNAPILSTLPEHTVIC

SEQ ID NO: 11493 - protein, 1301 aa, Artificial Sequence
  SARS-CoV-2/Finland/FIN03032020A/2020__EPI_ISL_413602 spike protein (1-1147)(A972C_R995C) WhcAg construct
MFVFLVLLPLVSSQCVNLTTRTQLPPAYTNSFTRGVYYPDKVFRSSVLHSTQDLFLPFFSNVTWFHAIHVSGTNGTKRFDNPVLPFNDGVYFASTEKSNIIRGWIFGTTLDSKTQSLLIVNNATNVVIKVCEFQFCNDPFLGVYYHKNNKSWMESEFRVYSSANNCTFEYVSQPFLMDLEGKQGNFKNLREFVFKNIDGYFKIYSKHTPINLVRDLPQGFSALEPLVDLPIGINITRFQTLLALHRSYLTPGDSSSGWTAGAAAYYVGYLQPRTFLLKYNENGTITDAVDCALDPLSETKCTLKSFTVEKGIYQTSNFRVQPTESIVRFPNITNLCPFGEVFNATRFASVYAWNRKRISNCVADYSVLYNSASFSTFKCYGVSPTKLNDLCFTNVYADSFVIRGDEVRQIAPGQTGKIADYNYKLPDDFTGCVISWNSNNLDSKVGGNYNYLYRLFRKSNLKPFERDISTEIYQAGSTPCNGVEGFNCYFPLQSYGFQPTNGVGYQPYRVVVLSFELLHAPATVCGPKKSTNLVKNKCVNFNFNGLTGTGVLTESNKKFLPFQQFGRDIADTTDAVRDPQTLEILDITPCSFGGVSVITPGTNTSNQVAVLYQGVNCTEVPVAIHADQLTPTWRVYSTGSNVFQTRAGCLIGAEHVNNSYECDIPIGAGICASYQTQTNSPRRARSVASQSIIAYTMSLGAENSVAYSNNSIAIPTNFTISVTTEILPVSMTKTSVDCTMYICGDSTECSNLLLQYGSFCTQLNRALTGIAVEQDKNTQEVFAQVKQIYKTPPIKDFGGFNFSQILPDPSKPSKRSFIEDLLFNKVTLADAGFIKQYGDCLGDIAARDLICAQKFNGLTVLPPLLTDEMIAQYTSALLAGTITSGWTFGAGAALQIPFAMQMAYRFNGIGVTQNVLYENQKLIANQFNSAIGKIQDSLSSTASALGKLQDVVNQNAQALNTLVKQLSSNFGCISSVLNDILSRLDKVEAEVQIDCLITGRLQSLQTYVTQQLIRAAEIRASANLAATKMSECVLGQSKRVDFCGKGYHLMSFPQSAPHGVVFLHVTYVPAQEKNFTTAPAICHDGKAHFPREGVFVSNGTHWFVTQRNFYEPQIITTDNTFVSGNCDVVIGIVNNTVYDPLQPELDSGGGGSDIDPYKEFGSSYQLLNFLPLDFFPDLNALVDTATALYEEELTGREHCSPHHTAIRQALVCWDELTKLIAWMSSNITSEQVRTIIVNHVNDTWGLKVRQSLWFHLSCLTFGQHTVQEFLVSFGVWIRTPAPYRPPNAPILSTLPEHTVIC

SEQ ID NO: 11494 - protein, 1301 aa, Artificial Sequence
  SARS-CoV-2/France/GE1977/2020__EPI_ISL_414632 spike protein (1-1147)(A972C_R995C) WhcAg construct
MFVFLVLLPLVSSQCVNLTTRTQLPPAYTNSFTRGVYYPDKVFRSSVLHSTQDLFLPFFSNVTWFHAIHVSGTNGTKRFDNPVLPFNDGVYFASTEKSNIIRGWIFGTTLDSKTQSLLIVNNATNVVIKVCEFQFCNDPFLGVYYHKNNKSWMESEFRVYSSANNCTFEYVSQPFLMDLEGKQGNFKNLREFVFKNIDGYFKIYSKHTPINLVRDLPQGFSALEPLVDLPIGINITRFQTLLALHRSYLTPGDSSSGWTAGAAAYYVGYLQPRTFLLKYNENGTITDAVDCALDPLSETKCTLKSFTVEKGIYQTSNFRVQPTESIVRFPNITNLCPFGEVFNATRFASVYAWNRKRISNCVADYSVLYNSASFSTFKCYGVSPTKLNDLCFTNVYADSFVIRGDEVRQIAPGQTGKIADYNYKLPDDFTGCVIAWNSNNLDSKVGGNYNYLYRLFRKSNLKPFERDISTEIYQAGSTPCNGVEGFNCYFPLQSYGFQPTNGVGYQPYRVVVLSFELLHAPATVCGPKKSTNLVKNKCVNFNFNGLTGTGVLTESNKKFLPFQQFGRDIADTTDAVRDPQTLEILDITPCSFGGVSVITPGTNTSNQVAVLYQGVNCTEVPVAIHADQLTPTWRVYSTGSNVFQTRAGCLIGAEHVNNSYECDIPIGAGICASYQTQTNSPRRARSVASQSIIAYTMSLGAENSVAYSNNSIAIPTNFTISVTTEILPVSMTKTSVDCTMYICGDSTECSNLLLQYGSFCTQLNRALTGIAVEQDKNTQEVFAQVKQIYKTPPIKDFGGFNFSQILPDPSKPSKRSFIEDLLFNKVTLADAGFIKQYGDCLGDIAARDLICAQKFNGLTVLPPLLTDEMIAQYTSALLAGTITSGWTFGAGAALQIPFAMQMAYRFNGIGVTQNVLYENQKLIANQFNSAIGKIQDSLFSTASALGKLQDVVNQNAQALNTLVKQLSSNFGCISSVLNDILSRLDKVEAEVQIDCLITGRLQSLQTYVTQQLIRAAEIRASANLAATKMSECVLGQSKRVDFCGKGYHLMSFPQSAPHGVVFLHVTYVPAQEKNFTTAPAICHDGKAHFPREGVFVSNGTHWFVTQRNFYEPQIITTDNTFVSGNCDVVIGIVNNTVYDPLQPELDSGGGGSDIDPYKEFGSSYQLLNFLPLDFFPDLNALVDTATALYEEELTGREHCSPHHTAIRQALVCWDELTKLIAWMSSNITSEQVRTIIVNHVNDTWGLKVRQSLWFHLSCLTFGQHTVQEFLVSFGVWIRTPAPYRPPNAPILSTLPEHTVIC

SEQ ID NO: 11495 - protein, 1301 aa, Artificial Sequence
  SARS-CoV-2/Finland/FIN-313/2020__EPI_ISL_414641 spike protein (1-1147)(A972C_R995C) WhcAg construct
MFVFLVLLPLVSSQCVNLTTRTQLPPAYTNSFTRGVYYPDKVFRSSVLHSTQDLFLPFFSNVTWFHAIHVSGTNGTKRFDNPVLPFNDGVYFASTEKSNIIRGWIFGTTLDSKTQSLLIVNNATNVVIKVCEFQFCNDPFLGVYYHKNNKSWMESEFRVYSSANNCTFEYVSQPFLMDLEGKQGNFKNLREFVFKNIDGYFKIYSKHTPINLVRDLPQGFSALEPLVDLPIGINITRFKTLLALHRSYLTPGDSSSGWTAGAAAYYVGYLQPRTFLLKYNENGTITDAVDCALDPLSETKCTLKSFTVEKGIYQTSNFRVQPTESIVRFPNITNLCPFGEVFNATRFASVYAWNRKRISNCVADYSVLYNSASFSTFKCYGVSPTKLNDLCFTNVYADSFVIRGDEVRQIAPGQTGKIADYNYKLPDDFTGCVIAWNSNNLDSKVGGNYNYLYRLFRKSNLKPFERDISTEIYQAGSTPCNGVEGFNCYFPLQSYGFQPTNGVGYQPYRVVVLSFELLHAPATVCGPKKSTNLVKNKCVNFNFNGLTGTGVLTESNKKFLPFQQFGRDIADTTDAVRDPQTLEILDITPCSFGGVSVITPGTNTSNQVAVLYQGVNCTEVPVAIHADQLTPTWRVYSTGSNVFQTRAGCLIGAEHVNNSYECDIPIGAGICASYQTQTNSPRRARSVASQSIIAYTMSLGAENSVAYSNNSIAIPTNFTISVTTEILPVSMTKTSVDCTMYICGDSTECSNLLLQYGSFCTQLNRALTGIAVEQDKNTQEVFAQVKQIYKTPPIKDFGGFNFSQILPDPSKPSKRSFIEDLLFNKVTLADAGFIKQYGDCLGDIAARDLICAQKFNGLTVLPPLLTDEMIAQYTSALLAGTITSGWTFGAGAALQIPFAMQMAYRFNGIGVTQNVLYENQKLIANQFNSAIGKIQDSLSSTASALGKLQDVVNQNAQALNTLVKQLSSNFGCISSVLNDILSRLDKVEAEVQIDCLITGRLQSLQTYVTQQLIRAAEIRASANLAATKMSECVLGQSKRVDFCGKGYHLMSFPQSAPHGVVFLHVTYVPAQEKNFTTAPAICHDGKAHFPREGVFVSNGTHWFVTQRNFYEPQIITTDNTFVSGNCDVVIGIVNNTVYDPLQPELDSGGGGSDIDPYKEFGSSYQLLNFLPLDFFPDLNALVDTATALYEEELTGREHCSPHHTAIRQALVCWDELTKLIAWMSSNITSEQVRTIIVNHVNDTWGLKVRQSLWFHLSCLTFGQHTVQEFLVSFGVWIRTPAPYRPPNAPILSTLPEHTVIC

SEQ ID NO: 11496 - protein, 1301 aa, Artificial Sequence
  SARS-CoV-2/Netherlands/ZuidHolland_2/2020__EPI_ISL_414556 spike protein (1-1147)(A972C_R995C) WhcAg construct
MFVFLVLLPLVSSQCVNLTTRTQLPPAYTNSFTRGVYYPDKVFRSSVLHSTQDLFLPFFSNVTWFHAIHVSGTNGTKRFDNPVLPFNDGVYFASTEKSNIIRGWIFGTTLDSKTQSLLIVNNATNVVIKVCEFQFCNDPFLGVYYHKNNKSWMESEFRVYSSANNCTFEYVSQPFLMDLEGKQGNFKNLREFVFKNIDGYFKIYSKHTPINLVRDLPQGFSALEPLVDLPIGINITRFQTLLALHRSYLTPGDSSSGWTAGAAAYYVGYLQPRTFLLKYNENGTITDAVDCALDPLSETKCTLKSFTVEKGIYQTSNFRVQPTESIVRFPNITNLCPFGEVFNATRFASVYAWNRKRISNCVADYSVLYNSASFSTFKCYGVSPTKLNDLCFTNVYADSFVIRGDEVRQIAPGQTGKIADYNYKLPDDFTGCVIAWNSNNLDSKVGGNYNYLYRLFRKSNLKPFERDISTEIYQAGSTPCNGVEGFNCYFPLQSYGFQPTNGVGYQPYRVVVLSFELLHAPATVCGPKKSTNLVKNKCVNFNFNGLTGTGVLTESNKKFLPFQQFGRDIADTTDAVRDPQTLEILDITPCSFGGVSVITPGTNTSNQVAVLYQGVNCTEVPVAIHADQLTPTWRVYSTGSNVFQTRAGCLIGAEHVNNSYECDIPIGAGICASYQTQTNSPRRARSVASQSIIAYTMSLGAENSVAYSNNSIAIPTNFTISVTTEILPVSMTKTSVDCTMYICGDSTECSNLLLQYGSFCTQLNRALTGIALEQDKNTQEVFAQVKQIYKTPPIKDFGGFNFSQILPDPSKPSKRSFIEDLLFNKVTLADAGFIKQYGDCLGDIAARDLICAQKFNGLTVLPPLLTDEMIAQYTSALLAGTITSGWTFGAGAALQIPFAMQMAYRFNGIGVTQNVLYENQKLIANQFNSAIGKIQDSLSSTASALGKLQDVVNQNAQALNTLVKQLSSNFGCISSVLNDILSRLDKVEAEVQIDCLITGRLQSLQTYVTQQLIRAAEIRASANLAATKMSECVLGQSKRVDFCGKGYHLMSFPQSAPHGVVFLHVTYVPAQEKNFTTAPAICHDGKAHFPREGVFVSNGTHWFVTQRNFYEPQIITTDNTFVSGNCDVVIGIVNNTVYDPLQPELDSGGGGSDIDPYKEFGSSYQLLNFLPLDFFPDLNALVDTATALYEEELTGREHCSPHHTAIRQALVCWDELTKLIAWMSSNITSEQVRTIIVNHVNDTWGLKVRQSLWFHLSCLTFGQHTVQEFLVSFGVWIRTPAPYRPPNAPILSTLPEHTVIC

SEQ ID NO: 11497 - protein, 1301 aa, Artificial Sequence
  SARS-CoV-2/USA/WA-UW31/2020__EPI_ISL_414618 spike protein (1-1147)(A972C_R995C) WhcAg construct
MFVFLVLLPLVSSQCVNLTTRTQLPPAYTNSFTRGVYYPDKVFRSSVLHSTQDLFLPFFSNVTWFHAIHVSGTNGTKRFDNPVLPFNDGVYFASTEKSNIIRGWIFGTTLDSKTQSLLIVNNATNVVIKVCEFQFCNDPFLGVYYHKNNKSWMESEFRVYSSANNCTFEYVSQPFLMDLEGKQGNFKNLREFVFKNIDGYFKIYSKHTPINLVRDLPQGFSALEPLVDLPIGINITRFQTLLALHRSYLTPGDSSSGWTAGAAAYYVGYLQPRTFLLKYNENGTITDAVDCALDPLSETKCTLKSFTVEKGIYQTSNFRVQPTESIVRFPNITNLCPFGEVFNATRFASVYAWNRKRISNCVADYSVLYNSASFSTFKCYGVSPTKLNDLCFTNVYADSFVIRGDEVRQIAPGQTGKIADYNYKLPDDFTGCVIAWNSNNLDSKVGGNYNYLYRLFRKSNLKPFERDISTEIYQAGSTPCNGAEGFNCYFPLQSYGFQPTNGVGYQPYRVVVLSFELLHAPATVCGPKKSTNLVKNKCVNFNFNGLTGTGVLTESNKKFLPFQQFGRDIADTTDAVRDPQTLEILDITPCSFGGVSVITPGTNTSNQVAVLYQDVNCTEVPVAIHADQLTPTWRVYSTGSNVFQTRAGCLIGAEHVNNSYECDIPIGAGICASYQTQTNSPRRARSVASQSIIAYTMSLGAENSVAYSNNSIAIPTNFTISVTTEILPVSMTKTSVDCTMYICGDSTECSNLLLQYGSFCTQLNRALTGIAVEQDKNTQEVFAQVKQIYKTPPIKDFGGFNFSQILPDPSKPSKRSFIEDLLFNKVTLADAGFIKQYGDCLGDIAARDLICAQKFNGLTVLPPLLTDEMIAQYTSALLAGTITSGWTFGAGAALQIPFAMQMAYRFNGIGVTQNVLYENQKLIANQFNSAIGKIQDSLSSTASALGKLQDVVNQNAQALNTLVKQLSSNFGCISSVLNDILSRLDKVEAEVQIDCLITGRLQSLQTYVTQQLIRAAEIRASANLAATKMSECVLGQSKRVDFCGKGYHLMSFPQSAPHGVVFLHVTYVPAQEKNFTTAPAICHDGKAHFPREGVFVSNGTHWFVTQRNFYEPQIITTDNTFVSGNCDVVIGIVNNTVYDPLQPELDSGGGGSDIDPYKEFGSSYQLLNFLPLDFFPDLNALVDTATALYEEELTGREHCSPHHTAIRQALVCWDELTKLIAWMSSNITSEQVRTIIVNHVNDTWGLKVRQSLWFHLSCLTFGQHTVQEFLVSFGVWIRTPAPYRPPNAPILSTLPEHTVIC

SEQ ID NO: 11498 - protein, 1301 aa, Artificial Sequence
  SARS-CoV-2/South Korea/SNU01/2020__EPI_ISL_411929 spike protein (1-1147)(A972C_R995C) WhcAg construct
MFVFLVLLPLVSSQCVNLTTRTQLPPAYTNSFTRGVYYPDKVFRSSVLHSTQDLFLPFFSNVTWFHAIHVSGTNGTKRFDNPVLPFNDGVYFASTEKSNIIRGWIFGTTLDSKTQSLLIVNNATNVVIKVCEFQFCNDPFLGVYYHKNNKSWMESEFRVYSSANNCTFEYVSQPFLMDLEGKQGNFKNLREFVFKNIDGYFKIYSKHTPINLVRDLPQGFWALEPLVDLPIGINITRFQTLLALHRSYLTPGDSSSGWTAGAAAYYVGYLQPRTFLLKYNENGTITDAVDCALDPLSETKCTLKSFTVEKGIYQTSNFRVQPTESIVRFPNITNLCPFGEVFNATRFASVYAWNRKRISNCVADYSVLYNSASFSTFKCYGVSPTKLNDLCFTNVYADSFVIRGDEVRQIAPGQTGKIADYNYKLPDDFTGCVIAWNSNNLDSKVGGNYNYLYRLFRKSNLKPFERDISTEIYQAGSTPCNGVEGFNCYFPLQSYGFQPTNGVGYQPYRVVVLSFELLHAPATVCGPKKSTNLVKNKCVNFNFNGLTGTGVLTESNKKFLPFQQFGRDIADTTDAVRDPQTLEILDITPCSFGGVSVITPGTNTSNQVAVLYQDVNCTEVPVAIHADQLTPTWRVYSTGSNVFQTRAGCLIGAEHVNNSYECDIPIGAGICASYQTQTNSPRRARSVASQSIIAYTMSLGAENSVAYSNNSIAIPTNFTISVTTEILPVSMTKTSVDCTMYICGDSTECSNLLLQYGSFCTQLNRALTGIAVEQDKNTQEVFAQVKQIYKTPPIKDFGGFNFSQILPDPSKPSKRSFIEDLLFNKVTLADAGFIKQYGDCLGDIAARDLICAQKFNGLTVLPPLLTDEMIAQYTSALLAGTITSGWTFGAGAALQIPFAMQMAYRFNGIGVTQNVLYENQKLIANQFNSAIGKIQDSLSSTASALGKLQDVVNQNAQALNTLVKQLSSNFGCISSVLNDILSRLDKVEAEVQIDCLITGRLQSLQTYVTQQLIRAAEIRASANLAATKMSECVLGQSKRVDFCGKGYHLMSFPQSAPHGVVFLHVTYVPAQEKNFTTAPAICHDGKAHFPREGVFVSNGTHWFVTQRNFYEPQIITTDNTFVSGNCDVVIGIVNNTVYDPLQPELDSGGGGSDIDPYKEFGSSYQLLNFLPLDFFPDLNALVDTATALYEEELTGREHCSPHHTAIRQALVCWDELTKLIAWMSSNITSEQVRTIIVNHVNDTWGLKVRQSLWFHLSCLTFGQHTVQEFLVSFGVWIRTPAPYRPPNAPILSTLPEHTVIC

SEQ ID NO: 11499 - protein, 1301 aa, Artificial Sequence
  SARS-CoV-2/China/WF0004/2020__EPI_ISL_413694 spike protein (1-1147)(A972C_R995C) WhcAg construct
MFVFLVLLPLVSSQCVNLTTRTQLPPAYTNSFTRGVYYPDKVFRSSVLHSTQDLFLPFFSNVTWFHAIHVSGTNGTKRFDNPVLPFNDGVYFASTEKSNIIRGWIFGTTLDSKTQSLLIVNNATNVVIKVCEFQFCNDPFLGVYYHKNNKSWTESEFRVYSSANNCTFEYVSQPFLMDLEGKQGNFKNLREFVFKNIDGYFKIYSKHTPINLVRDLPQGFSALEPLVDLPIGINITRFQTLLALHRSYLTPGDSSSGWTAGAAAYYVGYLQPRTFLLKYNENGTITDAVDCALDPLSETKCTLKSFTVEKGIYQTSNFRVQPTESIVRFPNITNLCPFGEVFNATRFASVYAWNRKRISNCVADYSVLYNSASFSTFKCYGVSPTKLNDLCFTNVYADSFVIRGDEVRQIAPGQTGKIADYNYKLPDDFTGCVIAWNSNNLDSKVGGNYNYLYRLFRKSNLKPFERDISTEIYQAGSTPCNGVEGFNCYFPLQSYGFQPTNGVGYQPYRVVVLSFELLHAPATVCGPKKSTNLVKNKCVNFNFNGLTGTGVLTESNKKFLPFQQFGRDIADTTDAVRDPQTLEILDITPCSFGGVSVITPGTNTSNQVAVLYQDVNCTEVPVAIHADQLTPTWRVYSTGSNVFQTRAGCLIGAEHVNNSYECDIPIGAGICASYQTQTNSPRRARSVASQSIIAYTMSLGAENSVAYSNNSIAIPTNFTISVTTEILPVSMTKTSVDCTMYICGDSTECSNLLLQYGSFCTQLNRALTGIAVEQDKNTQEVFAQVKQIYKTPPIKDFGGFNFSQILPDPSKPSKRSFIEDLLFNKVTLADAGFIKQYGDCLGDIAARDLICAQKFNGLTVLPPLLTDEMIAQYTSALLAGTITSGWTFGAGAALQIPFAMQMAYRFNGIGVTQNVLYENQKLIANQFNSAIGKIQDSLSSTASALGKLQDVVNQNAQALNTLVKQLSSNFGCISSVLNDILSRLDKVEAEVQIDCLITGRLQSLQTYVTQQLIRAAEIRASANLAATKMSECVLGQSKRFDFCGKGYHLMSFPQSAPHGVVFLHVTYVPAQEKNFTTAPAICHDGKAHFPREGVFVSNGTHWFVTQRNFYEPQIITTDNTFVSGNCDVVIGIVNNTVYDPLQPELDSGGGGSDIDPYKEFGSSYQLLNFLPLDFFPDLNALVDTATALYEEELTGREHCSPHHTAIRQALVCWDELTKLIAWMSSNITSEQVRTIIVNHVNDTWGLKVRQSLWFHLSCLTFGQHTVQEFLVSFGVWIRTPAPYRPPNAPILSTLPEHTVIC

SEQ ID NO: 11500 - protein, 1301 aa, Artificial Sequence
  SARS-CoV-2/China/WF0028/2020__EPI_ISL_413791 spike protein (1-1147)(A972C_R995C) WhcAg construct
MFVFLVLLPLVSSQCVNLTTRTQLPPAYTNSFTRGVYYPDKVFRSSVLHSTQDLFLPFFSNVTWFHAIHVSGTNGTKRFDNPVLPFNDGVYFASTEKSNIIRGWIFGTTLDSKTQSLLIVNNATNVVIKVCEFQFCNDPFLGVYYHKNNKSWMESEFRVYSSANNCTFEYVSQPFLMDLEGKQGNFKNLREFVFKNIDGYFKIYSKHTPINLVRDLPQGFSALEPLVDLPIGINITRFQTLLALHRSYLTPGDSSSGWTAGAAAYYVGYLQPRTFLLKYNENGTITDAVDCALDPLSETKCTLKSFTVEKGIYQTSNFRVQPTESIVRFPNITNLCPFGEVFNATRFASVYAWNRKRISNCVADYSVLYNSASFSTFKCYGVSPTKLNDLCFTNVYADSFVIRGDEVRQIAPGQTGKIADYNYKLPDDFTGCVIAWNSNNLDSKVGGNYNYLYRLFRKSNLKPFERDISTEIYQAGSTPCNGVEGFNCYFPLQSYGFQPTNGVGYQPYRVVVLSFELLHAPATVCGPKKSTNLVKNKCVNFNFNGLTGTGVLTESNKKFLPFQQFGRDIADTTDAVRDPQTLEILDITPCSFGGVSVITPGTNTSNQVAVLYQDVNCTEVPVAIHADQLTPTWRVYSTGSNVFQTRAGCLIGAEHVNNSYECDIPIGAGICASYQTQTNSPRRARSVASQSIIAYTMSLGAENSVAYSNNSIAIPTNFTISVTTEILPVSMTKTSVDCTMYICGDSTECSNLLLQYGSFCTQLNRALTGIAVEQDKNTQEVFAQVKQIYKTPPIKDFGGFNFSQILPDPSKPSKRSFIEDLLFNKVTLADAGFIKQYGDCLGDIAARDLICAQKFNGLTVLPPLLTDEMIAQYTSALLAGTITSGWTFGAGAALQIPFAMQMAYRFNGIGVTQNVLYENQKLIANQFNSAIGKIQDSLSSTASALGKLQDVVNQNAQALNTLVKQLSSNFGCISSVLNDILSRLDKVEAEVQIDCLITGRLQSLQTYVTQQLIRAAEIRASANLAATKMSECVLGQSKRVDFCGKGYHLMSFPQSAPHGVVFLHVTYVPAQEKNFTTAPAICHDGKAHFPREGVFVSNGTHWFVTQRNFYEPQIITTDNTFVSGNCDVVIGIVNNTVYDPLQPELESGGGGSDIDPYKEFGSSYQLLNFLPLDFFPDLNALVDTATALYEEELTGREHCSPHHTAIRQALVCWDELTKLIAWMSSNITSEQVRTIIVNHVNDTWGLKVRQSLWFHLSCLTFGQHTVQEFLVSFGVWIRTPAPYRPPNAPILSTLPEHTVIC

SEQ ID NO: 11501 - protein, 1301 aa, Artificial Sequence
  SARS-CoV-2/2019-nCoV/USA-CruiseA-18/2020__MT159716.1 spike protein (1-1147)(A972C_R995C) WhcAg construct
MFVFLVLLPLVSSQCVNLTTRTQLPPAYTNSFTRGVYYPDKVFRSSVLHSTQDLFLPFFSNVTWFHAIHVSGTNGTKRFDNPVLPFNDGVYFASTEKSNIIRGWIFGTTLDSKTQSLLIVNNATNVVIKVCEFQFCNDPFLGVYYHKNNKSWMESELRVYSSANNCTFEYVSQPFLMDLEGKQGNFKNLREFVFKNIDGYFKIYSKHTPINLVRDLPQGFSALEPLVDLPIGINITRFQTLLALHRSYLTPGDSSSGWTAGAAAYYVGYLQPRTFLLKYNENGTITDAVDCALDPLSETKCTLKSFTVEKGIYQTSNFRVQPTESIVRFPNITNLCPFGEVFNATRFASVYAWNRKRISNCVADYSVLYNSASFSTFKCYGVSPTKLNDLCFTNVYADSFVIRGDEVRQIAPGQTGKIADYNYKLPDDFTGCVIAWNSNNLDSKVGGNYNYLYRLFRKSNLKPFERDISTEIYQAGSTPCNGVEGFNCYFPLQSYGFQPTNGVGYQPYRVVVLSFELLHAPATVCGPKKSTNLVKNKCVNFNFNGLTGTGVLTESNKKFLPFQQFGRDIADTTDAVRDPQTLEILDITPCSFGGVSVITPGTNTSNQVAVLYQDVNCTEVPVAIHADQLTPTWRVYSTGSNVFQTRAGCLIGAEHVNNSYECDIPIGAGICASYQTQTNSPRRARSVASQSIIAYTMSLGAENSVAYSNNSIAIPTNFTISVTTEILPVSMTKTSVDCTMYICGDSTECSNLLLQYGSFCTQLNRALTGIAVEQDKNTQEVFAQVKQIYKTPPIKDFGGFNFSQILPDPSKPSKRSFIEDLLFNKVTLADAGFIKQYGDCLGDIAARDLICAQKFNGLTVLPPLLTDEMIAQYTSALLAGTITSGWTFGAGAALQIPFAMQMAYRFNGIGVTQNVLYENQKLIANQFNSAIGKIQDSLSSTASALGKLQDVVNQNAQALNTLVKQLSSNFGCISSVLNDILSRLDKVEAEVQIDCLITGRLQSLQTYVTQQLIRAAEIRASANLAATKMSECVLGQSKRVDFCGKGYHLMSFPQSAPHGVVFLHVTYVPAQEKNFTTAPAICHDGKAHFPREGVFVSNGTHWFVTQRNFYEPQIITTDNTFVSGNCDVVIGIVNNTVYDPLQPELDSGGGGSDIDPYKEFGSSYQLLNFLPLDFFPDLNALVDTATALYEEELTGREHCSPHHTAIRQALVCWDELTKLIAWMSSNITSEQVRTIIVNHVNDTWGLKVRQSLWFHLSCLTFGQHTVQEFLVSFGVWIRTPAPYRPPNAPILSTLPEHTVIC

SEQ ID NO: 11502 - protein, 1301 aa, Artificial Sequence
  SARS-CoV-2/SARS-CoV-2/Yunnan-01/human/2020/CHN__MT049951.1 spike protein (1-1147)(A972C_R995C) WhcAg construct
MFVFLVLLPLVSSQCVNLTTRTQLPPANTNSFTRGVYYPDKVFRSSVLHSTQDLFLPFFSNVTWFHAIHVSGTNGTKRFDNPVLPFNDGVYFASTEKSNIIRGWIFGTTLDSKTQSLLIVNNATNVVIKVCEFQFCNDPFLGVYYHKNNKSWMESEFRVYSSANNCTFEYVSQPFLMDLEGKQGNFKNLREFVFKNIDGYFKIYSKHTPINLVRDLPQGFSALEPLVDLPIGINITRFQTLLALHRSYLTPGDSSSGWTAGAAAYYVGYLQPRTFLLKYNENGTITDAVDCALDPLSETKCTLKSFTVEKGIYQTSNFRVQPTESIVRFPNITNLCPFGEVFNATRFASVYAWNRKRISNCVADYSVLYNSASFSTFKCYGVSPTKLNDLCFTNVYADSFVIRGDEVRQIAPGQTGKIADYNYKLPDDFTGCVIAWNSNNLDSKVGGNYNYLYRLFRKSNLKPFERDISTEIYQAGSTPCNGVEGFNCYFPLQSYGFQPTNGVGYQPYRVVVLSFELLHAPATVCGPKKSTNLVKNKCVNFNFNGLTGTGVLTESNKKFLPFQQFGRDIADTTDAVRDPQTLEILDITPCSFGGVSVITPGTNTSNQVAVLYQDVNCTEVPVAIHADQLTPTWRVYSTGSNVFQTRAGCLIGAEHVNNSYECDIPIGAGICASYQTQTNSPRRARSVASQSIIAYTMSLGAENSVAYSNNSIAIPTNFTISVTTEILPVSMTKTSVDCTMYICGDSTECSNLLLQYGSFCTQLNRALTGIAVEQDKNTQEVFAQVKQIYKTPPIKDFGGFNFSQILPDPSKPSKRSFIEDLLFNKVTLADAGFIKQYGDCLGDIAARDLICAQKFNGLTVLPPLLTDEMIAQYTSALLAGTITSGWTFGAGAALQIPFAMQMAYRFNGIGVTQNVLYENQKLIANQFNSAIGKIQDSLSSTASALGKLQDVVNQNAQALNTLVKQLSSNFGCISSVLNDILSRLDKVEAEVQIDCLITGRLQSLQTYVTQQLIRAAEIRASANLAATKMSECVLGQSKRVDFCGKGYHLMSFPQSAPHGVVFLHVTYVPAQEKNFTTAPAICHDGKAHFPREGVFVSNGTHWFVTQRNFYEPQIITTDNTFVSGNCDVVIGIVNNTVYDPLQPELDSGGGGSDIDPYKEFGSSYQLLNFLPLDFFPDLNALVDTATALYEEELTGREHCSPHHTAIRQALVCWDELTKLIAWMSSNITSEQVRTIIVNHVNDTWGLKVRQSLWFHLSCLTFGQHTVQEFLVSFGVWIRTPAPYRPPNAPILSTLPEHTVIC

SEQ ID NO: 11503 - protein, 1301 aa, Artificial Sequence
  SARS-CoV-2/USA/WA-UW292/2020__EPI_ISL_418077 spike protein (1-1147)(A972C_R995C) WhcAg construct
MFVFLVLLPLVSSQCVNLTTRTQLPPAYTNSFTRGVYYPDKVFRSSVLHSTQDLFLPFFSNVTWFHAIHVSGTNGTKRFDNPVLPFNDGVYFASTEKSNIIRGWIFGTTLDSKTQSLLIVNNATNVVIKVCEFQFCNDPFLGVYYHKNNKSWMESEFRVYSSANNCTFEYVSQPFLMDLEGKQGNFKNLREFVFKNIDGYFKIYSKHTPINLVRDLPQGFSALEPLVDLPIGINITRFQTLLALHRSYLTPGDSSSGWTAGAAAYYVGYLQPRTFLLKYNENGTITDAVDCALDPLSETKCTLKSFTVEKGIYQTSNFRVQPTESIVRFPNITNLCPFGEVFNATRFASVYAWNRKRISNCVADYSVLYNSASFSTFKCYGVSPTKLNDLCFTNVYADSFVIRGDEVRQIAPGQTGKIADYNYKLPDDFTGCVIAWNSNNLDSKVGGNYNYLYRLFRKSNLKPFERDISTEIYQASSTPCNGVEGFNCYFPLQSYGFQPTNGVGYQPYRVVVLSFELLHAPATVCGPKKSTNLVKNKCVNFNFNGLTGTGVLTESNKKFLPFQQFGRDIADTTDAVRDPQTLEILDITPCSFGGVSVITPGTNTSNQVAVLYQDVNCTEVPVAIHADQLTPTWRVYSTGSNVFQTRAGCLIGAEHVNNSYECDIPIGAGICASYQTQTNSPRRARSVASQSIIAYTMSLGAENSVAYSNNSIAIPTNFTISVTTEILPVSMTKTSVDCTMYICGDSTECSNLLLQYGSFCTQLNRALTGIAVEQDKNTQEVFAQVKQIYKTPPIKDFGGFNFSQILPDPSKPSKRSFIEDLLFNKVTLADAGFIKQYGDCLGDIAARDLICAQKFNGLTVLPPLLTDEMIAQYTSALLAGTITSGWTFGAGAALQIPFAMQMAYRFNGIGVTQNVLYENQKLIANQFNSAIGKIQDSLSSTASALGKLQDVVNQNAQALNTLVKQLSSNFGCISSVLNDILSRLDKVEAEVQIDCLITGRLQSLQTYVTQQLIRAAEIRASANLAATKMSECVLGQSKRVDFCGKGYHLMSFPQSAPHGVVFLHVTYVPAQEKNFTTAPAICHDGKAHFPREGVFVSNGTHWFVTQRNFYEPQIITTDNTFVSGNCDVVIGIVNNTVYDPLQPELDSGGGGSDIDPYKEFGSSYQLLNFLPLDFFPDLNALVDTATALYEEELTGREHCSPHHTAIRQALVCWDELTKLIAWMSSNITSEQVRTIIVNHVNDTWGLKVRQSLWFHLSCLTFGQHTVQEFLVSFGVWIRTPAPYRPPNAPILSTLPEHTVIC

SEQ ID NO: 11504 - protein, 1301 aa, Artificial Sequence
  SARS-CoV-2/Iceland/192/2020__EPI_ISL_417819 spike protein (1-1147)(A972C_R995C) WhcAg construct
MFVFFVLLPLVSSQCVNLTTRTQLPPAYTNSFTRGVYYPDKVFRSSVLHSTQDLFLPFFSNVTWFHAIHVSGTNGTKRFDNPVLPFNDGVYFASTEKSNIIRGWIFGTTLDSKTQSLLIVNNATNVVIKVCEFQFCNDPFLGVYYHKNNKSWMESEFRVYSSANNCTFEYVSQPFLMDLEGKQGNFKNLREFVFKNIDGYFKIYSKHTPINLVRDLPQGFSALEPLVDLPIGINITRFQTLLALHRSYLTPGDSSSGWTAGAAAYYVGYLQPRTFLLKYNENGTITDAVDCALDPLSETKCTLKSFTVEKGIYQTSNFRVQPTESIVRFPNITNLCPFGEVFNATRFASVYAWNRKRISNCVADYSVLYNSASFSTFKCYGVSPTKLNDLCFTNVYADSFVIRGDEVRQIAPGQTGKIADYNYKLPDDFTGCVIAWNSNNLDSKVGGNYNYLYRLFRKSNLKPFERDISTEIYQAGSTPCNGVEGFNCYFPLQSYGFQPTNGVGYQPYRVVVLSFELLHAPATVCGPKKSTNLVKNKCVNFNFNGLTGTGVLTESNKKFLPFQQFGRDIADTTDAVRDPQTLEILDITPCSFGGVSVITPGTNTSNQVAVLYQGVNCTEVPVAIHADQLTPTWRVYSTGSNVFQTRAGCLIGAEHVNNSYECDIPIGAGICASYQTQTNSPRRARSVASQSIIAYTMSLGAENSVAYSNNSIAIPTNFTISVTTEILPVSMTKTSVDCTMYICGDSTECSNLLLQYGSFCTQLNRALTGIAVEQDKNTQEVFAQVKQIYKTPPIKDFGGFNFSQILPDPSKPSKRSFIEDLLFNKVTLADAGFIKQYGDCLGDIAARDLICAQKFNGLTVLPPLLTDEMIAQYTSALLAGTITSGWTFGAGAALQIPFAMQMAYRFNGIGVTQNVLYENQKLIANQFNSAIGKIQDSLSSTASALGKLQDVVNQNAQALNTLVKQLSSNFGCISSVLNDILSRLDKVEAEVQIDCLITGRLQSLQTYVTQQLIRAAEIRASANLAATKMSECVLGQSKRVDFCGKGYHLMSFPQSAPHGVVFLHVTYVPAQEKNFTTAPAICHDGKAHFPREGVFVSNGTHWFVTQRNFYEPQIITTDNTFVSGNCDVVIGIVNNTVYDPLQPELDSGGGGSDIDPYKEFGSSYQLLNFLPLDFFPDLNALVDTATALYEEELTGREHCSPHHTAIRQALVCWDELTKLIAWMSSNITSEQVRTIIVNHVNDTWGLKVRQSLWFHLSCLTFGQHTVQEFLVSFGVWIRTPAPYRPPNAPILSTLPEHTVIC

SEQ ID NO: 11505 - protein, 1301 aa, Artificial Sequence
  SARS-CoV-2/Belgium/ULG-6939/2020__EPI_ISL_417020 spike protein (1-1147)(A972C_R995C) WhcAg construct
MFVFLVLLPLVSSQCVNLTTRTQLPPAYTNSFTRGVYYPDKVFRSSVLHSTQDLFLPFFSNVTWFHAIHVSGTNGTKRFDNPVLPFNDGVYFASTEKSNIIRGWIFGTTLDSKTQSLLIVNNATNVVIKVCEFQFCNDPFLGVYYHKNNKSWMESEFRVYSSANNCTFEYVSQPFLMDLEGKQGNFKNLREFVFKNIDGYFKIYSKHTPINLVRDLPQGFSALEPLVDLPIGINITRFQTLLALHRSYLTPGDSSSGWTAGAAAYYVGYLQPRTFLLKYNENGTITDAVDCALDPLSETKCTLKSFTVEKGIYQTSNFRVQPTESIVRFPNITNLCPFGEVFNATRFASVYAWNRKRISNCVADYSVLYNSASFSTFKCYGVSPTKLNDLCFTNVYADSFVIRGDEVRQIAPGQTGKIADYNYKLPDDFTGCVIAWNSNNLDSKVGGNYNYLYRLFRKSNLKPFERDISTEIYQAGSTPCNGVEGFNCYFPLQSYGFQPTNGVGYQPYRVVVLSFELLHAPATVCGPKKSTNLVKNKCVNFNFNGLTGTGVLTESNKKFLPFQQFGRDIADTTDAVRDPQTLEILDITPCSFGGVSVITPGTNTSNQVAVLYQGVNCTEVPVAIHADQLTPTWRVYSTGSNVFQTRAGCLIGAEHVNNSYECDIPIGAGICASYQTQTNSPRRARSVASQSIIAYTMSLGAENSVVYSNNSIAIPTNFTISVTTEILPVSMTKTSVDCTMYICGDSTECSNLLLQYGSFCTQLNRALTGIAVEQDKNTQEVFAQVKQIYKTPPIKDFGGFNFSQILPDPSKPSKRSFIEDLLFNKVTLADAGFIKQYGDCLGDIAARDLICAQKFNGLTVLPPLLTDEMIAQYTSALLAGTITSGWTFGAGAALQIPFAMQMAYRFNGIGVTQNVLYENQKLIANQFNSAIGKIQDSLSSTASALGKLQDVVNQNAQALNTLVKQLSSNFGCISSVLNDILSRLDKVEAEVQIDCLITGRLQSLQTYVTQQLIRAAEIRASANLAATKMSECVLGQSKRVDFCGKGYHLMSFPQSAPHGVVFLHVTYVPAQEKNFTTAPAICHDGKAHFPREGVFVSNGTHWFVTQRNFYEPQIITTDNTFVSGNCDVVIGIVNNTVYDPLQPELDSGGGGSDIDPYKEFGSSYQLLNFLPLDFFPDLNALVDTATALYEEELTGREHCSPHHTAIRQALVCWDELTKLIAWMSSNITSEQVRTIIVNHVNDTWGLKVRQSLWFHLSCLTFGQHTVQEFLVSFGVWIRTPAPYRPPNAPILSTLPEHTVIC

SEQ ID NO: 11506 - protein, 1301 aa, Artificial Sequence
  SARS-CoV-2/France/HF2496/2020__EPI_ISL_418231 spike protein (1-1147)(A972C_R995C) WhcAg construct
MFVFLVLLPLVSSQCVNLTTRTQLPPAYTNSFTRGVYYPDKVFRSSVLHSTQDLFLPFFSNVTWFHAIHVSGTNGTKRFDNPVLPFNDGVYFASTEKSNIIRGWIFGTTLDSKTQSLLIVNNATNVVIKVCEFQFCNDPFLGVYYHKNNKSWMESEFRVYSSANNCTFEYVSQPFLMDLEGKQGNFKNLREFVFKNIDGYFKIYSKHTPINLVRDLPQGFSALEPLVDLPIGINITRFQTLLALHRSYLTPGDSSSGWTAGAAAYYVGYLQPRTFLLKYNENGTITDAVDCALDPLSETKCTLKSFTVEKGIYQTSNFRVQPTESIVRFPNITNLCPFGEVFNATRFASVYAWNRKRISNCVADYSVLYNSASFSTFKCYGVSPTKLNDLCFTNVYADSFVIRGDEVRQIAPGQTGKIADYNYKLPDDFTGCVIAWNSNNLDSKVGGNYNYLYRLFRKSNLKPFERDISTEIYQAGSTPCNGVEGFNCYFPLQSYGFQPTNGVGYQPYRVVVLSFELLHAPATVCGPKKSTNLVKNKCVNFNFNGLTGTGVLTESNKKFLPFQQFGRDIADTTDAVRDPQTLEILDITPCSFGGVSVITPGTNTSNQVAVLYQGVNCTEVPVAIHADQLTPTWRVYSTGSNVFQTRAGCLIGAEHVNNSYECDIPIGAGICASYQTQTNSPRRARSVASQSIIAYTMSLGAENSVAYSNNSIAIPTNFTISVTTEILPVSMTKTSVDCTMYICGDSTECSNLLLQYGSFCTQLNRALTGIAVEQDKNTQEVFAQVKQIYKTPPIKDFGGFNFSQILPDPSKPSKRSFIEDLLFNKVTLADAGFIKQYGDCLGDIVARDLICAQKFNGLTVLPPLLTDEMIAQYTSALLAGTITSGWTFGAGAALQIPFAMQMAYRFNGIGVTQNVLYENQKLIANQFNSAIGKIQDSLSSTASALGKLQDVVNQNAQALNTLVKQLSSNFGCISSVLNDILSRLDKVEAEVQIDCLITGRLQSLQTYVTQQLIRAAEIRASANLAATKMSECVLGQSKRVDFCGKGYHLMSFPQSAPHGVVFLHVTYVPAQEKNFTTAPAICHDGKAHFPREGVFVSNGTHWFVTQRNFYEPQIITTDNTFVSGNCDVVIGIVNNTVYDPLQPELDSGGGGSDIDPYKEFGSSYQLLNFLPLDFFPDLNALVDTATALYEEELTGREHCSPHHTAIRQALVCWDELTKLIAWMSSNITSEQVRTIIVNHVNDTWGLKVRQSLWFHLSCLTFGQHTVQEFLVSFGVWIRTPAPYRPPNAPILSTLPEHTVIC

SEQ ID NO: 11507 - protein, 1301 aa, Artificial Sequence
  SARS-CoV-2/USA/WA-UW291/2020__EPI_ISL_418076 spike protein (1-1147)(A972C_R995C) WhcAg construct
MFVFLVLLPLVSSQCVNLTTRTQLPPAYTNSFTRGVYYPDKVFRSSVLHSTQDLFLPFFSNVTWFHAIHVSGTNGTKRFDNPVLPFNDGVYFASTEKSNIIRGWIFGTTLDSKTQSLLIVNNATNVVIKVCEFQFCNDPFLGVYYHKNNKSWMESEFRVYSSANNCTFEYVSQPFLMDLEGKQGNFKNLREFVFKNIDGYFKIYSKHTPINLVRDLPQGFSALEPLVDLPIGINITRFQTLLALHRSYLTPGDSSSGWTAGAAAYYVGYLQPRTFLLKYNENGTITDAVDCALDPLSETKCTLKSFTVEKGIYQTSNFRVQPTESIVRFPNITNLCPFGEVFNATRFASVYAWNRKRISNCVADYSVLYNSASFSTFKCYGVSPTKLNDLCFTNVYADSFVIRGDEVRQIAPGQTGKIADYNYKLPDDFTGCVIAWNSNNLDSKVGGNYNYLYRLFRKSNLKPFERDISTEIYQAGSTPCNGVEGFNCYFPLQSYGFQPTNGVGYQPYRVVVLSFELLHAPATVCGPKKSTNLVKNKCVNFNFNGLTGTGVLTESNKKFLPFQQFGRDIADTTDAVRDPQTLEILDITPCSFGGVSVITPGTNTSNQVAVLYQGVNCTEVPVAIHADQLTPTWRVYSTGSNVFQTRAGCLIGAEHVNNSYECDIPIGAGICASYQTQTNSPRRARSVASQSIIAYTMSLGAENSVAYSNNSIAIPTNFTISVTTEILPVSMTKTSVDCTMYICGDSTECSNLLLQYGSFCTQLNRALTGIAVEQDKNTQEVFAQVKQIYKTPPIKDFGGFNFSQILPDPSKPSKRSFIEDLLFNKVTLADAGFIKQYGDCLGDIAARDLICAQKFNGLTVLPPLLTDEMIAQYTSALLAGTITSGWTFGAGAALQIPFAMQMAYRFNGIGVTQNVLYENQKLIANQFNSAIGKIQYSLSSTASALGKLQDVVNQNAQALNTLVKQLSSNFGCISSVLNDILSRLDKVEAEVQIDCLITGRLQSLQTYVTQQLIRAAEIRASANLAATKMSECVLGQSKRVDFCGKGYHLMSFPQSAPHGVVFLHVTYVPAQEKNFTTAPAICHDGKAHFPREGVFVSNGTHWFVTQRNFYEPQIITTDNTFVSGNCDVVIGIVNNTVYDPLQPELDSGGGGSDIDPYKEFGSSYQLLNFLPLDFFPDLNALVDTATALYEEELTGREHCSPHHTAIRQALVCWDELTKLIAWMSSNITSEQVRTIIVNHVNDTWGLKVRQSLWFHLSCLTFGQHTVQEFLVSFGVWIRTPAPYRPPNAPILSTLPEHTVIC

SEQ ID NO: 11508 - protein, 1301 aa, Artificial Sequence; identical to SEQ ID NO: 11471
  SARS-CoV-2/Portugal/PT0034/2020__EPI_ISL_418019 spike protein (1-1147)(A972C_R995C) WhcAg construct

SEQ ID NO: 11509 - protein, 1301 aa, Artificial Sequence; identical to SEQ ID NO: 11463
  SARS-CoV-2/Iceland/202/2020__EPI_ISL_417750 spike protein (1-1147)(A972C_R995C) WhcAg construct

SEQ ID NO: 11510 - protein, 1301 aa, Artificial Sequence
  SARS-CoV-2/USA/WA-UW261/2020__EPI_ISL_418046 spike protein (1-1147)(A972C_R995C) WhcAg construct
MFVFLVLLPLVSSQCVNLTTRTQLPPAYTNSFTRGVYYPDKVFRSSVLHSTQDLFLPFFSNVTWFHAIHVSGTNGTKRFDNPVLPFNDGVYFASTEKSNIIRGWIFGTTLDSKTQSLLIVNNATNVVIKVCEFQFCNDPFLGVYYHKNNKSWMESEFRVYSSANNCTFEYVSQPFLMDLEGKQGNFKNLREFVFKNIDGYFKIYSKHTPINLVRDLPQGFSALEPLVDLPIGINITRFQTLLALHRSYLTPGDSSSGWTAGAAAYYVGYLQPRTFLLKYNENGTITDAVDCALDPLSETKCTLKSFTVEKGIYQTSNFRVQPTESIVRFPNITNLCPFGEVFNATRFTSVYAWNRKRISNCVADYSVLYNSASFSTFKCYGVSPTKLNDLCFTNVYADSFVIRGDEVRQIAPGQTGKIADYNYKLPDDFTGCVIAWNSNNLDSKVGGNYNYLYRLFRKSNLKPFERDISTEIYQAGSTPCNGVEGFNCYFPLQSYGFQPTNGVGYQPYRVVVLSFELLHAPATVCGPKKSTNLVKNKCVNFNFNGLTGTGVLTESNKKFLPFQQFGRDIADTTDAVRDPQTLEILDITPCSFGGVSVITPGTNTSNQVAVLYQDVNCTEVPVAIHADQLTPTWRVYSTGSNVFQTRAGCLIGAEHVNNSYECDIPIGAGICASYQTQTNSPRRARSVASQSIIAYTMSLGAENSVAYSNNSIAIPTNFTISVTTEILPVSMTKTSVDCTMYICGDSTECSNLLLQYGSFCTQLNRALTGIAVEQDKNTQEVFAQVKQIYKTPPIKDFGGFNFSQILPDPSKPSKRSFIEDLLFNKVTLADAGFIKQYGDCLGDIAARDLICAQKFNGLTVLPPLLTDEMIAQYTSALLAGTITSGWTFGAGAALQIPFAMQMAYRFNGIGVTQNVLYENQKLIANQFNSAIGKIQDSLSSTASALGKLQDVVNQNAQALNTLVKQLSSNFGCISSVLNDILSRLDKVEAEVQIDCLITGRLQSLQTYVTQQLIRAAEIRASANLAATKMSECVLGQSKRVDFCGKGYHLMSFPQSAPHGVVFLHVTYVPAQEKNFTTAPAICHDGKAHFPREGVFVSNGTHWFVTQRNFYEPQIITTDNTFVSGNCDVVIGIVNNTVYDPLQPELDSGGGGSDIDPYKEFGSSYQLLNFLPLDFFPDLNALVDTATALYEEELTGREHCSPHHTAIRQALVCWDELTKLIAWMSSNITSEQVRTIIVNHVNDTWGLKVRQSLWFHLSCLTFGQHTVQEFLVSFGVWIRTPAPYRPPNAPILSTLPEHTVIC

SEQ ID NO: 11511 - protein, 1301 aa, Artificial Sequence
  SARS-CoV-2/Portugal/PT0035/2020__EPI_ISL_418020 spike protein (1-1147)(A972C_R995C) WhcAg construct
MFVFLVLLPLVSSQCVNLTTRTQLPPAYTNSFTRGVYYPDKVFRSSVLHSTQDLFLPFFSNVTWFHAIHVSGTNGTKRFDNPVLPFNDGVYFASTEKSNIIRGWIFGTTLDSKTQSLLIVNNATNVVIKVCEFQFCNDPFLGVYYHKNNKSWMESEFRVYSSANNCTFEYVSQPFLMDLEGKQGNFKNLREFVFKNIDGYFKIYSKHTPINLVRDLPQGFSALEPLVDLPIGINITRFQTLLALHRSYLTPGDSSSGWTAGAAAYYVGYLQPRTFLLKYNENGTITDAVDCALDPLSETKCTLKSFTVEKGIYQTSNFRVQPTESIVRFPNITNLCPFGEVFNATRFASVYAWNRKRISNCVADYSVLYNSASFSTFKCYGVSPTKLNDLCFTNVYADSFVIRGDEVRQIAPGQTGKIADYNYKLPDDFTGCVIAWNSNNLDSKVGGNYNYLYRLFRKSNLKPFERDISTEIYQAGSTPCNGVEGFNCYFPLQSYGFQPTNGVGYQPYRVVVLSFELLHAPATVCGPKKSTNLVKNKCVNFNFNGLTGTGVLTESNKKFLPFQQFGRDIADTTDAVRDPQTLEILDITPCSFGGVSVITPGTNTSNQVAVLYQDVNCTEVPVAIHADQLTPTWRVYSTGSNVFQTRAGCLIGAEHVNNSYECDIPIGAGICASYQTQTNSPRRARSVASQSIIAYTMSLGAENSVAYSNNSIAIPTNFTISVTTEILPVSMTKTSVDCTMYICGDSTECSNLLLQYGSFCTQLNRALTGIAVEQDKNTQEVFAQVKQIYKTPPIKDFGGFNFSQILPDPSKPSKRSFIEDLLFNKVTLADAGFIKQYGDCLGDISARDLICAQKFNGLTVLPPLLTDEMIAQYTSALLAGTITSGWTFGAGAALQIPFAMQMAYRFNGIGVTQNVLYENQKLIANQFNSAIGKIQDSLSSTASALGKLQDVVNQNAQALNTLVKQLSSNFGCISSVLNDILSRLDKVEAEVQIDCLITGRLQSLQTYVTQQLIRAAEIRASANLAATKMSECVLGQSKRVDFCGKGYHLMSFPQSAPHGVVFLHVTYVPAQEKNFTTAPAICHDGKAHFPREGVFVSNGTHWFVTQRNFYEPQIITTDNTFVSGNCDVVIGIVNNTVYDPLQPELDSGGGGSDIDPYKEFGSSYQLLNFLPLDFFPDLNALVDTATALYEEELTGREHCSPHHTAIRQALVCWDELTKLIAWMSSNITSEQVRTIIVNHVNDTWGLKVRQSLWFHLSCLTFGQHTVQEFLVSFGVWIRTPAPYRPPNAPILSTLPEHTVIC

SEQ ID NO: 11512 - protein, 1301 aa, Artificial Sequence
  SARS-CoV-2/USA/NY-NYUMC7/2020__EPI_ISL_418192 spike protein (1-1147)(A972C_R995C) WhcAg construct
MFVFLVLLPLVSSQCVNLTTRTQLPPAYTNSFTRGVYYPDKVFRSSVLHSTQDLFLPFFSNVTWFHAIHVSGTNGTKRFDNPVLPFNDGVYFASTEKSNIIRGWIFGTTLDSKTQSLLIVNNATNVVIKVCEFQFCNDPFLGVYHHKNNKSWMESEFRVYSSANNCTFEYVSQPFLMDLEGKQGNFKNLREFVFKNIDGYFKIYSKHTPINLVRDLPQGFSALEPLVDLPIGINITRFQTLLALHRSYLTPGDSSSGWTAGAAAYYVGYLQPRTFLLKYNENGTITDAVDCALDPLSETKCTLKSFTVEKGIYQTSNFRVQPTESIVRFPNITNLCPFGEVFNATRFASVYAWNRKRISNCVADYSVLYNSASFSTFKCYGVSPTKLNDLCFTNVYADSFVIRGDEVRQIAPGQTGKIADYNYKLPDDFTGCVIAWNSNNLDSKVGGNYNYLYRLFRKSNLKPFERDISTEIYQAGSTPCNGVEGFNCYFPLQSYGFQPTNGVGYQPYRVVVLSFELLHAPATVCGPKKSTNLVKNKCVNFNFNGLTGTGVLTESNKKFLPFQQFGRDIADTTDAVRDPQTLEILDITPCSFGGVSVITPGTNTSNQVAVLYQGVNCTEVPVAIHADQLTPTWRVYSTGSNVFQTRAGCLIGAEHVNNSYECDIPIGAGICASYQTQTNSPRRARSVASQSIIAYTMSLGAENSVAYSNNSIAIPTNFTISVTTEILPVSMTKTSVDCTMYICGDSTECSNLLLQYGSFCTQLNRALTGIAVEQDKNTQEVFAQVKQIYKTPPIKDFGGFNFSQILPDPSKPSKRSFIEDLLFNKVTLADAGFIKQYGDCLGDIAARDLICAQKFNGLTVLPPLLTDEMIAQYTSALLAGTITSGWTFGAGAALQIPFAMQMAYRFNGIGVTQNVLYENQKLIANQFNSAIGKIQDSLSSTASALGKLQDVVNQNAQALNTLVKQLSSNFGCISSVLNDILSRLDKVEAEVQIDCLITGRLQSLQTYVTQQLIRAAEIRASANLAATKMSECVLGQSKRVDFCGKGYHLMSFPQSAPHGVVFLHVTYVPAQEKNFTTAPAICHDGKAHFPREGVFVSNGTHWFVTQRNFYEPQIITTDNTFVSGNCDVVIGIVNNTVYDPLQPELDSGGGGSDIDPYKEFGSSYQLLNFLPLDFFPDLNALVDTATALYEEELTGREHCSPHHTAIRQALVCWDELTKLIAWMSSNITSEQVRTIIVNHVNDTWGLKVRQSLWFHLSCLTFGQHTVQEFLVSFGVWIRTPAPYRPPNAPILSTLPEHTVIC

SEQ ID NO: 11513 - protein, 1301 aa, Artificial Sequence
  SARS-CoV-2/Iceland/189/2020__EPI_ISL_417709 spike protein (1-1147)(A972C_R995C) WhcAg construct
MFVFLVLLPLVSSQCVNLTTRTQLPPAYTNSFTRGVYYPDKVFRSSVLHSTQDLFLPFFSNVTWFHAIHVSGTNGTKRFDNPVLPFNDGVYFASTEKSNIIRGWIFGTTLDSKTQSLLIVNNATNVVIKVCEFQFCNDPFLGVYYHKNNKSWMESEFRVYSSANNCTFEYVSQPFLMDLEGKQGNFKNLREFVFKNIDGYFKIYSKHTPINLVRDLPQGFSALEPLVDLPIGINITRFQTLLALHRSYLTPGDSSSGWTAGAAAYYVGYLQPRTFLLKYNENGTITDAVDCALDPLSETKCTLKSFTVEKGIYQTSNFRVQPTESIVRFPNITNLCPFGEVFNATRFASVYAWNRKRISNCVADYSVLYNSASFSTFKCYGVSPTKLNDLCFTNVYADSFVIRGDEVRQIAPGQTGKIADYNYKLPDDFTGCVIAWNSNNLDSKVGGNYNYLYRLFRKSNLKPFERDISTEIYQAGSTPCNGVEGFNCYFPLQSYGFQPTNGVGYQPYRVVVLSFELLHAPATVCGPKKSTNLVKNKCVNFNFNGLTGTGVLTESNKKFLPFQQFGRDIADTTDAVRDPQTLEILDITPCSFGGVSVITPGTNTSNQVAVLYQGVNCTEVPVAIHADQLTPTWRVYSTGSNVFQTRAGCLIGAEHVNNSYECDIPIGAGICASYQTQTNSPRRARSVASQSIIAYTMSLGAENSVAYSNNSIAIPTNFTISVTTEILPVSMTKTSVDCTMYICGDSTECSNLLLQYGSFCTQLNRALTGIAVEQDKNTQEVFAQVKQIYKTPPIKDFGGFNFSQILPDPSKPSKRSFIEDLLFNKVTLADAGFTKQYGDCLGDIAARDLICAQKFNGLTVLPPLLTDEMIAQYTSALLAGTITSGWTFGAGAALQIPFAMQMAYRFNGIGVTQNVLYENQKLIANQFNSAIGKIQDSLSSTASALGKLQDVVNQNAQALNTLVKQLSSNFGCISSVLNDILSRLDKVEAEVQIDCLITGRLQSLQTYVTQQLIRAAEIRASANLAATKMSECVLGQSKRVDFCGKGYHLMSFPQSAPHGVVFLHVTYVPAQEKNFTTAPAICHDGKAHFPREGVFVSNGTHWFVTQRNFYEPQIITTDNTFVSGNCDVVIGIVNNTVYDPLQPELDSGGGGSDIDPYKEFGSSYQLLNFLPLDFFPDLNALVDTATALYEEELTGREHCSPHHTAIRQALVCWDELTKLIAWMSSNITSEQVRTIIVNHVNDTWGLKVRQSLWFHLSCLTFGQHTVQEFLVSFGVWIRTPAPYRPPNAPILSTLPEHTVIC

SEQ ID NO: 11514 - protein, 1301 aa, Artificial Sequence
  SARS-CoV-2/Australia/NSW56/2020__EPI_ISL_417408 spike protein (1-1147)(A972C_R995C) WhcAg construct
MFVFLVLLPLVSSQCVNLTTRTQLPPAYTNSFTRGVYYPDKVFRSSVLHSTQDLFLPFFSNVTWFHAIHVSGTNGTKRFDNPVLPFNDGVYFASTEKSNIIRGWIFGTTLDSKTQSLLIVNNATNVVIKVCEFQFCNDPFLGVYYHKNNKSWMESEFRVYSSANNCTFEYVSQPFLMDLEGKQGNFKNLREFVFKNIDGYFKIYSKHTPINLVRDLPQGFSALEPLVDLPIGINITRFQTLLALHRSYLTPGDSSSGWTAGAAAYYVGYLQPRTFLLKYNENGTITDAVDCALDPLSETKCTLKSFTVEKGIYQTSNFRVQPTESIVRFPNITNLCPFGEVFNATRFASVYAWNRKRISNCVADYSVLYNSASFSTFKCYGVSPTKLNDLCFTNVYADSFVIRGDEVRQIAPGQTGKIADYNYKLPDDFTGCVIAWNSNNLDSKVGGNYNYLYRLFRKSNLKPFERDISTEIYQAGSTPCNGVEGFNCYFPLQSYGFQPTNGVGYQPYRVVVLSFELLHAPATVCGPKKSTNLVKNKCVNFNFNGLTGTGVLTESNKKFLPFQQFGRDIADTTDAVRDPQTLEILDITPCSFGGVSVITPGTNTSNQVAVLYQDVNCTEVPVAIHADQLTPTWRVYSTGSNVFQTRAGCLIGAEHVNNSYECDIPIGAGICASYQTQTNSPRRARSVASQSIIAYTMSLGAENSVAYSNNSIAIPTNFTISVTTEILPVSMTKTSVDCTMYICGDSTECSNLLLQYGSFCTQLNRALTGIAVEQDKNTQEVFAQVKQIYKTPPIKDFGGFNFSQILPDSSKPSKRSFIEDLLFNKVTLADAGFIKQYGDCLGDIAARDLICAQKFNGLTVLPPLLTDEMIAQYTSALLAGTITSGWTFGAGAALQIPFAMQMAYRFNGIGVTQNVLYENQKLIANQFNSAIGKIQDSLSSTASALGKLQDVVNQNAQALNTLVKQLSSNFGCISSVLNDILSRLDKVEAEVQIDCLITGRLQSLQTYVTQQLIRAAEIRASANLAATKMSECVLGQSKRVDFCGKGYHLMSFPQSAPHGVVFLHVTYVPAQEKNFTTAPAICHDGKAHFPREGVFVSNGTHWFVTQRNFYEPQIITTDNTFVSGNCDVVIGIVNNTVYDPLQPELDSGGGGSDIDPYKEFGSSYQLLNFLPLDFFPDLNALVDTATALYEEELTGREHCSPHHTAIRQALVCWDELTKLIAWMSSNITSEQVRTIIVNHVNDTWGLKVRQSLWFHLSCLTFGQHTVQEFLVSFGVWIRTPAPYRPPNAPILSTLPEHTVIC

SEQ ID NO: 11515 - protein, 1301 aa, Artificial Sequence
  SARS-CoV-2/Iceland/280/2020__EPI_ISL_417608 spike protein (1-1147)(A972C_R995C) WhcAg construct
MFVFLVLLPLVSSQCVNLTTRTQLPPAYTNSFTRGVYYPDKVFRSSVLHSTQDLFLPFFSNVTWFHAIHVSGTNGTKRFDNPVLPFNDGVYFASTEKSNIIRGWIFGTTLDSKTQSLLIVNNATNVVIKVCEFQFCNDPFLGVYYHKNNKSWMESEFRVYSSANNCTFEYVSQPFLMDLEGKQGNFKNLREFVFKNIDGYFKIYSKHTPINLVRDLPQGFSALEPLVDLPIGINITRFQTLLALHRSYLTPGDSSSGWTAGAAAYYVGYLQPRTFLLKYNENGTITDAVDCALDPLSETKCTLKSFTVEKGIYQTSNFRVQPTESIVRFPNITNLCPFGEVFNATRFASVYAWNRKRISNCVADYSVLYNSASFSTFKCYGVSPTKLNDLCFTNVYADSFVIRGDEVRQIAPGQTGKIADYNYKLPDDFTGCVIAWNSNNLDSKVGGNYNYLYRLFRKSNLKPFERDISTEIYQAGSTPCNGVEGFNCYFPLQSYGFQPTNGVGYQPYRVVVLSFELLHAPATVCGPKKSTNLVKNKCVNFNFNGLTGTGVLTESNKKFLPFQQFGRDIADTTDAVRDPQTLEILDITPCSFGGVSVITPGTNTSNQVAVLYQGVNCTEVPVAIHADQLTPTWRVYSTGSNVFQTRAGCLIGAEHVNNSYECDIPIGAGICASYHTQTNSPRRARSVASQSIIAYTMSLGAENSVAYSNNSIAIPTNFTISVTTEILPVSMTKTSVDCTMYICGDSTECSNLLLQYGSFCTQLNRALTGIAVEQDKNTQEVFAQVKQIYKTPPIKDFGGFNFSQILPDPSKPSKRSFIEDLLFNKVTLADAGFIKQYGDCLGDIAARDLICAQKFNGLTVLPPLLTDEMIAQYTSALLAGTITSGWTFGAGAALQIPFAMQMAYRFNGIGVTQNVLYENQKLIANQFNSAIGKIQDSLSSTASALGKLQDVVNQNAQALNTLVKQLSSNFGCISSVLNDILSRLDKVEAEVQIDCLITGRLQSLQTYVTQQLIRAAEIRASANLAATKMSECVLGQSKRVDFCGKGYHLMSFPQSAPHGVVFLHVTYVPAQEKNFTTAPAICHDGKAHFPREGVFVSNGTHWFVTQRNFYEPQIITTDNTFVSGNCDVVIGIVNNTVYDPLQPELDSGGGGSDIDPYKEFGSSYQLLNFLPLDFFPDLNALVDTATALYEEELTGREHCSPHHTAIRQALVCWDELTKLIAWMSSNITSEQVRTIIVNHVNDTWGLKVRQSLWFHLSCLTFGQHTVQEFLVSFGVWIRTPAPYRPPNAPILSTLPEHTVIC

SEQ ID NO: 11516 - protein, 1301 aa, Artificial Sequence; identical to SEQ ID NO: 11471
  SARS-CoV-2/Iceland/247/2020__EPI_ISL_417575 spike protein (1-1147)(A972C_R995C) WhcAg construct

SEQ ID NO: 11517 - protein, 1301 aa, Artificial Sequence
  SARS-CoV-2/Iceland/238/2020__EPI_ISL_417566 spike protein (1-1147)(A972C_R995C) WhcAg construct
MFVFLVLLPLVSSQCVNLTTRTQLPPAYTNSFTRGVYYPDKVFRSSVLHSTQDLFLPFFSNVTWFHAIHVSGTNGTKRFDNPVLPFNDGVYFASTEKSNIIRGWIFGTTLDSKTQSLLIVNNATNVVIKVCEFQFCNDPFLGVYYHKNNKSWMESEFRVYSSANNCTFEYVSQPFLMDLEGKQGNFKNLREFVFKNIDGYFKIYSKHTPINLVRDLPQGFSALEPLVDLPIGINITRFQTLLALHRSYLTPGDSSSGWTAGAAAYYVGYLQPRTFLLKYNENGTITDAVDCALDPLSETKCTLKSFTVEKGIYQTSNFRVQPTESIVRFPNITNLCPFGEVFNATRFASVYAWNRKRISNCVADYSVLYNSASFSTFKCYGVSPTKLNDLCFTNVYADSFVIRGDEVRQIAPGQTGKIADYNYKLPDDFTGCVIAWNSNNLDSKVGGNYNYLYRLFRKSNLKPFERDISTEIYQAGSTPCNGVEGFNCYFPLQSYGFQPTNGVGYQPYRVVVLSFELLHAPATVCGPKKSTNLVKNKCVNFNFNGLTGTGVLTESNKKFLPFQQFGRDIADTTDAVRDPQTLEILDITPCSFGGVSVITPGTNTSNQVAVLYQGVNCTEVPVAIHADQLTPTWRVYSTGSNVFQTRAGCLIGAEHVNNSYECDIPIGAGICASYQTQTNSPRRARSVASQSIIAYTMSLGAENSVAYSNNSIAIPTNFTISVTTEILPVSMTKTSVDCTMYICGDSTECSNLLLQYGSFCTQLNRALTGIAVEQDKNTQEVFAQVKQIYKTPPIKDFGGFNFSQILPDPSKPSKRSFIEDLLFNKVTLADVGFIKQYGDCLGDIAARDLICAQKFNGLTVLPPLLTDEMIAQYTSALLAGTITSGWTFGAGAALQIPFAMQMAYRFNGIGVTQNVLYENQKLIANQFNSAIGKIQDSLSSTASALGKLQDVVNQNAQALNTLVKQLSSNFGCISSVLNDILSRLDKVEAEVQIDCLITGRLQSLQTYVTQQLIRAAEIRASANLAATKMSECVLGQSKRVDFCGKGYHLMSFPQSAPHGVVFLHVTYVPAQEKNFTTAPAICHDGKAHFPREGVFVSNGTHWFVTQRNFYEPQIITTDNTFVSGNCDVVIGIVNNTVYDPLQPELDSGGGGSDIDPYKEFGSSYQLLNFLPLDFFPDLNALVDTATALYEEELTGREHCSPHHTAIRQALVCWDELTKLIAWMSSNITSEQVRTIIVNHVNDTWGLKVRQSLWFHLSCLTFGQHTVQEFLVSFGVWIRTPAPYRPPNAPILSTLPEHTVIC

SEQ ID NO: 11518 - protein, 1301 aa, Artificial Sequence
  SARS-CoV-2/Greece/16/2020__EPI_ISL_418265 spike protein (1-1147)(A972C_R995C) WhcAg construct
MFVFLVLLPLVSSQCVNLTTRTQLPPAYTNSFTRGVYYPDKVFRSSVLHSTQDLFLPFFSNVTWFHAIHVSGTNGTKRFDNPVLPFNDGVYFASTEKSNIIRGWIFGTTLDSKTQSLLIVNNATNVVIKVCEFQFCNDPFLGVYYHKNNKSWMESEFRVYSSANNCTFEYVSQPFLMDLEGKQGNFKNLREFVFKNVDGYFKIYSKHTPINLVRDLPQGFSALEPLVDLPIGINITRFQTLLALHRSYLTPGDSSSGWTAGAAAYYVGYLQPRTFLLKYNENGTITDAVDCALDPLSETKCTLKSFTVEKGIYQTSNFRVQPTESIVRFPNITNLCPFGEVFNATRFASVYAWNRKRISNCVADYSVLYNSASFSTFKCYGVSPTKLNDLCFTNVYADSFVIRGDEVRQIAPGQTGKIADYNYKLPDDFTGCVIAWNSNNLDSKVGGNYNYLYRLFRKSNLKPFERDISTEIYQAGSTPCNGVEGFNCYFPLQSYGFQPTNGVGYQPYRVVVLSFELLHAPATVCGPKKSTNLVKNKCVNFNFNGLTGTGVLTESNKKFLPFQQFGRDIADTTDAVRDPQTLEILDITPCSFGGVSVITPGTNTSNQVAVLYQDVNCTEVPVAIHADQLTPTWRVYSTGSNVFQTRAGCLIGAEHVNNSYECDIPIGAGICASYQTQTNSPRRARSVASQSIIAYTMSLGAENSVAYSNNSIAIPTNFTISVTTEILPVSMTKTSVDCTMYICGDSTECSNLLLQYGSFCTQLNRALTGIAVEQDKNTQEVFAQVKQIYKTPPIKDFGGFNFSQILPDPSKPSKRSFIEDLLFNKVTLADAGFIKQYGDCLGDIAARDLICAQKFNGLTVLPPLLTDEMIAQYTSALLAGTITSGWTFGAGAALQIPFAMQMAYRFNGIGVTQNVLYENQKLIANQFNSAIGKIQDSLSSTASALGKLQDVVNQNAQALNTLVKQLSSNFGCISSVLNDILSRLDKVEAEVQIDCLITGRLQSLQTYVTQQLIRAAEIRASANLAATKMSECVLGQSKRVDFCGKGYHLMSFPQSAPHGVVFLHVTYVPAQEKNFTTAPAICHDGKAHFPREGVFVSNGTHWFVTQRNFYEPQIITTDNTFVSGNCDVVIGIVNNTVYDPLQPELDSGGGGSDIDPYKEFGSSYQLLNFLPLDFFPDLNALVDTATALYEEELTGREHCSPHHTAIRQALVCWDELTKLIAWMSSNITSEQVRTIIVNHVNDTWGLKVRQSLWFHLSCLTFGQHTVQEFLVSFGVWIRTPAPYRPPNAPILSTLPEHTVIC

SEQ ID NO: 11519 - protein, 1301 aa, Artificial Sequence
  SARS-CoV-2/Iceland/319/2020__EPI_ISL_417648 spike protein (1-1147)(A972C_R995C) WhcAg construct
MFVFLVLLPLVSSQCVNLTTRTQLPPAYTNSFTRGVYYPDKVFRSSVLHSTQDLFLPFFSNVTWFHAIHVSGTNGTKRFDNPVLPFNDGVYFASTEKSNIIRGWIFGTTLDSKTQSLLIVNNATNVVIKVCEFQFCNDPFLGVYYHKNNKSWMESEFRVYSSANNCTFEYVSQPFLIDLEGKQGNFKNLREFVFKNIDGYFKIYSKHTPINLVRDLPQGFSALEPLVDLPIGINITRFQTLLALHRSYLTPGDSSSGWTAGAAAYYVGYLQPRTFLLKYNENGTITDAVDCALDPLSETKCTLKSFTVEKGIYQTSNFRVQPTESIVRFPNITNLCPFGEVFNATRFASVYAWNRKRISNCVADYSVLYNSASFSTFKCYGVSPTKLNDLCFTNVYADSFVIRGDEVRQIAPGQTGKIADYNYKLPDDFTGCVIAWNSNNLDSKVGGNYNYLYRLFRKSNLKPFERDISTEIYQAGSTPCNGVEGFNCYFPLQSYGFQPTNGVGYQPYRVVVLSFELLHAPATVCGPKKSTNLVKNKCVNFNFNGLTGTGVLTESNKKFLPFQQFGRDIADTTDAVRDPQTLEILDITPCSFGGVSVITPGTNTSNQVAVLYQGVNCTEVPVAIHADQLTPTWRVYSTGSNVFQTRAGCLIGAEHVNNSYECDIPIGAGICASYQTQTNSPRRARSVASQSIIAYTMSLGAENSVAYSNNSIAIPTNFTISVTTEILPVSMTKTSVDCTMYICGDSTECSNLLLQYGSFCTQLNRALTGIAVEQDKNTQEVFAQVKQIYKTPPIKDFGGFNFSQILPDPSKPSKRSFIEDLLFNKVTLADAGFIKQYGDCLGDIAARDLICAQKFNGLTVLPPLLTDEMIAQYTSALLAGTITSGWTFGAGAALQIPFAMQMAYRFNGIGVTQNVLYENQKLIANQFNSAIGKIQDSLSSTASALGKLQDVVNQNAQALNTLVKQLSSNFGCISSVLNDILSRLDKVEAEVQIDCLITGRLQSLQTYVTQQLIRAAEIRASANLAATKMSECVLGQSKRVDFCGKGYHLMSFPQSAPHGVVFLHVTYVPAQEKNFTTAPAICHDGKAHFPREGVFVSNGTHWFVTQRNFYEPQIITTDNTFVSGNCDVVIGIVNNTVYDPLQPELDSGGGGSDIDPYKEFGSSYQLLNFLPLDFFPDLNALVDTATALYEEELTGREHCSPHHTAIRQALVCWDELTKLIAWMSSNITSEQVRTIIVNHVNDTWGLKVRQSLWFHLSCLTFGQHTVQEFLVSFGVWIRTPAPYRPPNAPILSTLPEHTVIC

SEQ ID NO: 11520 - protein, 1301 aa, Artificial Sequence
  SARS-CoV-2/Congo/94/2020__EPI_ISL_417947 spike protein (1-1147)(A972C_R995C) WhcAg construct
MFVFLVLLPLVSSQCVNLTTRTQLPPAYTNSFTRGVYYPDKVFRSSVLHSTQDLFLPFFSNVTWFHAIHVSGTNGTKRFDNPVLPFNDGVYFASTEKSNIIRGWIFGTTLDSKTQSLLIVNNATNVVIKVCEFQFCNDPFLGVYYHKNNKSWMESEFRVYSSANNCTFEYVSQPFLMDLEGKQGNFKNLREFVFKNIDGYFKIYSKHTPINLVRDLPQGFSALEPLVDLPIGINITRFQTLLALHRSYLTPGDSSSGWTAGAAAYYVGYLQPRTFLLKYNENGTITDAVDCALDPLSETKCTLKSFTVEKGIYQTSNFRVQPTESIVRFPNITNLCPFGEVFNATRFASVYAWNRKRISNCVADYSVLYNSASFSTFKCYGVSPTKLNDLCFTNVYADSFVIRGDEVRQIAPGQTGKIADYNYKLPDDFTGCVIAWNSNNLDSKVGGNYNYLYRLFRKSNLKPFERDISTEIYQAGSTPCNGVEGFNCYFPLQSYGFQPTNGVGYQPYRVVVLSFELLHAPATVCGPKKSTNLVKNKCVNFNFNGLTGTGVLTESNKKFLPFQQFGRDIADTTDAVRDPQTLEILDITPCSFGGVSVITPGTNTSNQVAVLYQGVNCTEVPVAIHADQLTPTWRVYSTGSNVFQTRAGCLIGAEHVNNSYECDIPIGAGICASYQTQTNSPRRARSVASQSIIAYTMSLGAENSVAYSNNSIAIPTNFTISVTTEILPVSMTKTSVDCTMYICGDSTECSNLLLQYGSFCTQLNRALTGIAVEQDKNTQEVFAQVKQIYKTPPIKDFGGFNFSQILPDPSKPSKRSFIEDILFNKVTLADAGFIKQYGDCLGDIAARDLICAQKFNGLTVLPPLLTDEMIAQYTSALLAGTITSGWTFGAGAALQIPFAMQMAYRFNGIGVTQNVLYENQKLIANQFNSAIGKIQDSLSSTASALGKLQDVVNQNAQALNTLVKQLSSNFGCISSVLNDILSRLDKVEAEVQIDCLITGRLQSLQTYVTQQLIRAAEIRASANLAATKMSECVLGQSKRVDFCGKGYHLMSFPQSAPHGVVFLHVTYVPAQEKNFTTAPAICHDGKAHFPREGVFVSNGTHWFVTQRNFYEPQIITTDNTFVSGNCDVVIGIVNNTVYDPLQPELDSGGGGSDIDPYKEFGSSYQLLNFLPLDFFPDLNALVDTATALYEEELTGREHCSPHHTAIRQALVCWDELTKLIAWMSSNITSEQVRTIIVNHVNDTWGLKVRQSLWFHLSCLTFGQHTVQEFLVSFGVWIRTPAPYRPPNAPILSTLPEHTVIC

SEQ ID NO: 11521 - protein, 1301 aa, Artificial Sequence
  SARS-CoV-2/Congo/158/2020__EPI_ISL_417950 spike protein (1-1147)(A972C_R995C) WhcAg construct
MFVFLVLLPLVSSQCVNLTTRTQLPPAYTNSFTRGVYYPDKVFRSSVLHSTQDLFLPFFSNVTWFHAIHVSGTNGTKRFDNPVLPFNDGVYFASTEKSNIIRGWIFGTTLDSKTQSLLIVNNATNVVIKVCEFQFCNDPFLGVYYHKNNKSWMESEFRVYSSANNCTFEYVSQPFLMDLEGKQGNFKNLREFVFKNIDGYFKIYSKHTPINLVRDLPQGFSALEPLVDLPIGINITRFQTLLALHRSYLTPGDSSSGWTAGAAAYYVGYLQPRTFLLKYNENGTITDAVDCALDPLSETKCTLKSFTVEKGIYQTSNFRVQPTESIVRFPNITNLCPFGEVFNATRFASVYAWNRKRISNCVADYSVLYNSASFSTFKCYGVSPTKLNDLCFTNVYADSFVIRGDEVRQIAPGQTGKIADYNYKLPDDFTGCVIAWNSNNLDSKVGGNYNYLYRLFRKSNLKPFERDISTEIYQAGSTPCNGVEGFNCYFPLQSYGFQPTNGVGYQPYRVVVLSFELLHAPATVCGPKKSTNLVKNKCVNFNFNGLTGTGVLTESNKKFLPFQQFGRDIADTTDAVRDPQTLEILDITPCSFGGVSVITPGTNTSNQVAVLYQDVNCTEVPVAIHADQLTPTWRVYSTGSNVFQTRAGCLIGAEHVNNSYECDIPIGAGICASYQTQTNSPRRARSVASQSIIAYTMSLGAENSVAYSNNSIAIPTNFTISVTTEILPVSMTKTSVDCTMYICGDSTECSNLLLQYGSFCTQLNRALTGIAVEQDKNTQEVFAQVKQIYKTPPIKDFGGFNFSQILPDPSKPSKRSFIEDLLFNKVTLADAGFIKQYGDCLGDIAARDLICAQKFNGLTVLPPLLTDEMIAQYTSALLAGTITSGWTFGAGAALQIPFAMQMAYRFNGIGVTQNVLYENQKLIANQFNSAIGKIQDSLSSTASALGKLQDVVNQNAQALNTLVKQLSSNFGCISSVLNDILSRLDKVEAEVQIDCLITGRLQSLQTYVTQQLIRAAEIRASANLAATKMSECVLGQSKRVDFCGKGYHLMSFPQSAPHGVVFLHVTYVPAQEKNFTTAPAICHDGKAHFPREGVFVSNGTHWFVTQRNFYEPQIITTDNTFLSGNCDVVIGIVNNTVYDPLQPELDSGGGGSDIDPYKEFGSSYQLLNFLPLDFFPDLNALVDTATALYEEELTGREHCSPHHTAIRQALVCWDELTKLIAWMSSNITSEQVRTIIVNHVNDTWGLKVRQSLWFHLSCLTFGQHTVQEFLVSFGVWIRTPAPYRPPNAPILSTLPEHTVIC

SEQ ID NO: 11522 - protein, 1301 aa, Artificial Sequence
  SARS-CoV-2/USA/UT-00034/2020__EPI_ISL_417977 spike protein (1-1147)(A972C_R995C) WhcAg construct
MFVFLVLLPLVSSQCVNLTTRTQLPPAYTNSFTRGVYYPDKVFRSSVLHSTQDLFLPFFSNVTWFHAIHVSGTNGTKRFDNPVLPFNDGVYFASTEKSNIIRGWIFGTTLDSKTQSLLIVNNATNVVIKVCEFQFCNDPFLGVYYYKNNKSWMESEFRVYSSANNCTFEYVSQPFLMDLEGKQGNFKNLREFVFKNIDGYFKIYSKHTPINLVRDLPQGFSALEPLVDLPIGINITRFQTLLALHRSYLTPGDSSSGWTAGAAAYYVGYLQPRTFLLKYNENGTITDAVDCALDPLSETKCTLKSFTVEKGIYQTSNFRVQPTESIVRFPNITNLCPFGEVFNATRFASVYAWNRKRISNCVADYSVLYNSASFSTFKCYGVSPTKLNDLCFTNVYADSFVIRGDEVRQIAPGQTGKIADYNYKLPDDFTGCVIAWNSNNLDSKVGGNYNYLYRLFRKSNLKPFERDISTEIYQAGSTPCNGVEGFNCYFPLQSYGFQPTNGVGYQPYRVVVLSFELLHAPATVCGPKKSTNLVKNKCVNFNFNGLTGTGVLTESNKKFLPFQQFGRDIADTTDAVRDPQTLEILDITPCSFGGVSVITPGTNTSNQVAVLYQGVNCTEVPVAIHADQLTPTWRVYSTGSNVFQTRAGCLIGAEHVNNSYECDIPIGAGICASYQTQTNSPRRARSVASQSIIAYTMSLGAENSVAYSNNSIAIPTNFTISVTTEILPVSMTKTSVDCTMYICGDSTECSNLLLQYGSFCTQLNRALTGIAVEQDKNTQEVFAQVKQIYKTPPIKDFGGFNFSQILPDPSKPSKRSFIEDLLFNKVTLADAGFIKQYGDCLGDIAARDLICAQKFNGLTVLPPLLTDEMIAQYTSALLAGTITSGWTFGAGAALQIPFAMQMAYRFNGIGVTQNVLYENQKLIANQFNSAIGKIQDSLSSTASALGKLQDVVNQNAQALNTLVKQLSSNFGCISSVLNDILSRLDKVEAEVQIDCLITGRLQSLQTYVTQQLIRAAEIRASANLAATKMSECVLGQSKRVDFCGKGYHLMSFPQSAPHGVVFLHVTYVPAQEKNFTTAPAICHDGKAHFPREGVFVSNGTHWFVTQRNFYEPQIITTDNTFVSGNCDVVIGIVNNTVYDPLQPELDSGGGGSDIDPYKEFGSSYQLLNFLPLDFFPDLNALVDTATALYEEELTGREHCSPHHTAIRQALVCWDELTKLIAWMSSNITSEQVRTIIVNHVNDTWGLKVRQSLWFHLSCLTFGQHTVQEFLVSFGVWIRTPAPYRPPNAPILSTLPEHTVIC

SEQ ID NO: 11523 - protein, 1301 aa, Artificial Sequence
  SARS-CoV-2/USA/UT-00033/2020__EPI_ISL_417976 spike protein (1-1147)(A972C_R995C) WhcAg construct
MFVFLVLLPLVSSQCVNLTTRTQLPPAYTNSFTRGVYYPDKVFRSSVLHSTQDLFLPFFSNVTWFHAIHVSGTNGTKRFDNPVLPFNDGVYFASTEKSNIIRGWIFGTTLDSKTQSLLIVNNATNVVIKVCEFQFCNDPFLGVYYHKNNKSWMESEFRVYSSANNCTFEYVSQPFLMDLEGKQGNFKNLREFVFKNIDGYFKIYSKHTPINLVRDLPQGFSALEPLVDLPIGINITRFQTLLALHRSYLTPGDSSSGLTAGAAAYYVGYLQPRTFLLKYNENGTITDAVDCALDPLSETKCTLKSFTVEKGIYQTSNFRVQPTESIVRFPNITNLCPFGEVFNATRFASVYAWNRKRISNCVADYSVLYNSASFSTFKCYGVSPTKLNDLCFTNVYADSFVIRGDEVRQIAPGQTGKIADYNYKLPDDFTGCVIAWNSNNLDSKVGGNYNYLYRLFRKSNLKPFERDISTEIYQAGSTPCNGVEGFNCYFPLQSYGFQPTNGVGYQPYRVVVLSFELLHAPATVCGPKKSTNLVKNKCVNFNFNGLTGTGVLTESNKKFLPFQQFGRDIADTTDAVRDPQTLEILDITPCSFGGVSVITPGTNTSNQVAVLYQGVNCTEVPVAIHADQLTPTWRVYSTGSNVFQTRAGCLIGAEHVNNSYECDIPIGAGICASYQTQTNSPRRARSVASQSIIAYTMSLGAENSVAYSNNSIAIPTNFTISVTTEILPVSMTKTSVDCTMYICGDSTECSNLLLQYGSFCTQLNRALTGIAVEQDKNTQEVFAQVKQIYKTPPIKDFGGFNFSQILPDPSKPSKRSFIEDLLFNKVTLADAGFIKQYGDCLGDIAARDLICAQKFNGLTVLPPLLTDEMIAQYTSALLAGTITSGWTFGAGAALQIPFAMQMAYRFNGIGVTQNVLYENQKLIANQFNSAIGKIQDSLSSTASALGKLQDVVNQNAQALNTLVKQLSSNFGCISSVLNDILSRLDKVEAEVQIDCLITGRLQSLQTYVTQQLIRAAEIRASANLAATKMSECVLGQSKRVDFCGKGYHLMSFPQSAPHGVVFLHVTYVPAQEKNFTTAPAICHDGKAHFPREGVFVSNGTHWFVTQRNFYEPQIITTDNTFVSGNCDVVIGIVNNTVYDPLQPELDSGGGGSDIDPYKEFGSSYQLLNFLPLDFFPDLNALVDTATALYEEELTGREHCSPHHTAIRQALVCWDELTKLIAWMSSNITSEQVRTIIVNHVNDTWGLKVRQSLWFHLSCLTFGQHTVQEFLVSFGVWIRTPAPYRPPNAPILSTLPEHTVIC

SEQ ID NO: 11524 - protein, 1301 aa, Artificial Sequence
  SARS-CoV-2/USA/WI-13/2020__EPI_ISL_417516 spike protein (1-1147)(A972C_R995C) WhcAg construct
MFVFLVLLPLVSSQCVNLTTRTQLPPAYTNSFTRGVYYPDKVFRSSVLHSTQDLFLPFFSNVTWFHAIHVSGTNGTKRFDNPVLPFNDGVYFASTEKSNIIRGWIFGTTLDSKTQSLLIVNNATNVVIKVCEFQFCNDPFLGVYYHKNNKSWMESEFRVYSSANNCTFEYVSQPFLMDLEGKQGNFKNLREFVFKNIDGYFKIYSKHTPINLVRDLPQGFSALEPLVDLPIGINITRFQTLLALHRSYLTPGDSSSGWTAGAAAYYVGYLQPRTFLLKYNENGTITDAVDCALDPLSETKCTLKSFTVEKGIYQTSNFRVLPTESIVRFPNITNLCPFGEVFNATRFASVYAWNRKRISNCVADYSVLYNSASFSTFKCYGVSPTKLNDLCFTNVYADSFVIRGDEVRQIAPGQTGKIADYNYKLPDDFTGCVIAWNSNNLDSKVGGNYNYLYRLFRKSNLKPFERDISTEIYQAGSTPCNGVEGFNCYFPLQSYGFQPTNGVGYQPYRVVVLSFELLHAPATVCGPKKSTNLVKNKCVNFNFNGLTGTGVLTESNKKFLPFQQFGRDIADTTDAVRDPQTLEILDITPCSFGGVSVITPGTNTSNQVAVLYQGVNCTEVPVAIHADQLTPTWRVYSTGSNVFQTRAGCLIGAEHVNNSYECDIPIGAGICASYQTQTNSPRRARSVASQSIIAYTMSLGAENSVAYSNNSIAIPTNFTISVTTEILPVSMTKTSVDCTMYICGDSTECSNLLLQYGSFCTQLNRALTGIAVEQDKNTQEVFAQVKQIYKTPPIKDFGGFNFSQILPDPSKPSKRSFIEDLLFNKVTLADAGFIKQYGDCLGDIAARDLICAQKFNGLTVLPPLLTDEMIAQYTSALLAGTITSGWTFGAGAALQIPFAMQMAYRFNGIGVTQNVLYENQKLIANQFNSAIGKIQDSLSSTASALGKLQDVVNQNAQALNTLVKQLSSNFGCISSVLNDILSRLDKVEAEVQIDCLITGRLQSLQTYVTQQLIRAAEIRASANLAATKMSECVLGQSKRVDFCGKGYHLMSFPQSAPHGVVFLHVTYVPAQEKNFTTAPAICHDGKAHFPREGVFVSNGTHWFVTQRNFYEPQIITTDNTFVSGNCDVVIGIVNNTVYDPLQPELDSGGGGSDIDPYKEFGSSYQLLNFLPLDFFPDLNALVDTATALYEEELTGREHCSPHHTAIRQALVCWDELTKLIAWMSSNITSEQVRTIIVNHVNDTWGLKVRQSLWFHLSCLTFGQHTVQEFLVSFGVWIRTPAPYRPPNAPILSTLPEHTVIC

SEQ ID NO: 11525 - protein, 1300 aa, Artificial Sequence
  SARS-CoV-2/India/1-27/2020__EPI_ISL_413522 spike protein (1-1146)(A971C_R994C) WhcAg construct
MFVFLVLLPLVSSQCVNLTTRTQLPPAYTNSFTRGVYYPDKVFRSSVLHSTQDLFLPFFSNVTWFHAIHVSGTNGTKRFDNPVLPFNDGVYFASTEKSNIIRGWIFGTTLDSKTQSLLIVNNATNVVIKVCEFQFCNDPFLGVYHKNNKSWMESEFRVYSSANNCTFEYVSQPFLMDLEGKQGNFKNLREFVFKNIDGYFKIYSKHTPINLVRDLPQGFSALEPLVDLPIGINITRFQTLLALHRSYLTPGDSSSGWTAGAAAYYVGYLQPRTFLLKYNENGTITDAVDCALDPLSETKCTLKSFTVEKGIYQTSNFRVQPTESIVRFPNITNLCPFGEVFNATRFASVYAWNRKRISNCVADYSVLYNSASFSTFKCYGVSPTKLNDLCFTNVYADSFVIRGDEVIQIAPGQTGKIADYNYKLPDDFTGCVIAWNSNNLDSKVGGNYNYLYRLFRKSNLKPFERDISTEIYQAGSTPCNGVEGFNCYFPLQSYGFQPTNGVGYQPYRVVVLSFELLHAPATVCGPKKSTNLVKNKCVNFNFNGLTGTGVLTESNKKFLPFQQFGRDIADTTDAVRDPQTLEILDITPCSFGGVSVITPGTNTSNQVAVLYQDVNCTEVPVAIHADQLTPTWRVYSTGSNVFQTRAGCLIGAEHVNNSYECDIPIGAGICASYQTQTNSPRRARSVASQSIIAYTMSLGAENSVAYSNNSIAIPTNFTISVTTEILPVSMTKTSVDCTMYICGDSTECSNLLLQYGSFCTQLNRALTGIAVEQDKNTQEVFAQVKQIYKTPPIKDFGGFNFSQILPDPSKPSKRSFIEDLLFNKVTLADAGFIKQYGDCLGDIAARDLICAQKFNGLTVLPPLLTDEMIAQYTSALLAGTITSGWTFGAGAALQIPFAMQMAYRFNGIGVTQNVLYENQKLIANQFNSAIGKIQDSLSSTASALGKLQDVVNQNAQALNTLVKQLSSNFGCISSVLNDILSRLDKVEAEVQIDCLITGRLQSLQTYVTQQLIRAAEIRASANLAATKMSECVLGQSKRVDFCGKGYHLMSFPQSAPHGVVFLHVTYVPAQEKNFTTAPAICHDGKAHFPREGVFVSNGTHWFVTQRNFYEPQIITTDNTFVSGNCDVVIGIVNNTVYDPLQPELDSGGGGSDIDPYKEFGSSYQLLNFLPLDFFPDLNALVDTATALYEEELTGREHCSPHHTAIRQALVCWDELTKLIAWMSSNITSEQVRTIIVNHVNDTWGLKVRQSLWFHLSCLTFGQHTVQEFLVSFGVWIRTPAPYRPPNAPILSTLPEHTVIC

SEQ ID NO: 11526 - protein, 1295 aa, Artificial Sequence
  SARS-CoV-2/pangolin/Guangxi/P4L/2017__EPI_ISL_410538 spike protein (1-1141)(A966C_R989C) WhcAg construct
MFVFLFVLPLVSSQCVNLTTRTGIPPGYTNSSTRGVYYPDKVFRSSILHLTQDLFLPFFSNVTWFNTINYQGGFKKFDNPVLPFNDGVYFASTEKSNIIRGWIFGTTLDARTQSLLIVNNATNVVIKVCEFQFCTDPFLGVYYHNNNKTWVENEFRVYSSANNCTFEYISQPFLMDLEGKQGNFKNLREFVFKNVDGYFKIYSKHTPIDLVRDLPRGFAALEPLVDLPIGINITRFQTLLALHRSYLTPGNLESGWTTGAAAYYVGYLQQRTFLLSYNQNGTITDAVDCSLDPLSETKCTLKSLTVEKGIYQTSNFRVQPTISIVRFPNITNLCPFGEVFNASKFASVYAWNRKRISNCVADYSVLYNSTSFSTFKCYGVSPTKLNDLCFTNVYADSFVVKGDEVRQIAPGQTGVIADYNYKLPDDFTGCVIAWNSVKQDALTGGNYGYLYRLFRKSKLKPFERDISTEIYQAGSTPCNGQVGLNCYYPLERYGFHPTTGVNYQPFRVVVLSFELLNGPATVCGPKLSTTLVKDKCVNFNFNGLTGTGVLTTSKKQFLPFQQFGRDISDTTDAVRDPQTLEILDITPCSFGGVSVITPGTNTSNQVAVLYQDVNCTEVPMAIHAEQLTPAWRVYSAGANVFQTRAGCLVGAEHVNNSYECDIPVGAGICASYHSMSSLRSVNQRSIIAYTMSLGAENSVAYSNNSIAIPTNFTISVTTEILPVSMTKTSVDCTMYICGDSIECSNLLLQYGSFCTQLNRALTGIAVEQDKNTQEVFAQVKQIYKTPPIKDFGGFNFSQILPDPSKPSKRSFIEDLLFNKVTLADAGFIKQYGDCLGDIAARDLICAQKFNGLTVLPPLLTDEMIAQYTSALLAGTITSGWTFGAGAALQIPFAMQMAYRFNGIGVTQNVLYENQKLIANQFNSAIGKIQDSLSSTASALGKLQDVVNQNAQALNTLVKQLSSNFGCISSVLNDILSRLDKVEAEVQIDCLITGRLQSLQTYVTQQLIRAAEIRASANLAATKMSECVLGQSKRVDFCGKGYHLMSFPQSAPHGVVFLHVTYVPAQEKNFTTAPAICHEGKAHFPREGVFVSNGTHWFITQRNFYEPQIITTDNTFVSGSCDVVIGIVNNTVYDPLQPELDSGGGGSDIDPYKEFGSSYQLLNFLPLDFFPDLNALVDTATALYEEELTGREHCSPHHTAIRQALVCWDELTKLIAWMSSNITSEQVRTIIVNHVNDTWGLKVRQSLWFHLSCLTFGQHTVQEFLVSFGVWIRTPAPYRPPNAPILSTLPEHTVIC

SEQ ID NO: 11527 - protein, 1295 aa, Artificial Sequence
  SARS-CoV-2/pangolin/Guangxi/P5L/2017__EPI_ISL_410540 spike protein (1-1141)(A966C_R989C) WhcAg construct
MFVFLFVLPLVSSQCVNLTTRTGIPPGYTNSSTRGVYYPDKVFRSSILHLTQDLFLPFFSNVTWFNTINYQGGFKKFDNPVLPFNDGVYFASTEKSNIIRGWIFGTTLDARTQSLLIVNNATNVVIKVCEFQFCTDPFLGVYYHNNNKTWVENEFRVYSSANNCTFEYISQPFLMDLEGKQGNFKNLREFVFKNVDGYFKIYSKHTPIDLVRDLPRGFAALEPLVDLPIGINITRFQTLLALHRSYLTPGKLESGWTTGAAAYYVGYLQQRTFLLSYNQNGTITDAVDCSLDPLSETKCTLKSLTVEKGIYQTSNFRVQPTISIVRFPNITNLCPFGEVFNASKFASVYAWNRKRISNCVADYSVLYNSTSFSTFKCYGVSPTKLNDLCFTNVYADSFVVKGDEVRQIAPGQTGVIADYNYKLPDDFTGCVIAWNSVKQDALTGGNYGYLYRLFRKSKLKPFERDISTEIYQAGSTPCNGQVGLNCYYPLERYGFHPTTGVNYQPFRVVVLSFELLNGPATVCGPKLSTTLVKDKCVNFNFNGLTGTGVLTTSKKQFLPFQQFGRDISDTTDAVRDPQTLEILDITPCSFGGVSVITPGTNTSNQVAVLYQDVNCTEVPMAIHAEQLTPAWRVYSAGANVFQTRAGCLVGAEHVNNSYECDIPVGAGICASYHSMSSFRSVNQRSIIAYTMSLGAENSVAYSNNSIAIPTNFTISVTTEILPVSMTKTSVDCTMYICGDSIECSNLLLQYGSFCTQLNRALTGIAVEQDKNTQEVFAQVKQIYKTPPIKDFGGFNFSQILPDPSKPSKRSFIEDLLFNKVTLADAGFIKQYGDCLGDIAARDLICAQKFNGLTVLPPLLTDEMIAQYTSALLAGTITSGWTFGAGAALQIPFAMQMAYRFNGIGVTQNVLYENQKLIANQFNSAIGKIQDSLSSTASALGKLQDVVNQNAQALNTLVKQLSSNFGCISSVLNDILSRLDKVEAEVQIDCLITGRLQSLQTYVTQQLIRAAEIRASANLAATKMSECVLGQSKRVDFCGKGYHLMSFPQSAPHGVVFLHVTYVPAQEKNFTTAPAICHEGKAHFPREGVFVSNGTHWFITQRNFYEPQIITTDNTFVSGSCDVVIGIVNNTVYDPLQPELDSGGGGSDIDPYKEFGSSYQLLNFLPLDFFPDLNALVDTATALYEEELTGREHCSPHHTAIRQALVCWDELTKLIAWMSSNITSEQVRTIIVNHVNDTWGLKVRQSLWFHLSCLTFGQHTVQEFLVSFGVWIRTPAPYRPPNAPILSTLPEHTVIC

SEQ ID NO: 11528 - protein, 1295 aa, Artificial Sequence
  SARS-CoV-2/pangolin/Guangxi/P5E/2017__EPI_ISL_410541 spike protein (1-1141)(A966C_R989C) WhcAg construct
MFVFLFVLPLVSSQCVNLTTRTGIPPGYTNSSTRGVYYPDKVFRSSILHLTQDLFLPFFSNVTWFNTITYQGGSKKFDNPVLPFNDGVYFASTEKSNIIRGWIFGTTLDARTQSLLIVNNATNVVIKVCEFQFCTDPFLGVYYHNNNKTWVENEFRVYSSANNCTFEYISQPFLMDLEGKQGNFKNLREFVFKNVDGYFKIYSKHTPIDLVRDLPRGFAALEPLVDLPIGINITRFQTLLALHRSYLTPGKLESGWTTGAAAYYVGYLQQRTFLLSYNQNGTITDAVDCSLDPLSETKCTLKSLTVEKGIYQTSNFRVQPTISIVRFPNITNLCPFGEVFNASKFASVYAWNRKRISNCVADYSVLYNSTSFSTFKCYGVSPTKLNDLCFTNVYADSFVVKGDEVRQIAPGQTGVIADYNYKLPDDFTGCVIAWNSVKQDALTGDNYGYLYRLFRKSKLKPFERDISTEIYQAGSTPCNGQVGLNCYYPLERYGFHPTTGVNYQPFRVVVLSFELLNGPATVCGPKLSTTLVKDKCVNFNFNGLTGTGVLTTSKKQFLPFQQFGRDISDTTDAVRDPQTLEILDITPCSFGGVSVITPGTNTSNQVAVLYQDVNCTEVPMAIHAEQLTPAWRVYSAGANVFQTRAGCLVGAEHVNNSYECDIPVGAGICASYHSMSSFRSVNQRSIIAYTMSLGAENSVAYSNNSIAIPTNFTISVTTEILPVSMTKTSVDCTMYICGDSIECSNLLLQYGSFCTQLNRALTGIAVEQDKNTQEVFAQVKQIYKTPPIKDFGGFNFSQILPDPSKPSKRSFIEDLLFNKVTLADAGFIKQYGDCLGDIAARDLICAQKFNGLTVLPPLLTDEMIAQYTSALLAGTITSGWTFGAGAALQIPFAMQMAYRFNGIGVTQNVLYENQKLIANQFNSAIGKIQDSLSSTASALGKLQDVVNQNAQALNTLVKQLSSNFGCISSVLNDILSRLDKVEAEVQIDCLITGRLQSLQTYVTQQLIRAAEIRASANLAATKMSECVLGQSKRVDFCGKGYHLMSFPQSAPHGVVFLHVTYVPAQEKNFTTAPAICHEGKAHFPREGVFVSNGTHWFITQRNFYEPQIITTDNTFVSGSCDVVIGIVNNTVYDPLQPELDSGGGGSDIDPYKEFGSSYQLLNFLPLDFFPDLNALVDTATALYEEELTGREHCSPHHTAIRQALVCWDELTKLIAWMSSNITSEQVRTIIVNHVNDTWGLKVRQSLWFHLSCLTFGQHTVQEFLVSFGVWIRTPAPYRPPNAPILSTLPEHTVIC

SEQ ID NO: 11529 - protein, 1293 aa, Artificial Sequence
  SARS-CoV-2/pangolin/Guangxi/P1E/2017__EPI_ISL_410539 spike protein (1-1139)(A964C_R987C) WhcAg construct
MFVFLFVLPLVSSQCVNLTTRTGIQPGYTNSSTRGVYYPDKVFRSSILHLTQDLFLPFFSNVTWFNTINYQGGFKKFDNPVLPFNDGVYFASTEKSNIIRGWIFGTTLDARTQSLLIVNNATNVVIKVCEFQFCTDPFLGVYYHNNNKTWVENEFRVYSSANNCTFEYISQPFLMDLEGKQGNFKNLREFVFKNVDGYFKIYSKHTPIDLVRDLPRGFAALEPLVDLPIGINITRFQTLLALHRSYLTPGKLESGWTTGAAAYYVGYLQQRTFLLSYNQNGTITDAVDCSLDPLSETKCTLKSLTVEKGIYQTSNFRVQPTISIVRFPNITNLCPFGEVFNASKFASVYAWNRKRISNCVADYSVLYNSTSFSTFKCYGVSPTKLNDLCFTNVYADSFVVKGDEVRQIAPGQTGVIADYNYKLPDDFTGCVIAWNSVKQDALTGGNYLYRLFRKSKLKPFERDISTEIYQAGSTPCNGQVGLNCYYPLERYGFHPTTGVNYQPFRVVVLSFELLNGPATVCGPKLSTTLVKDKCVNFNFNGLTGTGVLTTSKKQFLPFQQFGRDISDTTDAVRDPQTLEILDITPCSFGGVSVITPGTNTSNQVAVLYQDVNCTEVPMAIHAEQLTPAWRVYSAGANVFQTRAGCLVGAEHVNNSYECDIPVGAGICASYHSMSSLRSVNQRSIIAYTMSLGAENSVAYSNNSIAIPTNFTISVTTEILPVSMTKTSVDCTMYICGDSIECSNLLLQYGSFCTQLNRALTGIAVEQDKNTQEVFAQVKQIYKTPPIKDFGGFNFSQILPDPSKPSKRSFIEDLLFNKVTLADAGFIKQYGDCLGDIAARDLICAQKFNGLTVLPPLLTDEMIAQYTSALLAGTITSGWTFGAGAALQIPFAMQMAYRFNGIGVTQNVLYENQKLIANQFNSAIGKIQDSLSSTASALGKLQDVVNQNAQALNTLVKQLSSNFGCISSVLNDILSRLDKVEAEVQIDCLITGRLQSLQTYVTQQLIRAAEIRASANLAATKMSECVLGQSKRVDFCGKGYHLMSFPQSAPHGVVFLHVTYVPAQEKNFTTAPAICHEGKAHFPREGVFVSNGTHWFITQRNFYEPQIITTDNTFVSGSCDVVIGIVNNTVYDPLQPELDSGGGGSDIDPYKEFGSSYQLLNFLPLDFFPDLNALVDTATALYEEELTGREHCSPHHTAIRQALVCWDELTKLIAWMSSNITSEQVRTIIVNHVNDTWGLKVRQSLWFHLSCLTFGQHTVQEFLVSFGVWIRTPAPYRPPNAPILSTLPEHTVIC

SEQ ID NO: 11530 - protein, 1301 aa, Artificial Sequence
  SARS-CoV-2/Wuhan/WIV05/2019__EPI_ISL_402128 spike protein (1-1147)(A890C_V1040C) WhcAg construct
MFVFLVLLPLVSSQCVNLTTRTQLPPAYTNSFTRGVYYPDKVFRSSVLHSTQDLFLPFFSNVTWFHAIHVSGTNGTKRFDNPVLPFNDGVYFASTEKSNIIRGWIFGTTLDSKTQSLLIVNNATNVVIKVCEFQFCNDPFLGVYYHKNNKSWMESEFRVYSSANNCTFEYVSQPFLMDLEGKQGNFKNLREFVFKNIDGYFKIYSKHTPINLVRDLPQGFSALEPLVDLPIGINITRFQTLLALHRSYLTPGDSSSGWTAGAAAYYVGYLQPRTFLLKYNENGTITDAVDCALDPLSETKCTLKSFTVEKGIYQTSNFRVQPTESIVRFPNITNLCPFGEVFNATRFASVYAWNRKRISNCVADYSVLYNSASFSTFKCYGVSPTKLNDLCFTNVYADSFVIRGDEVRQIAPGQTGKIADYNYKLPDDFTGCVIAWNSNNLDSKVGGNYNYLYRLFRKSNLKPFERDISTEIYQAGSTPCNGVEGFNCYFPLQSYGFQPTNGVGYQPYRVVVLSFELLHAPATVCGPKKSTNLVKNKCVNFNFNGLTGTGVLTESNKKFLPFQQFGRDIADTTDAVRDPQTLEILDITPCSFGGVSVITPGTNTSNQVAVLYQDVNCTEVPVAIHADQLTPTWRVYSTGSNVFQTRAGCLIGAEHVNNSYECDIPIGAGICASYQTQTNSPRRARSVASQSIIAYTMSLGAENSVAYSNNSIAIPTNFTISVTTEILPVSMTKTSVDCTMYICGDSTECSNLLLQYGSFCTQLNRALTGIAVEQDKNTQEVFAQVKQIYKTPPIKDFGGFNFSQILPDPSKPSKRSFIEDLLFNKVTLADAGFIKQYGDCLGDIAARDLICAQKFNGLTVLPPLLTDEMIAQYTSALLAGTITSGWTFGCGAALQIPFAMQMAYRFNGIGVTQNVLYENQKLIANQFNSAIGKIQDSLSSTASALGKLQDVVNQNAQALNTLVKQLSSNFGAISSVLNDILSRLDKVEAEVQIDRLITGRLQSLQTYVTQQLIRAAEIRASANLAATKMSECVLGQSKRCDFCGKGYHLMSFPQSAPHGVVFLHVTYVPAQEKNFTTAPAICHDGKAHFPREGVFVSNGTHWFVTQRNFYEPQIITTDNTFVSGNCDVVIGIVNNTVYDPLQPELDSGGGGSDIDPYKEFGSSYQLLNFLPLDFFPDLNALVDTATALYEEELTGREHCSPHHTAIRQALVCWDELTKLIAWMSSNITSEQVRTIIVNHVNDTWGLKVRQSLWFHLSCLTFGQHTVQEFLVSFGVWIRTPAPYRPPNAPILSTLPEHTVIC

SEQ ID NO: 11531 - protein, 1297 aa, Artificial Sequence; identical to SEQ ID NO: 11263
  SARS-CoV-2/bat/Yunnan/RaTG13/2013__EPI_ISL_402131 spike protein (1-1143)(A886C_V1036C) WhcAg construct

SEQ ID NO: 11532 - protein, 1301 aa, Artificial Sequence; identical to SEQ ID NO: 11264
  SARS-CoV-2/Wuhan/HBCDC-HB-01/2019__EPI_ISL_402132 spike protein (1-1147)(A890C_V1040C) WhcAg construct

SEQ ID NO: 11533 - protein, 1301 aa, Artificial Sequence; identical to SEQ ID NO: 11265
  SARS-CoV-2/Guangdong/20SF028/2020__EPI_ISL_403936 spike protein (1-1147)(A890C_V1040C) WhcAg construct

SEQ ID NO: 11534 - protein, 1301 aa, Artificial Sequence; identical to SEQ ID NO: 11266
  SARS-CoV-2/Shenzhen/SZTH-001/2020__EPI_ISL_406592 spike protein (1-1147)(A890C_V1040C) WhcAg construct

SEQ ID NO: 11535 - protein, 1301 aa, Artificial Sequence; identical to SEQ ID NO: 11267
  SARS-CoV-2/Shenzhen/SZTH-004/2020__EPI_ISL_406595 spike protein (1-1147)(A890C_V1040C) WhcAg construct

SEQ ID NO: 11536 - protein, 1301 aa, Artificial Sequence; identical to SEQ ID NO: 11268
  SARS-CoV-2/France/IDF0372/2020__EPI_ISL_406596 spike protein (1-1147)(A890C_V1040C) WhcAg construct

SEQ ID NO: 11537 - protein, 1301 aa, Artificial Sequence; identical to SEQ ID NO: 11269
  SARS-CoV-2/Australia/VIC01/2020__EPI_ISL_406844 spike protein (1-1147)(A890C_V1040C) WhcAg construct

SEQ ID NO: 11538 - protein, 1301 aa, Artificial Sequence; identical to SEQ ID NO: 11270
  SARS-CoV-2/Germany/BavPat1/2020__EPI_ISL_406862 spike protein (1-1147)(A890C_V1040C) WhcAg construct

SEQ ID NO: 11539 - protein, 1301 aa, Artificial Sequence; identical to SEQ ID NO: 11271
  SARS-CoV-2/Wuhan/HBCDC-HB-02/2020__EPI_ISL_412978 spike protein (1-1147)(A890C_V1040C) WhcAg construct

SEQ ID NO: 11540 - protein, 1301 aa, Artificial Sequence; identical to SEQ ID NO: 11272
  SARS-CoV-2/Australia/QLD02/2020__EPI_ISL_407896 spike protein (1-1147)(A890C_V1040C) WhcAg construct

SEQ ID NO: 11541 - protein, 1301 aa, Artificial Sequence; identical to SEQ ID NO: 11273
  SARS-CoV-2/India/1-31/2020__EPI_ISL_413523 spike protein (1-1147)(A890C_V1040C) WhcAg construct

SEQ ID NO: 11542 - protein, 1301 aa, Artificial Sequence; identical to SEQ ID NO: 11274
  SARS-CoV-2/Guangdong/GD2020087-P0008/2020__EPI_ISL_413863 spike protein (1-1147)(A890C_V1040C) WhcAg construct

SEQ ID NO: 11543 - protein, 1301 aa, Artificial Sequence; identical to SEQ ID NO: 11275
  SARS-CoV-2/Sweden/01/2020__EPI_ISL_411951 spike protein (1-1147)(A890C_V1040C) WhcAg construct

SEQ ID NO: 11544 - protein, 1301 aa, Artificial Sequence; identical to SEQ ID NO: 11276
  SARS-CoV-2/Tianmen/HBCDC-HB-07/2020__EPI_ISL_412983 spike protein (1-1147)(A890C_V1040C) WhcAg construct

SEQ ID NO: 11545 - protein, 1301 aa, Artificial Sequence; identical to SEQ ID NO: 11277
  SARS-CoV-2/Hong Kong/case42_VM20002493/2020__EPI_ISL_414527 spike protein (1-1147)(A890C_V1040C) WhcAg construct

SEQ ID NO: 11546 - protein, 1301 aa, Artificial Sequence; identical to SEQ ID NO: 11278
  SARS-CoV-2/USA/CruiseA-23/2020__EPI_ISL_414482 spike protein (1-1147)(A890C_V1040C) WhcAg construct

SEQ ID NO: 11547 - protein, 1301 aa, Artificial Sequence; identical to SEQ ID NO: 11279
  SARS-CoV-2/Hong Kong/case85_VM20002868/2020__EPI_ISL_414519 spike protein (1-1147)(A890C_V1040C) WhcAg construct

SEQ ID NO: 11548 - protein, 1301 aa, Artificial Sequence; identical to SEQ ID NO: 11270
  SARS-CoV-2/England/200990660/2020__EPI_ISL_414523 spike protein (1-1147)(A890C_V1040C) WhcAg construct

SEQ ID NO: 11549 - protein, 1301 aa, Artificial Sequence; identical to SEQ ID NO: 11281
  SARS-CoV-2/Australia/NSW09/2020__EPI_ISL_413595 spike protein (1-1147)(A890C_V1040C) WhcAg construct

SEQ ID NO: 11550 - protein, 1301 aa, Artificial Sequence; identical to SEQ ID NO: 11262
  SARS-CoV-2/Australia/NSW10/2020__EPI_ISL_413596 spike protein (1-1147)(A890C_V1040C) WhcAg construct

SEQ ID NO: 11551 - protein, 1301 aa, Artificial Sequence; identical to SEQ ID NO: 11283
  SARS-CoV-2/Switzerland/1000477797/2020__EPI_ISL_413023 spike protein (1-1147)(A890C_V1040C) WhcAg construct

SEQ ID NO: 11552 - protein, 1301 aa, Artificial Sequence; identical to SEQ ID NO: 11284
  SARS-CoV-2/Belgium/BA-02291/2020__EPI_ISL_415159 spike protein (1-1147)(A890C_V1040C) WhcAg construct

SEQ ID NO: 11553 - protein, 1301 aa, Artificial Sequence; identical to SEQ ID NO: 11285
  SARS-CoV-2/USA/WA8-UW5/2020__EPI_ISL_413486 spike protein (1-1147)(A890C_V1040C) WhcAg construct

SEQ ID NO: 11554 - protein, 1301 aa, Artificial Sequence; identical to SEQ ID NO: 11286
  SARS-CoV-2/England/20102000506/2020__EPI_ISL_415147 spike protein (1-1147)(A890C_V1040C) WhcAg construct

SEQ ID NO: 11555 - protein, 1301 aa, Artificial Sequence; identical to SEQ ID NO: 11287
  SARS-CoV-2/Belgium/VAG-03013/2020__EPI_ISL_415155 spike protein (1-1147)(A890C_V1040C) WhcAg construct

SEQ ID NO: 11556 - protein, 1301 aa, Artificial Sequence; identical to SEQ ID NO: 11288
  SARS-CoV-2/Belgium/BC-03016/2020__EPI_ISL_415157 spike protein (1-1147)(A890C_V1040C) WhcAg construct

SEQ ID NO: 11557 - protein, 1301 aa, Artificial Sequence; identical to SEQ ID NO: 11289
  SARS-CoV-2/Germany/BavPat3/2020__EPI_ISL_414521 spike protein (1-1147)(A890C_V1040C) WhcAg construct

SEQ ID NO: 11558 - protein, 1301 aa, Artificial Sequence; identical to SEQ ID NO: 11290
  SARS-CoV-2/France/HF1805/2020__EPI_ISL_414628 spike protein (1-1147)(A890C_V1040C) WhcAg construct

SEQ ID NO: 11559 - protein, 1301 aa, Artificial Sequence; identical to SEQ ID NO: 11291
  SARS-CoV-2/Netherlands/ZuidHolland_9/2020__EPI_ISL_414445 spike protein (1-1147)(A890C_V1040C) WhcAg construct

SEQ ID NO: 11560 - protein, 1301 aa, Artificial Sequence; identical to SEQ ID NO: 11292
  SARS-CoV-2/Finland/FIN03032020A/2020__EPI_ISL_413602 spike protein (1-1147)(A890C_V1040C) WhcAg construct

SEQ ID NO: 11561 - protein, 1301 aa, Artificial Sequence; identical to SEQ ID NO: 11293
  SARS-CoV-2/France/GE1977/2020__EPI_ISL_414632 spike protein (1-1147)(A890C_V1040C) WhcAg construct

SEQ ID NO: 11562 - protein, 1301 aa, Artificial Sequence; identical to SEQ ID NO: 11294
  SARS-CoV-2/Finland/FIN-313/2020__EPI_ISL_414641 spike protein (1-1147)(A890C_V1040C) WhcAg construct

SEQ ID NO: 11563 - protein, 1301 aa, Artificial Sequence; identical to SEQ ID NO: 11295
  SARS-CoV-2/Netherlands/ZuidHolland_2/2020__EPI_ISL_414556 spike protein (1-1147)(A890C_V1040C) WhcAg construct

SEQ ID NO: 11564 - protein, 1301 aa, Artificial Sequence; identical to SEQ ID NO: 11296
  SARS-CoV-2/USA/WA-UW31/2020__EPI_ISL_414618 spike protein (1-1147)(A890C_V1040C) WhcAg construct

SEQ ID NO: 11565 - protein, 1301 aa, Artificial Sequence; identical to SEQ ID NO: 11297
  SARS-CoV-2/South Korea/SNU01/2020__EPI_ISL_411929 spike protein (1-1147)(A890C_V1040C) WhcAg construct

SEQ ID NO: 11566 - protein, 1301 aa, Artificial Sequence; identical to SEQ ID NO: 11298
  SARS-CoV-2/China/WF0004/2020__EPI_ISL_413694 spike protein (1-1147)(A890C_V1040C) WhcAg construct

SEQ ID NO: 11567 - protein, 1301 aa, Artificial Sequence; identical to SEQ ID NO: 11299
  SARS-CoV-2/China/WF0028/2020__EPI_ISL_413791 spike protein (1-1147)(A890C_V1040C) WhcAg construct

SEQ ID NO: 11568 - protein, 1301 aa, Artificial Sequence; identical to SEQ ID NO: 11300
  SARS-CoV-2/2019-nCoV/USA-CruiseA-18/2020__MT159716.1 spike protein (1-1147)(A890C_V1040C) WhcAg construct

SEQ ID NO: 11569 - protein, 1301 aa, Artificial Sequence; identical to SEQ ID NO: 11301
  SARS-CoV-2/SARS-CoV-2/Yunnan-01/human/2020/CHN__MT049951.1 spike protein (1-1147)(A890C_V1040C) WhcAg construct

SEQ ID NO: 11570 - protein, 1301 aa, Artificial Sequence; identical to SEQ ID NO: 11302
  SARS-CoV-2/USA/WA-UW292/2020__EPI_ISL_418077 spike protein (1-1147)(A890C_V1040C) WhcAg construct

SEQ ID NO: 11571 - protein, 1301 aa, Artificial Sequence; identical to SEQ ID NO: 11303
  SARS-CoV-2/Iceland/192/2020__EPI_ISL_417819 spike protein (1-1147)(A890C_V1040C) WhcAg construct

SEQ ID NO: 11572 - protein, 1301 aa, Artificial Sequence; identical to SEQ ID NO: 11304
  SARS-CoV-2/Belgium/ULG-6939/2020__EPI_ISL_417020 spike protein (1-1147)(A890C_V1040C) WhcAg construct

SEQ ID NO: 11573 - protein, 1301 aa, Artificial Sequence; identical to SEQ ID NO: 11305
  SARS-CoV-2/France/HF2496/2020__EPI_ISL_418231 spike protein (1-1147)(A890C_V1040C) WhcAg construct

SEQ ID NO: 11574 - protein, 1301 aa, Artificial Sequence; identical to SEQ ID NO: 11306
  SARS-CoV-2/USA/WA-UW291/2020__EPI_ISL_418076 spike protein (1-1147)(A890C_V1040C) WhcAg construct

SEQ ID NO: 11575 - protein, 1301 aa, Artificial Sequence; identical to SEQ ID NO: 11270
  SARS-CoV-2/Portugal/PT0034/2020__EPI_ISL_418019 spike protein (1-1147)(A890C_V1040C) WhcAg construct

SEQ ID NO: 11576 - protein, 1301 aa, Artificial Sequence; identical to SEQ ID NO: 11262
  SARS-CoV-2/Iceland/202/2020__EPI_ISL_417750 spike protein (1-1147)(A890C_V1040C) WhcAg construct

SEQ ID NO: 11577 - protein, 1301 aa, Artificial Sequence; identical to SEQ ID NO: 11309
  SARS-CoV-2/USA/WA-UW261/2020__EPI_ISL_418046 spike protein (1-1147)(A890C_V1040C) WhcAg construct

SEQ ID NO: 11578 - protein, 1301 aa, Artificial Sequence; identical to SEQ ID NO: 11310
  SARS-CoV-2/Portugal/PT0035/2020__EPI_ISL_418020 spike protein (1-1147)(A890C_V1040C) WhcAg construct

SEQ ID NO: 11579 - protein, 1301 aa, Artificial Sequence; identical to SEQ ID NO: 11311
  SARS-CoV-2/USA/NY-NYUMC7/2020__EPI_ISL_418192 spike protein (1-1147)(A890C_V1040C) WhcAg construct

SEQ ID NO: 11580 - protein, 1301 aa, Artificial Sequence; identical to SEQ ID NO: 11312
  SARS-CoV-2/Iceland/189/2020__EPI_ISL_417709 spike protein (1-1147)(A890C_V1040C) WhcAg construct

SEQ ID NO: 11581 - protein, 1301 aa, Artificial Sequence; identical to SEQ ID NO: 11313
  SARS-CoV-2/Australia/NSW56/2020__EPI_ISL_417408 spike protein (1-1147)(A890C_V1040C) WhcAg construct

SEQ ID NO: 11582 - protein, 1301 aa, Artificial Sequence; identical to SEQ ID NO: 11314
  SARS-CoV-2/Iceland/280/2020__EPI_ISL_417608 spike protein (1-1147)(A890C_V1040C) WhcAg construct

SEQ ID NO: 11583 - protein, 1301 aa, Artificial Sequence; identical to SEQ ID NO: 11270
  SARS-CoV-2/Iceland/247/2020__EPI_ISL_417575 spike protein (1-1147)(A890C_V1040C) WhcAg construct

SEQ ID NO: 11584 - protein, 1301 aa, Artificial Sequence; identical to SEQ ID NO: 11316
  SARS-CoV-2/Iceland/238/2020__EPI_ISL_417566 spike protein (1-1147)(A890C_V1040C) WhcAg construct

SEQ ID NO: 11585 - protein, 1301 aa, Artificial Sequence; identical to SEQ ID NO: 11317
  SARS-CoV-2/Greece/16/2020__EPI_ISL_418265 spike protein (1-1147)(A890C_V1040C) WhcAg construct

SEQ ID NO: 11586 - protein, 1301 aa, Artificial Sequence; identical to SEQ ID NO: 11318
  SARS-CoV-2/Iceland/319/2020__EPI_ISL_417648 spike protein (1-1147)(A890C_V1040C) WhcAg construct

SEQ ID NO: 11587 - protein, 1301 aa, Artificial Sequence; identical to SEQ ID NO: 11319
  SARS-CoV-2/Congo/94/2020__EPI_ISL_417947 spike protein (1-1147)(A890C_V1040C) WhcAg construct

SEQ ID NO: 11588 - protein, 1301 aa, Artificial Sequence; identical to SEQ ID NO: 11320
  SARS-CoV-2/Congo/158/2020__EPI_ISL_417950 spike protein (1-1147)(A890C_V1040C) WhcAg construct

SEQ ID NO: 11589 - protein, 1301 aa, Artificial Sequence; identical to SEQ ID NO: 11321
  SARS-CoV-2/USA/UT-00034/2020__EPI_ISL_417977 spike protein (1-1147)(A890C_V1040C) WhcAg construct

SEQ ID NO: 11590 - protein, 1301 aa, Artificial Sequence; identical to SEQ ID NO: 11322
  SARS-CoV-2/USA/UT-00033/2020__EPI_ISL_417976 spike protein (1-1147)(A890C_V1040C) WhcAg construct

SEQ ID NO: 11591 - protein, 1301 aa, Artificial Sequence; identical to SEQ ID NO: 11323
  SARS-CoV-2/USA/WI-13/2020__EPI_ISL_417516 spike protein (1-1147)(A890C_V1040C) WhcAg construct

SEQ ID NO: 11592 - protein, 1300 aa, Artificial Sequence; identical to SEQ ID NO: 11324
  SARS-CoV-2/India/1-27/2020__EPI_ISL_413522 spike protein (1-1146)(A889C_V1039C) WhcAg construct

SEQ ID NO: 11593 - protein, 1295 aa, Artificial Sequence; identical to SEQ ID NO: 11325
  SARS-CoV-2/pangolin/Guangxi/P4L/2017__EPI_ISL_410538 spike protein (1-1141)(A884C_V1034C) WhcAg construct

SEQ ID NO: 11594 - protein, 1295 aa, Artificial Sequence; identical to SEQ ID NO: 11326
  SARS-CoV-2/pangolin/Guangxi/P5L/2017__EPI_ISL_410540 spike protein (1-1141)(A884C_V1034C) WhcAg construct

SEQ ID NO: 11595 - protein, 1295 aa, Artificial Sequence; identical to SEQ ID NO: 11327
  SARS-CoV-2/pangolin/Guangxi/P5E/2017__EPI_ISL_410541 spike protein (1-1141)(A884C_V1034C) WhcAg construct

SEQ ID NO: 11596 - protein, 1293 aa, Artificial Sequence; identical to SEQ ID NO: 11328
  SARS-CoV-2/pangolin/Guangxi/P1E/2017__EPI_ISL_410539 spike protein (1-1139)(A882C_V1032C) WhcAg construct

SEQ ID NO: 11597 - protein, 1301 aa, Artificial Sequence
  SARS-CoV-2/Wuhan/WIV05/2019__EPI_ISL_402128 spike protein (1-1147)(T874C_S1055C) WhcAg construct
MFVFLVLLPLVSSQCVNLTTRTQLPPAYTNSFTRGVYYPDKVFRSSVLHSTQDLFLPFFSNVTWFHAIHVSGTNGTKRFDNPVLPFNDGVYFASTEKSNIIRGWIFGTTLDSKTQSLLIVNNATNVVIKVCEFQFCNDPFLGVYYHKNNKSWMESEFRVYSSANNCTFEYVSQPFLMDLEGKQGNFKNLREFVFKNIDGYFKIYSKHTPINLVRDLPQGFSALEPLVDLPIGINITRFQTLLALHRSYLTPGDSSSGWTAGAAAYYVGYLQPRTFLLKYNENGTITDAVDCALDPLSETKCTLKSFTVEKGIYQTSNFRVQPTESIVRFPNITNLCPFGEVFNATRFASVYAWNRKRISNCVADYSVLYNSASFSTFKCYGVSPTKLNDLCFTNVYADSFVIRGDEVRQIAPGQTGKIADYNYKLPDDFTGCVIAWNSNNLDSKVGGNYNYLYRLFRKSNLKPFERDISTEIYQAGSTPCNGVEGFNCYFPLQSYGFQPTNGVGYQPYRVVVLSFELLHAPATVCGPKKSTNLVKNKCVNFNFNGLTGTGVLTESNKKFLPFQQFGRDIADTTDAVRDPQTLEILDITPCSFGGVSVITPGTNTSNQVAVLYQDVNCTEVPVAIHADQLTPTWRVYSTGSNVFQTRAGCLIGAEHVNNSYECDIPIGAGICASYQTQTNSPRRARSVASQSIIAYTMSLGAENSVAYSNNSIAIPTNFTISVTTEILPVSMTKTSVDCTMYICGDSTECSNLLLQYGSFCTQLNRALTGIAVEQDKNTQEVFAQVKQIYKTPPIKDFGGFNFSQILPDPSKPSKRSFIEDLLFNKVTLADAGFIKQYGDCLGDIAARDLICAQKFNGLTVLPPLLTDEMIAQYCSALLAGTITSGWTFGAGAALQIPFAMQMAYRFNGIGVTQNVLYENQKLIANQFNSAIGKIQDSLSSTASALGKLQDVVNQNAQALNTLVKQLSSNFGAISSVLNDILSRLDKVEAEVQIDRLITGRLQSLQTYVTQQLIRAAEIRASANLAATKMSECVLGQSKRVDFCGKGYHLMSFPQCAPHGVVFLHVTYVPAQEKNFTTAPAICHDGKAHFPREGVFVSNGTHWFVTQRNFYEPQIITTDNTFVSGNCDVVIGIVNNTVYDPLQPELDSGGGGSDIDPYKEFGSSYQLLNFLPLDFFPDLNALVDTATALYEEELTGREHCSPHHTAIRQALVCWDELTKLIAWMSSNITSEQVRTIIVNHVNDTWGLKVRQSLWFHLSCLTFGQHTVQEFLVSFGVWIRTPAPYRPPNAPILSTLPEHTVIC

SEQ ID NO: 11598 - protein, 1297 aa, Artificial Sequence
  SARS-CoV-2/bat/Yunnan/RaTG13/2013__EPI_ISL_402131 spike protein (1-1143)(T870C_S1051C) WhcAg construct
MFVFLVLLPLVSSQCVNLTTRTQLPPAYTNSSTRGVYYPDKVFRSSVLHLTQDLFLPFFSNVTWFHAIHVSGTNGIKRFDNPVLPFNDGVYFASTEKSNIIRGWIFGTTLDSKTQSLLIVNNATNVVIKVCEFQFCNDPFLGVYYHKNNKSWMESEFRVYSSANNCTFEYVSQPFLMDLEGKQGNFKNLREFVFKNIDGYFKIYSKHTPINLVRDLPPGFSALEPLVDLPIGINITRFQTLLALHRSYLTPGDSSSGWTAGAAAYYVGYLQPRTFLLKYNENGTITDAVDCALDPLSETKCTLKSFTVEKGIYQTSNFRVQPTDSIVRFPNITNLCPFGEVFNATTFASVYAWNRKRISNCVADYSVLYNSTSFSTFKCYGVSPTKLNDLCFTNVYADSFVITGDEVRQIAPGQTGKIADYNYKLPDDFTGCVIAWNSKHIDAKEGGNFNYLYRLFRKANLKPFERDISTEIYQAGSKPCNGQTGLNCYYPLYRYGFYPTDGVGHQPYRVVVLSFELLNAPATVCGPKKSTNLVKNKCVNFNFNGLTGTGVLTESNKKFLPFQQFGRDIADTTDAVRDPQTLEILDITPCSFGGVSVITPGTNASNQVAVLYQDVNCTEVPVAIHADQLTPTWRVYSTGSNVFQTRAGCLIGAEHVNNSYECDIPIGAGICASYQTQTNSRSVASQSIIAYTMSLGAENSVAYSNNSIAIPTNFTISVTTEILPVSMTKTSVDCTMYICGDSTECSNLLLQYGSFCTQLNRALTGIAVEQDKNTQEVFAQVKQIYKTPPIKDFGGFNFSQILPDPSKPSKRSFIEDLLFNKVTLADAGFIKQYGDCLGDIAARDLICAQKFNGLTVLPPLLTDEMIAQYCSALLAGTITSGWTFGAGAALQIPFAMQMAYRFNGIGVTQNVLYENQKLIANQFNSAIGKIQDSLSSTASALGKLQDVVNQNAQALNTLVKQLSSNFGAISSVLNDILSRLDKVEAEVQIDRLITGRLQSLQTYVTQQLIRAAEIRASANLAATKMSECVLGQSKRVDFCGKGYHLMSFPQCAPHGVVFLHVTYVPAQEKNFTTAPAICHDGKAHFPREGVFVSNGTHWFVTQRNFYEPQIITTDNTFVSGSCDVVIGIVNNTVYDPLQPELDSGGGGSDIDPYKEFGSSYQLLNFLPLDFFPDLNALVDTATALYEEELTGREHCSPHHTAIRQALVCWDELTKLIAWMSSNITSEQVRTIIVNHVNDTWGLKVRQSLWFHLSCLTFGQHTVQEFLVSFGVWIRTPAPYRPPNAPILSTLPEHTVIC

SEQ ID NO: 11599 - protein, 1301 aa, Artificial Sequence
  SARS-CoV-2/Wuhan/HBCDC-HB-01/2019__EPI_ISL_402132 spike protein (1-1147)(T874C_S1055C) WhcAg construct
MFVFLVLLPLVSSQCVNLTTRTQLPPAYTNSITRGVYYPDKVFRSSVLHSTQDLFLPFFSNVTWFHAIHVSGTNGTKRFDNPVLPFNDGVYFASTEKSNIIRGWIFGTTLDSKTQSLLIVNNATNVVIKVCEFQFCNDPFLGVYYHKNNKSWMESEFRVYSSANNCTFEYVSQPFLMDLEGKQGNFKNLREFVFKNIDGYFKIYSKHTPINLVRDLPQGFSALEPLVDLPIGINITRFQTLLALHRSYLTPGDSSSGWTAGAAAYYVGYLQPRTFLLKYNENGTITDAVDCALDPLSETKCTLKSFTVEKGIYQTSNFRVQPTESIVRFPNITNLCPFGEVFNATRFASVYAWNRKRISNCVADYSVLYNSASFSTFKCYGVSPTKLNDLCFTNVYADSFVIRGDEVRQIAPGQTGKIADYNYKLPDDFTGCVIAWNSNNLDSKVGGNYNYLYRLFRKSNLKPFERDISTEIYQAGSTPCNGVEGFNCYFPLQSYGFQPTNGVGYQPYRVVVLSFELLHAPATVCGPKKSTNLVKNKCVNFNFNGLTGTGVLTESNKKFLPFQQFGRDIADTTDAVRDPQTLEILDITPCSFGGVSVITPGTNTSNQVAVLYQDVNCTEVPVAIHADQLTPTWRVYSTGSNVFQTRAGCLIGAEHVNNSYECDIPIGAGICASYQTQTNSPRRARSVASQSIIAYTMSLGAENSVAYSNNSIAIPTNFTISVTTEILPVSMTKTSVDCTMYICGDSTECSNLLLQYGSFCTQLNRALTGIAVEQDKNTQEVFAQVKQIYKTPPIKDFGGFNFSQILPDPSKPSKRSFIEDLLFNKVTLADAGFIKQYGDCLGDIAARDLICAQKFNGLTVLPPLLTDEMIAQYCSALLAGTITSGWTFGAGAALQIPFAMQMAYRFNGIGVTQNVLYENQKLIANQFNSAIGKIQDSLSSTASALGKLQDVVNQNAQALNTLVKQLSSNFGAISSVLNDILSRLDKVEAEVQIDRLITGRLQSLQTYVTQQLIRAAEIRASANLAATKMSECVLGQSKRVDFCGKGYHLMSFPQCAPHGVVFLHVTYVPAQEKNFTTAPAICHDGKAHFPREGVFVSNGTHWFVTQRNFYEPQIITTDNTFVSGNCDVVIGIVNNTVYDPLQPELDSGGGGSDIDPYKEFGSSYQLLNFLPLDFFPDLNALVDTATALYEEELTGREHCSPHHTAIRQALVCWDELTKLIAWMSSNITSEQVRTIIVNHVNDTWGLKVRQSLWFHLSCLTFGQHTVQEFLVSFGVWIRTPAPYRPPNAPILSTLPEHTVIC

SEQ ID NO: 11600 - protein, 1301 aa, Artificial Sequence
  SARS-CoV-2/Guangdong/20SF028/2020__EPI_ISL_403936 spike protein (1-1147)(T874C_S1055C) WhcAg construct
MFVFLVLLPLVSSQCVNLTTRTQLPPAYTNSFTRGVYYPDKVFRSSVLYSTQDLFLPFFSNVTWFHAIHVSGTNGTKRFDNPVLPFNDGVYFASTEKSNIIRGWIFGTTLDSKTQSLLIVNNATNVVIKVCEFQFCNDPFLGVYYHKNNKSWMESEFRVYSSANNCTFEYVSQPFLMDLEGKQGNFKNLREFVFKNIDGYFKIYSKHTPINLVRDLPQGFSALEPLVDLPIGINITRFQTLLALHRSYLTPGDSSSGWTAGAAAYYVGYLQPRTFLLKYNENGTITDAVDCALDPLSETKCTLKSFTVEKGIYQTSNFRVQPTESIVRFPNITNLCPFGEVFNATRFASVYAWNRKRISNCVADYSVLYNSASFSTFKCYGVSPTKLNDLCFTNVYADSFVIRGDEVRQIAPGQTGKIADYNYKLPDDFTGCVIAWNSNNLDSKVGGNYNYLYRLFRKSNLKPFERDISTEIYQAGSTPCNGVEGFNCYFPLQSYGFQPTNGVGYQPYRVVVLSFELLHAPATVCGPKKSTNLVKNKCVNFNFNGLTGTGVLTESNKKFLPFQQFGRDIADTTDAVRDPQTLEILDITPCSFGGVSVITPGTNTSNQVAVLYQDVNCTEVPVAIHADQLTPTWRVYSTGSNVFQTRAGCLIGAEHVNNSYECDIPIGAGICASYQTQTNSPRRARSVASQSIIAYTMSLGAENSVAYSNNSIAIPTNFTISVTTEILPVSMTKTSVDCTMYICGDSTECSNLLLQYGSFCTQLNRALTGIAVEQDKNTQEVFAQVKQIYKTPPIKDFGGFNFSQILPDPSKPSKRSFIEDLLFNKVTLADAGFIKQYGDCLGDIAARDLICAQKFNGLTVLPPLLTDEMIAQYCSALLAGTITSGWTFGAGAALQIPFAMQMAYRFNGIGVTQNVLYENQKLIANQFNSAIGKIQDSLSSTASALGKLQDVVNQNAQALNTLVKQLSSNFGAISSVLNDILSRLDKVEAEVQIDRLITGRLQSLQTYVTQQLIRAAEIRASANLAATKMSECVLGQSKRVDFCGKGYHLMSFPQCAPHGVVFLHVTYVPAQEKNFTTAPAICHDGKAHFPREGVFVSNGTHWFVTQRNFYEPQIITTDNTFVSGNCDVVIGIVNNTVYDPLQPELDSGGGGSDIDPYKEFGSSYQLLNFLPLDFFPDLNALVDTATALYEEELTGREHCSPHHTAIRQALVCWDELTKLIAWMSSNITSEQVRTIIVNHVNDTWGLKVRQSLWFHLSCLTFGQHTVQEFLVSFGVWIRTPAPYRPPNAPILSTLPEHTVIC

SEQ ID NO: 11601 - protein, 1301 aa, Artificial Sequence
  SARS-CoV-2/Shenzhen/SZTH-001/2020__EPI_ISL_406592 spike protein (1-1147)(T874C_S1055C) WhcAg construct
MFVFLVLLPLVSSQCVNLTTRTQLPPAYTNSFTRGVYYPDKVFRSSVLHSTQDLFLPFFSNVTWFHAIHVSGTNGTKRFDNPVLPFNDGVYFASTEKSNIIRGWIFGTTLDSKTQSLLIVNNATNVVIKVCEFQFCNDPFLGVYYHKNNKSWMESEFRVYSSANNCTFEYVSQPFLMDLEGKQGNFKNLREFVFKNIDGYFKIYSKHTPINLVRDLPQGFSALEPLVDLPIGINITRFQTLLALHRSYLTPGDSSSGWTAGAAAYYVGYLQPRTFLLKYNENGTITDAVDCALDPLSETKCTLKSFTVEKGIYQTSNFRVQPTESIVRFPNITNLCPFGEVFNATRFASVYAWNRKRISNCVADYSVLYNSASFSTFKCYGVSPTKLNDLCFTNVYADSFVIRGDEVRQIAPGQTGKIADYNYKLPDDFTGCVIAWNSNNLDSKVGGNYNYLYRLFRKSNLKPFERDISTEIYQAGSTPCNGVEGFNCYFPLQSYGFQPTNGVGYQPYRVVVLSFELLHAPATVCGPKKSTNLVKNKCVNFNFNGLTGTGVLTESNKKFLPFQQFGRDIADTTDAVRDPQTLEILDITPCSFGGVSVITPGTNTSNQVAVLYQDVNCTEVPVAIHADQLTPTWRVYSTGSNVFQTRAGCLIGAEHVNNSYECDIPIGAGICASYQTQTNSPRRARSVASQSIIAYTMSLGAENSVAYSNNSIAIPTNFTISVTTEILPVSMTKTSVDCTMYICGDSTECSNLLLQYGSFCTQLNRALTGIAVEQDKNTQEVFAQVKQIYKTPPIKDFGGFNFSQILPDPSKPSKRSFIEDLLFNKVTLADAGFIKQYGDCLGDIAARDLICAQKFNGLTVLPPLLTDEMIAQYCSALLAGTITSGWTFGAGAALQIPFAMQMAYRFNGIGVTQNVLYENQKLIANQFNSAIGKIQDSLSSTASALGKLQDVVNQNAQALNTLVKQLSSNFGAISSVLNDILSRLDKVEAEVQIDRLITGRLQSLQTYVTQQLIRAAEIRASANLAATKMSECVLGQSKRVDFCGKGYHLMSFPQCAPHGVVFLHVTYVPAQEKNFTTAPAICHDGKAHFPREGVFVSNGTHWFVTQRNFYEPQIITTDNTFVSGNCDVLIGIVNNTVYDPLQPELDSGGGGSDIDPYKEFGSSYQLLNFLPLDFFPDLNALVDTATALYEEELTGREHCSPHHTAIRQALVCWDELTKLIAWMSSNITSEQVRTIIVNHVNDTWGLKVRQSLWFHLSCLTFGQHTVQEFLVSFGVWIRTPAPYRPPNAPILSTLPEHTVIC

SEQ ID NO: 11602 - protein, 1301 aa, Artificial Sequence
  SARS-CoV-2/Shenzhen/SZTH-004/2020__EPI_ISL_406595 spike protein (1-1147)(T874C_S1055C) WhcAg construct
MFVFLVLLPLVSSQCVNLTTRTQLPPAYTNSFTRGVYYPDKVFRSSVLHSTQDLFLPFFSNVTWFHAIHVSGTNGTKRFDNPVLPFNDGVYFASTEKSNIIRGWIFGTTLDSKTQSLLIVNNATNVVIKVCEFQFCNDPFLGVYYHKNNKSWMESEFRVYSSANNCTFEYVSQPFLMDLEGKQGNFKNLREFVFKNIDGYFKIYSKHTPINLVRDLPQGFSALEPLVDLPIGINITRFQTLLALHRSYLTPGDSSSGWTAGAAAYYVGYLQPRTFLLKYNENGTITDAVDCALDPLSETKCTLKSFTVEKGIYQTSNFRVQPTESIVRFPNITNLCPFGEVFNATRFASVYAWDRKRISNCVAYYSVLYNSASFSTFKCYGVSPTKLNDLCFTNVYADSFVIRGDEVRQIAPGQTGKIADYNYKLPDDFTGCVIAWNSNNLDSKVGGNYNYLYRLFRKSNLKPFERDISTEIYQAGSTPCNGVEGFNCYFPLQSYGFQPTNGVGYQPYRVVVLSFELLHAPATVCGPKKSTNLVKNKCVNFNFNGLTGTGVLTESNKKFLPFQQFGRDIADTTDAVRDPQTLEILDITPCSFGGVSVITPGTNTSNQVAVLYQDVNCTEVPVAIHADQLTPTWRVYSTGSNVFQTRAGCLIGAEHVNNSYECDIPIGAGICASYQTQTNSPRRARSVASQSIIAYTMSLGAENSVAYSNNSIAIPTNFTISVTTEILPVSMTKTSVDCTMYICGDSTECSNLLLQYGSFCTQLNRALTGIAVEQDKNTQEVFAQVKQIYKTPPIKDFGGFNFSQILPDPSKPSKRSFIEDLLFNKVTLADAGFIKQYGDCLGDIAARDLICAQKFNGLTVLPPLLTDEMIAQYCSALLAGTITSGWTFGAGAALQIPFAMQMAYRFNGIGVTQNVLYENQKLIANQFNSAIGKIQDSLSSTASALGKLQDVVNQNAQALNTLVKQLSSNFGAISSVLNDILSRLDKVEAEVQIDRLITGRLQSLQTYVTQQLIRAAEIRASANLAATKMSECVLGQSKRVDFCGKGYHLMSFPQCAPHGVVFLHVTYVPAQEKNFTTAPAICHDGKAHFPREGVFVSNGTHWFVTQRNFYEPQIITTDNTFVSGNCDVVIGIVNNTVYDPLQPELDSGGGGSDIDPYKEFGSSYQLLNFLPLDFFPDLNALVDTATALYEEELTGREHCSPHHTAIRQALVCWDELTKLIAWMSSNITSEQVRTIIVNHVNDTWGLKVRQSLWFHLSCLTFGQHTVQEFLVSFGVWIRTPAPYRPPNAPILSTLPEHTVIC

SEQ ID NO: 11603 - protein, 1301 aa, Artificial Sequence
  SARS-CoV-2/France/IDF0372/2020__EPI_ISL_406596 spike protein (1-1147)(T874C_S1055C) WhcAg construct
MFVFLVLLPLVSSQCVNLTTRTQLPPAYTNSFTRGVYYPDKVFRSSVLHSTQDLFLPFFSNVTWFHAIHVSGTNGTKRFDNPVLPFNDGVYFASTEKSNIIRGWIFGTTLDSKTQSLLIVNNATNVVIKVCEFQFCNDPFLGVYYHKNNKSWMESEFRVYSSANNCTFEYVSQPFLMDLEGKQGNFKNLREFVFKNIDGYFKIYSKHTPINLVRDLPQGFSALEPLVDLPIGINITRFQTLLALHRSYLTPGDSSSGWTAGAAAYYVGYLQPRTFLLKYNENGTITDAVDCALDPLSETKCTLKSFTVEKGIYQTSNFRVQPTESIVRFPNITNLCPFGEVFNATRFASVYAWNRKRISNCVADYSFLYNSASFSTFKCYGVSPTKLNDLCFTNVYADSFVIRGDEVRQIAPGQTGKIADYNYKLPDDFTGCVIAWNSNNLDSKVGGNYNYLYRLFRKSNLKPFERDISTEIYQAGSTPCNGVEGFNCYFPLQSYGFQPTNGVGYQPYRVVVLSFELLHAPATVCGPKKSTNLVKNKCVNFNFNGLTGTGVLTESNKKFLPFQQFGRDIADTTDAVRDPQTLEILDITPCSFGGVSVITPGTNTSNQVAVLYQDVNCTEVPVAIHADQLTPTWRVYSTGSNVFQTRAGCLIGAEHVNNSYECDIPIGAGICASYQTQTNSPRRARSVASQSIIAYTMSLGAENSVAYSNNSIAIPTNFTISVTTEILPVSMTKTSVDCTMYICGDSTECSNLLLQYGSFCTQLNRALTGIAVEQDKNTQEVFAQVKQIYKTPPIKDFGGFNFSQILPDPSKPSKRSFIEDLLFNKVTLADAGFIKQYGDCLGDIAARDLICAQKFNGLTVLPPLLTDEMIAQYCSALLAGTITSGWTFGAGAALQIPFAMQMAYRFNGIGVTQNVLYENQKLIANQFNSAIGKIQDSLSSTASALGKLQDVVNQNAQALNTLVKQLSSNFGAISSVLNDILSRLDKVEAEVQIDRLITGRLQSLQTYVTQQLIRAAEIRASANLAATKMSECVLGQSKRVDFCGKGYHLMSFPQCAPHGVVFLHVTYVPAQEKNFTTAPAICHDGKAHFPREGVFVSNGTHWFVTQRNFYEPQIITTDNTFVSGNCDVVIGIVNNTVYDPLQPELDSGGGGSDIDPYKEFGSSYQLLNFLPLDFFPDLNALVDTATALYEEELTGREHCSPHHTAIRQALVCWDELTKLIAWMSSNITSEQVRTIIVNHVNDTWGLKVRQSLWFHLSCLTFGQHTVQEFLVSFGVWIRTPAPYRPPNAPILSTLPEHTVIC

SEQ ID NO: 11604 - protein, 1301 aa, Artificial Sequence
  SARS-CoV-2/Australia/VIC01/2020__EPI_ISL_406844 spike protein (1-1147)(T874C_S1055C) WhcAg construct
MFVFLVLLPLVSSQCVNLTTRTQLPPAYTNSFTRGVYYPDKVFRSSVLHSTQDLFLPFFSNVTWFHAIHVSGTNGTKRFDNPVLPFNDGVYFASTEKSNIIRGWIFGTTLDSKTQSLLIVNNATNVVIKVCEFQFCNDPFLGVYYHKNNKSWMESEFRVYSSANNCTFEYVSQPFLMDLEGKQGNFKNLREFVFKNIDGYFKIYSKHTPINLVRDLPQGFSALEPLVDLPIGINITRFQTLLALHRRYLTPGDSSSGWTAGAAAYYVGYLQPRTFLLKYNENGTITDAVDCALDPLSETKCTLKSFTVEKGIYQTSNFRVQPTESIVRFPNITNLCPFGEVFNATRFASVYAWNRKRISNCVADYSVLYNSASFSTFKCYGVSPTKLNDLCFTNVYADSFVIRGDEVRQIAPGQTGKIADYNYKLPDDFTGCVIAWNSNNLDSKVGGNYNYLYRLFRKSNLKPFERDISTEIYQAGSTPCNGVEGFNCYFPLQSYGFQPTNGVGYQPYRVVVLSFELLHAPATVCGPKKSTNLVKNKCVNFNFNGLTGTGVLTESNKKFLPFQQFGRDIADTTDAVRDPQTLEILDITPCSFGGVSVITPGTNTSNQVAVLYQDVNCTEVPVAIHADQLTPTWRVYSTGSNVFQTRAGCLIGAEHVNNSYECDIPIGAGICASYQTQTNSPRRARSVASQSIIAYTMSLGAENSVAYSNNSIAIPTNFTISVTTEILPVSMTKTSVDCTMYICGDSTECSNLLLQYGSFCTQLNRALTGIAVEQDKNTQEVFAQVKQIYKTPPIKDFGGFNFSQILPDPSKPSKRSFIEDLLFNKVTLADAGFIKQYGDCLGDIAARDLICAQKFNGLTVLPPLLTDEMIAQYCSALLAGTITSGWTFGAGAALQIPFAMQMAYRFNGIGVTQNVLYENQKLIANQFNSAIGKIQDSLSSTASALGKLQDVVNQNAQALNTLVKQLSSNFGAISSVLNDILSRLDKVEAEVQIDRLITGRLQSLQTYVTQQLIRAAEIRASANLAATKMSECVLGQSKRVDFCGKGYHLMSFPQCAPHGVVFLHVTYVPAQEKNFTTAPAICHDGKAHFPREGVFVSNGTHWFVTQRNFYEPQIITTDNTFVSGNCDVVIGIVNNTVYDPLQPELDSGGGGSDIDPYKEFGSSYQLLNFLPLDFFPDLNALVDTATALYEEELTGREHCSPHHTAIRQALVCWDELTKLIAWMSSNITSEQVRTIIVNHVNDTWGLKVRQSLWFHLSCLTFGQHTVQEFLVSFGVWIRTPAPYRPPNAPILSTLPEHTVIC

SEQ ID NO: 11605 - protein, 1301 aa, Artificial Sequence
  SARS-CoV-2/Germany/BavPat1/2020__EPI_ISL_406862 spike protein (1-1147)(T874C_S1055C) WhcAg construct
MFVFLVLLPLVSSQCVNLTTRTQLPPAYTNSFTRGVYYPDKVFRSSVLHSTQDLFLPFFSNVTWFHAIHVSGTNGTKRFDNPVLPFNDGVYFASTEKSNIIRGWIFGTTLDSKTQSLLIVNNATNVVIKVCEFQFCNDPFLGVYYHKNNKSWMESEFRVYSSANNCTFEYVSQPFLMDLEGKQGNFKNLREFVFKNIDGYFKIYSKHTPINLVRDLPQGFSALEPLVDLPIGINITRFQTLLALHRSYLTPGDSSSGWTAGAAAYYVGYLQPRTFLLKYNENGTITDAVDCALDPLSETKCTLKSFTVEKGIYQTSNFRVQPTESIVRFPNITNLCPFGEVFNATRFASVYAWNRKRISNCVADYSVLYNSASFSTFKCYGVSPTKLNDLCFTNVYADSFVIRGDEVRQIAPGQTGKIADYNYKLPDDFTGCVIAWNSNNLDSKVGGNYNYLYRLFRKSNLKPFERDISTEIYQAGSTPCNGVEGFNCYFPLQSYGFQPTNGVGYQPYRVVVLSFELLHAPATVCGPKKSTNLVKNKCVNFNFNGLTGTGVLTESNKKFLPFQQFGRDIADTTDAVRDPQTLEILDITPCSFGGVSVITPGTNTSNQVAVLYQGVNCTEVPVAIHADQLTPTWRVYSTGSNVFQTRAGCLIGAEHVNNSYECDIPIGAGICASYQTQTNSPRRARSVASQSIIAYTMSLGAENSVAYSNNSIAIPTNFTISVTTEILPVSMTKTSVDCTMYICGDSTECSNLLLQYGSFCTQLNRALTGIAVEQDKNTQEVFAQVKQIYKTPPIKDFGGFNFSQILPDPSKPSKRSFIEDLLFNKVTLADAGFIKQYGDCLGDIAARDLICAQKFNGLTVLPPLLTDEMIAQYCSALLAGTITSGWTFGAGAALQIPFAMQMAYRFNGIGVTQNVLYENQKLIANQFNSAIGKIQDSLSSTASALGKLQDVVNQNAQALNTLVKQLSSNFGAISSVLNDILSRLDKVEAEVQIDRLITGRLQSLQTYVTQQLIRAAEIRASANLAATKMSECVLGQSKRVDFCGKGYHLMSFPQCAPHGVVFLHVTYVPAQEKNFTTAPAICHDGKAHFPREGVFVSNGTHWFVTQRNFYEPQIITTDNTFVSGNCDVVIGIVNNTVYDPLQPELDSGGGGSDIDPYKEFGSSYQLLNFLPLDFFPDLNALVDTATALYEEELTGREHCSPHHTAIRQALVCWDELTKLIAWMSSNITSEQVRTIIVNHVNDTWGLKVRQSLWFHLSCLTFGQHTVQEFLVSFGVWIRTPAPYRPPNAPILSTLPEHTVIC

SEQ ID NO: 11606 - protein, 1301 aa, Artificial Sequence
  SARS-CoV-2/Wuhan/HBCDC-HB-02/2020__EPI_ISL_412978 spike protein (1-1147)(T874C_S1055C) WhcAg construct
MFVFLVLLPLVSSQCVNLTTRTQLPPAYTNSFTRGVYYPDKVFRSSVLHSTQDLFLPFFSNVTWFHAIHVSGTNGTKRFDNPVLPFNDGVYFASTEKSNIIRGWIFGTTLDSKTQSLLIVNNATNVVIKVCEFQFCNDPFLGVYYHKNNKSWMESEFRVYSSANNCTFEYVSQPFLMDLEGKQGNFKNLREFVFKNIDGYFKIYSKHTPINLVRDLPQGFSALEPLVDLPIGINITRFQTLLALHRSYLTPGDSSSGWTAGAAAYYVGYLQPRTFLLKYNENGTITDAVDCALDPLSETKCTLKSFTVEKGIYQTSNFRVQPTESIVRFPNITNLCPFGEVFNATRFASVYAWNRKRISNCVADYSVLYNSASFSTFKCYGVSPTKLNDLCFTNVYADSFVIRGDEVRQIAPGQTGKIADYNYKLPDDFTGCVIAWNSNNLDSKVGGNYNYLYRLFRKSNLKPFERDISTEIYQAGSTPCNGVEGFNCYFPLQSYGFQPTNGVGYQPYRVVVLSFELLHAPATVCGPKKSTNLVKNKCVNFNFNGLTGTGVLTESNKKFLPFQQFGRDIADTTDAVRDPQTLEILDITPCSFGGVSVITPGTNTSNQVAVLYQDVNCTEVPVAIHADQLTPTWRVYSTGSNVFQTRAGCLIGAEHVNNSYECDIPIGAGICASYQTQTNSPRRARSVASQSIIAYTMSLGAENSVAYSNNSIAIPTNFTISVTTEILPVSMTKTSVDCTMYICGDSTECSNFLLQYGSFCTQLNRALTGIAVEQDKNTQEVFAQVKQIYKTPPIKDFGGFNFSQILPDPSKPSKRSFIEDLLFNKVTLADAGFIKQYGDCLGDIAARDLICAQKFNGLTVLPPLLTDEMIAQYCSALLAGTITSGWTFGAGAALQIPFAMQMAYRFNGIGVTQNVLYENQKLIANQFNSAIGKIQDSLSSTASALGKLQDVVNQNAQALNTLVKQLSSNFGAISSVLNDILSRLDKVEAEVQIDRLITGRLQSLQTYVTQQLIRAAEIRASANLAATKMSECVLGQSKRVDFCGKGYHLMSFPQCAPHGVVFLHVTYVPAQEKNFTTAPAICHDGKAHFPREGVFVSNGTHWFVTQRNFYEPQIITTDNTFVSGNCDVVIGIVNNTVYDPLQPELDSGGGGSDIDPYKEFGSSYQLLNFLPLDFFPDLNALVDTATALYEEELTGREHCSPHHTAIRQALVCWDELTKLIAWMSSNITSEQVRTIIVNHVNDTWGLKVRQSLWFHLSCLTFGQHTVQEFLVSFGVWIRTPAPYRPPNAPILSTLPEHTVIC

SEQ ID NO: 11607 - protein, 1301 aa, Artificial Sequence
  SARS-CoV-2/Australia/QLD02/2020__EPI_ISL_407896 spike protein (1-1147)(T874C_S1055C) WhcAg construct
MFVFLVLLPLVSSQCVNLTTRTQLPPAYTNSFTRGVYYPDKVFRSSVLHSTQDLFLPFFSNVTWFHAIHVSGTNGTKRFDNPVLPFNDGVYFASTEKSNIIRGWIFGTTLDSKTQSLLIVNNATNVVIKVCEFQFCNDPFLGVYYHKNNKSWMESEFRVYSSANNCTFEYVSQPFLMDLEGKQGNFKNLREFVFKNIDGYFKIYSKHTPINLVRDLPQGFSALEPLVDLPIGINITRFQTLLALHRSYLTPGDSSSGWTAGAAAYYVGYLQPRTFLLKYNENGTITDAVDCALDPLSETKCTLKSFTVEKGIYQTSNFRVQPTESIVRFPNITNLCPFGEVFNATRFASVYAWNRKRISNCVADYSVLYNSASFSTFKCYGVSPTKLNDLCFTNVYADSFVIRGDEVRQIAPGQTGKIADYNYKLPDDFTGCVIAWNSNNLDSKVGGNYNYLYRLFRKSNLKPFERDISTEIYQAGSTPCNGVEGFNCYFPLQSYGFQPTNGVGYQPYRVVVLSFELLHAPATVCGPKKSTNLVKNKCVNFNFNGLTGTGVLTESNKKFLPFQQFGRDIADTTDAVRDPQTLEILDITPCSFGGVSVITPGTNTSNQVAVLYQDVNCTEVPVAIHADQLTPTWRVYSTGSNVFQTRAGCLIGAEHVNNSYECDIPIGAGICASYQTQTNSPRRARSVASQSIIAYTMSLGAENSVAYSNNSIAIPTNFTISVTTEILPVSMTKTSVDCTMYICGDSTECSNLLLQYGSFCTQLNRALTGIAVEQDKNTQEVFAQVKQIYKTPPIKDFGGFNFSQILPDPSKPSKRSFIEDLLFNKVTLADAGFIKQYGDCLGDIAARDLICAQKFNGLTVLPPLLTDEMIAQYCSALLAGTITSGWTFGAGAALQIPFAMQMAYRFNGIGVTQNVLYENQKLIANQFNSAIGKIQDSLSSTASALGKLQDVVNQNAQALNTLVKQLSSNFGAISSVLNDILSRLDKVEAEVQIDRLITGRLQSLQTYVTQQLIRAAEIRASANLAATKMSECVLGQSKRVDFCGKGYHLMSFPQCAPHGVVFLHVTYVPAQEKNFTTAPAICHDGKAHFPREGVFVSNGTHWFVTQRNFYEPQIITTDNTFVSGNCDVVIGIVNNTVYDPLQLELDSGGGGSDIDPYKEFGSSYQLLNFLPLDFFPDLNALVDTATALYEEELTGREHCSPHHTAIRQALVCWDELTKLIAWMSSNITSEQVRTIIVNHVNDTWGLKVRQSLWFHLSCLTFGQHTVQEFLVSFGVWIRTPAPYRPPNAPILSTLPEHTVIC

SEQ ID NO: 11608 - protein, 1301 aa, Artificial Sequence
  SARS-CoV-2/India/1-31/2020__EPI_ISL_413523 spike protein (1-1147)(T874C_S1055C) WhcAg construct
MFVFLVLLPLVSSQCVNLTTRTQLPPAYTNSFTRGVYYPDKVFRSSVLHSTQDLFLPFFSNVTWFHAIHVSGTNGTKRFDNPVLPFNDGVYFASTEKSNIIRGWIFGTTLDSKTQSLLIVNNATNVVIKVCEFQFCNDPFLGVYYHKNNKSWMESEFRVYSSANNCTFEYVSQPFLMDLEGKQGNFKNLREFVFKNIDGYFKIYSKHTPINLVRDLPQGFSALEPLVDLPIGINITRFQTLLALHRSYLTPGDSSSGWTAGAAAYYVGYLQPRTFLLKYNENGTITDAVDCALDPLSETKCTLKSFTVEKGIYQTSNFRVQPTESIVRFPNITNLCPFGEVFNATRFASVYAWNRKRISNCVADYSVLYNSASFSTFKCYGVSPTKLNDLCFTNVYADSFVIRGDEVRQIAPGQTGKIADYNYKLPDDFTGCVIAWNSNNLDSKVGGNYNYLYRLFRKSNLKPFERDISTEIYQAGSTPCNGVEGFNCYFPLQSYGFQPTNGVGYQPYRVVVLSFELLHAPATVCGPKKSTNLVKNKCVNFNFNGLTGTGVLTESNKKFLPFQQFGRDIADTTDAVRDPQTLEILDITPCSFGGVSVITPGTNTSNQVAVLYQDVNCTEVPVAIHADQLTPTWRVYSTGSNVFQTRAGCLIGAEHVNNSYECDIPIGAGICASYQTQTNSPRRARSVASQSIIAYTMSLGAENSVAYSNNSIAIPTNFTISVTTEILPVSMTKTSVDCTMYICGDSTECSNLLLQYGSFCTQLNRALTGIAVEQDKNTQEVFAQVKQIYKTPPIKDFGGFNFSQILPDPSKPSKRSFIEDLLFNKVTLADAGFIKQYGDCLGDIAARDLICAQKFNGLTVLPPLLTDEMIAQYCSALLAGTITSGWTFGAGAALQIPFAMQMAYRFNGIGVTQNVLYENQKLIANQFNSVIGKIQDSLSSTASALGKLQDVVNQNAQALNTLVKQLSSNFGAISSVLNDILSRLDKVEAEVQIDRLITGRLQSLQTYVTQQLIRAAEIRASANLAATKMSECVLGQSKRVDFCGKGYHLMSFPQCAPHGVVFLHVTYVPAQEKNFTTAPAICHDGKAHFPREGVFVSNGTHWFVTQRNFYEPQIITTDNTFVSGNCDVVIGIVNNTVYDPLQPELDSGGGGSDIDPYKEFGSSYQLLNFLPLDFFPDLNALVDTATALYEEELTGREHCSPHHTAIRQALVCWDELTKLIAWMSSNITSEQVRTIIVNHVNDTWGLKVRQSLWFHLSCLTFGQHTVQEFLVSFGVWIRTPAPYRPPNAPILSTLPEHTVIC

SEQ ID NO: 11609 - protein, 1301 aa, Artificial Sequence
  SARS-CoV-2/Guangdong/GD2020087-P0008/2020__EPI_ISL_413863 spike protein (1-1147)(T874C_S1055C) WhcAg construct
MFVFLVLLPLVSSQCVNLTTRTQLPPAYTNSFTRGVYYPDKVFRSSVLHSTQDLFLPFFSNVTWFHAIHVSGTNGTKRFDNPVLPFNDGVYFASTEKSNIIRGWIFGTTLDSKTQSLLIVNNATNVVIKVCEFQFCNDPFLGVYYHKNNKSWMESEFRVYSSANNCTFEYVSQPFLMDLEGKQGNFKNLREFVFKNIDGYFKIYSKHTPINLVRDLPQGFSALEPLVDLPIGINITRFQTLLALHRSYLTPGDSSSGWTAGAAAYYVGYLQPRTFLLKYNENGTITDAVDCALDPLSETKCTLKSFTVEKGIYQTSNFRVQPTESIVRFPNITNLCPFGEVFNATRFASVYAWNRKRISNCVADYSVLYNSASFSTFKCYGVSPTKLNDLCFTNVYADSFVIRGDEVREIAPGQTGKIADYNYKLPDDFTGCVIAWNSNNLDSKVGGNYNYLYRLFRKSNLKPFERDISTEIYQAGSTPCNGVEGFNCYFPLQSYGFQPTNGVGYQPYRVVVLSFELLHAPATVCGPKKSTNLVKNKCVNFNFNGLTGTGVLTESNKKFLPFQQFGRDIADTTDAVRDPQTLEILDITPCSFGGVSVITPGTNTSNQVAVLYQDVNCTEVPVAIHADQLTPTWRVYSTGSNVFQTRAGCLIGAEHVNNSYECDIPIGAGICASYQTQTNSPRRARSVASQSIIAYTMSLGAENSVAYSNNSIAIPTNFTISVTTEILPVSMTKTSVDCTMYICGDSTECSNLLLQYGSFCTQLNRALTGIAVEQDKNTQEVFAQVKQIYKTPPIKDFGGFNFSQILPDPSKPSKRSFIEDLLFNKVTLADAGFIKQYGDCLGDIAARDLICAQKFNGLTVLPPLLTDEMIAQYCSALLAGTITSGWTFGAGAALQIPFAMQMAYRFNGIGVTQNVLYENQKLIANQFNSAIGKIQDSLSSTASALGKLQDVVNQNAQALNTLVKQLSSNFGAISSVLNDILSRLDKVEAEVQIDRLITGRLQSLQTYVTQQLIRAAEIRASANLAATKMSECVLGQSKRVDFCGKGYHLMSFPQCAPHGVVFLHVTYVPAQEKNFTTAPAICHDGKAHFPREGVFVSNGTHWFVTQRNFYEPQIITTDNTFVSGNCDVVIGIVNNTVYDPLQPELDSGGGGSDIDPYKEFGSSYQLLNFLPLDFFPDLNALVDTATALYEEELTGREHCSPHHTAIRQALVCWDELTKLIAWMSSNITSEQVRTIIVNHVNDTWGLKVRQSLWFHLSCLTFGQHTVQEFLVSFGVWIRTPAPYRPPNAPILSTLPEHTVIC

SEQ ID NO: 11610 - protein, 1301 aa, Artificial Sequence
  SARS-CoV-2/Sweden/01/2020__EPI_ISL_411951 spike protein (1-1147)(T874C_S1055C) WhcAg construct
MFVFLVLLPLVSSQCVNLTTRTQLPPAYTNSFTRGVYYPDKVFRSSVLHSTQDLFLPFFSNVTWFHAIHVSGTNGTKRFDNPVLPFNDGVYFASTEKSNIIRGWIFGTTLDSKTQSLLIVNNATNVVIKVCEFQFCNDPFLGVYYHKNNKSWMESEFRVYSSANNCTFEYVSQPFLMDLEGKQGNFKNLREFVFKNIDGYFKIYSKHTPINLVRDLPQGFSALEPLVDLPIGINITRFQTLLALHRSYLTPGDSSSGWTAGAAAYYVGYLQPRTFLLKYNENGTITDAVDCALDPLSETKCTLKSFTVEKGIYQTSNFRVQPTESIVRFPNITNLCPFGEVFNATRFASVYAWNRKRISNCVADYSVLYNSASFSTFKCYGVSPTKLNDLCFTNVYADSFVIRGDEVRQIAPGQTGKIADYNYKLPDDFTGCVIAWNSNNLDSKVGGNYNYLYRLFRKSNLKPFERDISTEIYQAGSTPCNGVEGFNCYFPLQSYGFQPTNGVGYQPYRVVVLSFELLHAPATVCGPKKSTNLVKNKCVNFNFNGLTGTGVLTESNKKFLPFQQFGRDIADTTDAVRDPQTLEILDITPCSFGGVSVITPGTNTSNQVAVLYQDVNCTEVPVAIHADQLTPTWRVYSTGSNVFQTRAGCLIGAEHVNNSYECDIPIGAGICASYQTQTNSPRRARSVASQSIIAYTMSLGAENSVAYSNNSIAIPTNFTISVTTEILPVSMTKTSVDCTMYICGDSTECSNLLLQYGSFCTQLNRALTGIAVEQDKNTQEVFAQVKQIYKTPPIKDCGGFNFSQILPDPSKPSKRSFIEDLLFNKVTLADAGFIKQYGDCLGDIAARDLICAQKFNGLTVLPPLLTDEMIAQYCSALLAGTITSGWTFGAGAALQIPFAMQMAYRFNGIGVTQNVLYENQKLIANQFNSAIGKIQDSLSSTASALGKLQDVVNQNAQALNTLVKQLSSNFGAISSVLNDILSRLDKVEAEVQIDRLITGRLQSLQTYVTQQLIRAAEIRASANLAATKMSECVLGQSKRVDFCGKGYHLMSFPQCAPHGVVFLHVTYVPAQEKNFTTAPAICHDGKAHFPREGVFVSNGTHWFVTQRNFYEPQIITTDNTFVSGNCDVVIGIVNNTVYDPLQPELDSGGGGSDIDPYKEFGSSYQLLNFLPLDFFPDLNALVDTATALYEEELTGREHCSPHHTAIRQALVCWDELTKLIAWMSSNITSEQVRTIIVNHVNDTWGLKVRQSLWFHLSCLTFGQHTVQEFLVSFGVWIRTPAPYRPPNAPILSTLPEHTVIC

SEQ ID NO: 11611 - protein, 1301 aa, Artificial Sequence
  SARS-CoV-2/Tianmen/HBCDC-HB-07/2020__EPI_ISL_412983 spike protein (1-1147)(T874C_S1055C) WhcAg construct
MFVFLVLLPLVSSQCVNLTTRTQLPPAYTNSFTRGVYYPDKVFRSSVLHSTQDLFLPFFSNVTWFHAIHVSGTNGTKRFDNPVLPFNDGVYFASTEKSNIIRGWIFGTTLDSKTQSLLIVNNATNVVIKVCEFQFCNDPFLGVYYHKNNKSWMESEFRVYSSANNCTFEYVSQPFLMDLEGKQGNFKNLREFVFKNIDGYFKIYSKHTPINLVRDLPQGFSALEPLVDLPIGINITRFQTLLALHRSYLTPGDSSSGWTAGAAAYYVGYLQPRTFLLKYNENGTITDAVDCALDPLSETKCTLKSFTVEKGIYQTSNFRVQPTESIVRFPNITNLCPFGEVFNATRFASVYAWNRKRISNCVADYSVLYNSASFSTFKCYGVSPTKLNDLCFTNVYADSFVIRGDEVRQIAPGQTGKIADYNYKLPDDFTGCVIAWNSNNLDSKVGGNYNYLYRLFRKSNLKPFERDISTEIYQAGSTPCNGVEGFNCYFPLQSYGFQPTNGVGYQPYRVVVLSFELLHAPATVCGPKKSTNLVKNKCVNFNFNGLTGTGVLTESNKKFLPFQQFGRDIADTTDAVRDPQTLEILDITPCSFGGVSVITPGTNTSNQVAVLYQDLNCTEVPVAIHADQLTPTWRVYSTGSNVFQTRAGCLIGAEHVNNSYECDIPIGAGICASYQTQTNSPRRARSVASQSIIAYTMSLGAENSVAYSNNSIAIPTNFTISVTTEILPVSMTKTSVDCTMYICGDSTECSNLLLQYGSFCTQLNRALTGIAVEQDKNTQEVFAQVKQIYKTPPIKDFGGFNFSQILPDPSKPSKRSFIEDLLFNKVTLADAGFIKQYGDCLGDIAARDLICAQKFNGLTVLPPLLTDEMIAQYCSALLAGTITSGWTFGAGAALQIPFAMQMAYRFNGIGVTQNVLYENQKLIANQFNSAIGKIQDSLSSTASALGKLQDVVNQNAQALNTLVKQLSSNFGAISSVLNDILSRLDKVEAEVQIDRLITGRLQSLQTYVTQQLIRAAEIRASANLAATKMSECVLGQSKRVDFCGKGYHLMSFPQCAPHGVVFLHVTYVPAQEKNFTTAPAICHDGKAHFPREGVFVSNGTHWFVTQRNFYEPQIITTDNTFVSGNCDVVIGIVNNTVYDPLQPELDSGGGGSDIDPYKEFGSSYQLLNFLPLDFFPDLNALVDTATALYEEELTGREHCSPHHTAIRQALVCWDELTKLIAWMSSNITSEQVRTIIVNHVNDTWGLKVRQSLWFHLSCLTFGQHTVQEFLVSFGVWIRTPAPYRPPNAPILSTLPEHTVIC

SEQ ID NO: 11612 - protein, 1301 aa, Artificial Sequence
  SARS-CoV-2/Hong Kong/case42_VM20002493/2020__EPI_ISL_414527 spike protein (1-1147)(T874C_S1055C) WhcAg construct
MFVFLVLLPLVSSQCVNLTTRTQLPPAYTNSFTRGVYYPDKVFRSSVLHSTQDLFLPFFSNVTWFHAIHVSGTNGTKRFDNPVLPFNDGVYFASTEKSNIIRGWIFGTTLDSKTQSLLIVNNATNVVIKVCEFQFCNDPFLGVYYHKNNKSWMESEFRVYSSANNCTFEYVSQPFLMDLEGKQGNFKNLREFVFKNIDGYFKIYSKHTPINLVRDLPQGFSALEPLVDLPIGINITRFQTLLALHRSYLTPGDSSSGWTAGAAAYYVGYLQPRTFLLKYNENGTITDAVDCALDPLSETKCTLKSFTVEKGIYQTSNFRVQPTESIVRFPNITNLCPFGEVFNATRFASVYAWNRKRISNCVADYSVLYNSASFSTFKCYGVSPTKLNDLCFTNVYADSFVIRGDEVRQIAPGQTGKIADYNYKLPDDFTGCVIAWNSNNLDSKVGGNYNYLYRLFRKSNLKPFERDISTEIYQAGSTPCNGVEGFNCYFPLQSYGFQPTNGVGYQPYRVVVLSFELLHAPATVCGPKKSTNLVKNKCVNFNFNGLTGTGVLTESNKKFLPFQQFGRDIADTTDAVRDPQTLEILDITPCSFGGVSVITPGTNTSNQVAVLYQDVNCTEVPVAIHADQLTPTWRVYSTGSNVFQTRAGCLIGAEHVNNSYECDIPIGAGICASYQTQTNSPRRARSVASQSIIAYTMSLGAENSVAYSNNSIAIPTNFAISVTTEILPVSMTKTSVDCTMYICGDSTECSNLLLQYGSFCTQLNRALTGIAVEQDKNTQEVFAQVKQIYKTPPIKDFGGFNFSQILPDPSKPSKRSFIEDLLFNKVTLADAGFIKQYGDCLGDIAARDLICAQKFNGLTVLPPLLTDEMIAQYCSALLAGTITSGWTFGAGAALQIPFAMQMAYRFNGIGVTQNVLYENQKLIANQFNSAIGKIQDSLSSTASALGKLQDVVNQNAQALNTLVKQLSSNFGAISSVLNDILSRLDKVEAEVQIDRLITGRLQSLQTYVTQQLIRAAEIRASANLAATKMSECVLGQSKRVDFCGKGYHLMSFPQCAPHGVVFLHVTYVPAQEKNFTTAPAICHDGKAHFPREGVFVSNGTHWFVTQRNFYEPQIITTDNTFVSGNCDVVIGIVNNTVYDPLQPELDSGGGGSDIDPYKEFGSSYQLLNFLPLDFFPDLNALVDTATALYEEELTGREHCSPHHTAIRQALVCWDELTKLIAWMSSNITSEQVRTIIVNHVNDTWGLKVRQSLWFHLSCLTFGQHTVQEFLVSFGVWIRTPAPYRPPNAPILSTLPEHTVIC

SEQ ID NO: 11613 - protein, 1301 aa, Artificial Sequence
  SARS-CoV-2/USA/CruiseA-23/2020__EPI_ISL_414482 spike protein (1-1147)(T874C_S1055C) WhcAg construct
MFVFLVLLPLVSSQCVNLTTRTQLPPAYTNSFTRGVYYPDKVFRSSVLHSTQDLFLPFFSNVTWFHAIHVSGTNGTKRFDNPVLPFNDGVYFASTEKSNIIRGWIFGTTLDSKTQSLLIVNNATNVVIKVCEFQFCNDPFLGVYYHKNNKSWMESEFRVYSSANNCTFEYVSQPFLMDLEVKQGNFKNLREFVFKNIDGYFKIYSKHTPINLVRDLPQGFSALEPLVDLPIGINITRFQTLLALHRSYLTPGDSSSGWTAGAAAYYVGYLQPRTFLLKYNENGTITDAVDCALDPLSETKCTLKSFTVEKGIYQTSNFRVQPTESIVRFPNITNLCPFGEVFNATRFASVYAWNRKRISNCVADYSVLYNSASFSTFKCYGVSPTKLNDLCFTNVYADSFVIRGDEVRQIAPGQTGKIADYNYKLPDDFTGCVIAWNSNNLDSKVGGNYNYLYRLFRKSNLKPFERDISTEIYQAGSTPCNGVEGFNCYFPLQSYGFQPTNGVGYQPYRVVVLSFELLHAPATVCGPKKSTNLVKNKCVNFNFNGLTGTGVLTESNKKFLPFQQFGRDIADTTDAVRDPQTLEILDITPCSFGGVSVITPGTNTSNQVAVLYQDVNCTEVPVAIHADQLTPTWRVYSTGSNVFQTRAGCLIGAEHVNNSYECDIPIGAGICASYQTQTNSPRRARSVASQSIIAYTMSLGAENSVAYSNNSIAIPTNFTISVTTEILPVSMTKTSVDCTMYICGDSTECSNLLLQYGSFCTQLNRALTGIAVEQDKNTQEVFAQVKQIYKTPPIKDFGGFNFSQILPDPSKPSKRSFIEDLLFNKVTLADAGFIKQYGDCLGDIAARDLICAQKFNGLTVLPPLLTDEMIAQYCSALLAGTITSGWTFGAGAALQIPFAMQMAYRFNGIGVTQNVLYENQKLIANQFNSAIGKIQDSLSSTASALGKLQDVVNQNAQALNTLVKQLSSNFGAISSVLNDILSRLDKVEAEVQIDRLITGRLQSLQTYVTQQLIRAAEIRASANLAATKMSECVLGQSKRVDFCGKGYHLMSFPQCAPHGVVFLHVTYVPAQEKNFTTAPAICHDGKAHFPREGVFVSNGTHWFVTQRNFYEPQIITTDNTFVSGNCDVVIGIVNNTVYDPLQPELDSGGGGSDIDPYKEFGSSYQLLNFLPLDFFPDLNALVDTATALYEEELTGREHCSPHHTAIRQALVCWDELTKLIAWMSSNITSEQVRTIIVNHVNDTWGLKVRQSLWFHLSCLTFGQHTVQEFLVSFGVWIRTPAPYRPPNAPILSTLPEHTVIC

SEQ ID NO: 11614 - protein, 1301 aa, Artificial Sequence
  SARS-CoV-2/Hong Kong/case85_VM20002868/2020__EPI_ISL_414519 spike protein (1-1147)(T874C_S1055C) WhcAg construct
MFVFLVLVPLVSSQCVNLTTRTQLPPAYTNSFTRGVYYPDKVFRSSVLHSTQDLFLPFFSNVTWFHAIHVSGTNGTKRFDNPVLPFNDGVYFASTEKSNIIRGWIFGTTLDSKTQSLLIVNNATNVVIKVCEFQFCNDPFLGVYYHKNNKSWMESEFRVYSSANNCTFEYVSQPFLMDLEGKQGNFKNLREFVFKNIDGYFKIYSKHTPINLVRDLPQGFSALEPLVDLPIGINITRFQTLLALHRSYLTPGDSSSGWTAGAAAYYVGYLQPRTFLLKYNENGTITDAVDCALDPLSETKCTLKSFTVEKGIYQTSNFRVQPTESIVRFPNITNLCPFGEVFNATRFASVYAWNRKRISNCVADYSVLYNSASFSTFKCYGVSPTKLNDLCFTNVYADSFVIRGDEVRQIAPGQTGKIADYNYKLPDDFTGCVIAWNSNNLDSKVGGNYNYLYRLFRKSNLKPFERDISTEIYQAGSTPCNGVEGFNCYFPLQSYGFQPTNGVGYQPYRVVVLSFELLHAPATVCGPKKSTNLVKNKCVNFNFNGLTGTGVLTESNKKFLPFQQFGRDIADTTDAVRDPQTLEILDITPCSFGGVSVITPGTNTSNQVAVLYQDVNCTEVPVAIHADQLTPTWRVYSTGSNVFQTRAGCLIGAEHVNNSYECDIPIGAGICASYQTQTNSPRRARSVASQSIIAYTMSLGAENSVAYSNNSIAIPTNFTISVTTEILPVSMTKTSVDCTMYICGDSTECSNLLLQYGSFCTQLNRALTGIAVEQDKNTQEVFAQVKQIYKTPPIKDFGGFNFSQILPDPSKPSKRSFIEDLLFNKVTLADAGFIKQYGDCLGDIAARDLICAQKFNGLTVLPPLLTDEMIAQYCSALLAGTITSGWTFGAGAALQIPFAMQMAYRFNGIGVTQNVLYENQKLIANQFNSAIGKIQDSLSSTASALGKLQDVVNQNAQALNTLVKQLSSNFGAISSVLNDILSRLDKVEAEVQIDRLITGRLQSLQTYVTQQLIRAAEIRASANLAATKMSECVLGQSKRVDFCGKGYHLMSFPQCAPHGVVFLHVTYVPAQEKNFTTAPAICHDGKAHFPREGVFVSNGTHWFVTQRNFYEPQIITTDNTFVSGNCDVVIGIVNNTVYDPLQPELDSGGGGSDIDPYKEFGSSYQLLNFLPLDFFPDLNALVDTATALYEEELTGREHCSPHHTAIRQALVCWDELTKLIAWMSSNITSEQVRTIIVNHVNDTWGLKVRQSLWFHLSCLTFGQHTVQEFLVSFGVWIRTPAPYRPPNAPILSTLPEHTVIC

SEQ ID NO: 11615 - protein, 1301 aa, Artificial Sequence; identical to SEQ ID NO: 11605
  SARS-CoV-2/England/200990660/2020__EPI_ISL_414523 spike protein (1-1147)(T874C_S1055C) WhcAg construct

SEQ ID NO: 11616 - protein, 1301 aa, Artificial Sequence
  SARS-CoV-2/Australia/NSW09/2020__EPI_ISL_413595 spike protein (1-1147)(T874C_S1055C) WhcAg construct
MFVFLVLLPLVSSQCVNLTTRTQLPPAYTNSFTRGVYYPDKVFRSSVLHSTQDLFLPFFSNVTWFHAIHVSGTNGTKRFDNPVLPFNDGVYFASTEKSNIIRGWIFGTTLDSKTQSLLIVNNATNVVIKVCEFQFCNDPFLGVYYHKNNKSWMESEFRVYSSANNCTFEYVSQPFLMDLEGKQGNFKNLREFVFKNIDGYFKIYSKHTPINLVRDLPQGFSALEPLVDLPIGINITRFQTLLALHRSYLTPGDSSSGWTAGAAAYYVGYLQPRTFLLKYNENGTITDAVDCALDPLSETKCTLKSFTVEKGIYQTSNFRVQPTESIVRFPNITNLCPFGEVFNATRFASVYAWNRKRISNCVADYSVLYNSASFSTFKCYGVSPTKLNDLCFTNVYADSFVIRGDEVRQIAPGQTGKIADYNYKLPDDFTGCVIAWNSNNLDSKVGGNYNYLYRLFRKSNLKPFERDISTEIYQAGSTPCNGVEGFNCYFPLQSYGFQPTNGVGYQPYRVVVLSFELLHAPATVCGPKKSTNLVKNKCVNFNFNGLTGTGVLTESNKKFLPFQQFGRDIADTTDAVRDPQTLEILDITPCSFGGVSVITPGTNTSNQVAVLYQDVNCTEVPVAIHADQLTPTWRVYSTGSNVFQTRAGCLIGAEHVNNSYECDIPIGAGICASYQTQTNSPRRARSVASQSIIAYTMSLGAENSVAYSNNSIAIPTNFTISVTTEILPVSMTKTSVDCTMYICGDSTECSNLLLQYGSFCTQLNRALTGIAVEQDKNTQEVFAQVKQIYKTPPIKDFGGFNFSQILPDPSKPSKRSFIEDLLFNKVTLADAGFIKQYGDCLGDIAARDLICAQKFNGLTVLPPLLTDEMIAQYCSALLAGTITSGWTFGAGAALQIPFAMQMAYRFNGIGVTQNVLYENQKLIANQFNSAIGKIQDSLSFTASALGKLQDVVNQNAQALNTLVKQLSSNFGAISSVLNDILSRLDKVEAEVQIDRLITGRLQSLQTYVTQQLIRAAEIRASANLAATKMSECVLGQSKRVDFCGKGYHLMSFPQCAPHGVVFLHVTYVPAQEKNFTTAPAICHDGKAHFPREGVFVSNGTHWFVTQRNFYEPQIITTDNTFVSGNCDVVIGIVNNTVYDPLQPELDSGGGGSDIDPYKEFGSSYQLLNFLPLDFFPDLNALVDTATALYEEELTGREHCSPHHTAIRQALVCWDELTKLIAWMSSNITSEQVRTIIVNHVNDTWGLKVRQSLWFHLSCLTFGQHTVQEFLVSFGVWIRTPAPYRPPNAPILSTLPEHTVIC

SEQ ID NO: 11617 - protein, 1301 aa, Artificial Sequence; identical to SEQ ID NO: 11597
  SARS-CoV-2/Australia/NSW10/2020__EPI_ISL_413596 spike protein (1-1147)(T874C_S1055C) WhcAg construct

SEQ ID NO: 11618 - protein, 1301 aa, Artificial Sequence
  SARS-CoV-2/Switzerland/1000477797/2020__EPI_ISL_413023 spike protein (1-1147)(T874C_S1055C) WhcAg construct
MFVFLVLLPLVSSQCVNLTTRTQLPPAYTNSFTRGVYYPDKVFRSSVLHSTQDLFLPFFSNVTWFHAIHVSGTNGTKRFDNPVLPFNDGVYFASTEKSNIIRGWIFGTTLDSKTQSLLIVNNATNVVIKVCEFQFCNDPFLGVYYHKNNKSWMESEFRVYSSANNCTFEYVSQPFLMDLEGKQGNFKNLREFVFKNIDGYFNIYSKHTPINLVRDLPQGFSALEPLVDLPIGINITRFQTLLALHRSYLTPGDSSSGWTAGAAAYYVGYLQPRTFLLKYNENGTITDAVDCALDPLSETKCTLKSFTVEKGIYQTSNFRVQPTESIVRFPNITNLCPFGEVFNATRFASVYAWNRKRISNCVADYSVLYNSASFSTFKCYGVSPTKLNDLCFTNVYADSFVIRGDEVRQIAPGQTGKIADYNYKLPDDFTGCVIAWNSNNLDSKVGGNYNYLYRLFRKSNLKPFERDISTEIYQAGSTPCNGVEGFNCYFPLQSYGFQPTNGVGYQPYRVVVLSFELLHAPATVCGPKKSTNLVKNKCVNFNFNGLTGTGVLTESNKKFLPFQQFGRDIADTTDAVRDPQTLEILDITPCSFGGVSVITPGTNTSNQVAVLYQGVNCTEVPVAIHADQLTPTWRVYSTGSNVFQTRAGCLIGAEHVNNSYECDIPIGAGICASYQTQTNSPRRARSVASQSIIAYTMSLGAENSVAYSNNSIAIPTNFTISVTTEILPVSMTKTSVDCTMYICGDSTECSNLLLQYGSFCTQLNRALTGIAVEQDKNTQEVFAQVKQIYKTPPIKDFGGFNFSQILPDPSKPSKRSFIEDLLFNKVTLADAGFIKQYGDCLGDIAARDLICAQKFNGLTVLPPLLTDEMIAQYCSALLAGTITSGWTFGAGAALQIPFAMQMAYRFNGIGVTQNVLYENQKLIANQFNSAIGKIQDSLSSTASALGKLQDVVNQNAQALNTLVKQLSSNFGAISSVLNDILSRLDKVEAEVQIDRLITGRLQSLQTYVTQQLIRAAEIRASANLAATKMSECVLGQSKRVDFCGKGYHLMSFPQCAPHGVVFLHVTYVPAQEKNFTTAPAICHDGKAHFPREGVFVSNGTHWFVTQRNFYEPQIITTDNTFVSGNCDVVIGIVNNTVYDPLQPELDSGGGGSDIDPYKEFGSSYQLLNFLPLDFFPDLNALVDTATALYEEELTGREHCSPHHTAIRQALVCWDELTKLIAWMSSNITSEQVRTIIVNHVNDTWGLKVRQSLWFHLSCLTFGQHTVQEFLVSFGVWIRTPAPYRPPNAPILSTLPEHTVIC

SEQ ID NO: 11619 - protein, 1301 aa, Artificial Sequence
  SARS-CoV-2/Belgium/BA-02291/2020__EPI_ISL_415159 spike protein (1-1147)(T874C_S1055C) WhcAg construct
MFVFLVLLPLVSSQCVNLTTRTQLPPAYTNSFTRGVYYPDKVFRSSVLHSTQDLFLPFFSNVTWFHAIHVSGTNGTKRFDNPVLPFNDGVYFASTEKSNIIRGWIFGTTLDSKTQSLLIVNNATNVVIKVCEFQFCNDPFLGVYYHKNNKSWMESEFRVYSSANNCTFEYVSQPFLMDLEGKQGNFKNLREFVFKNIDGYFKIYSKHTPINLVRDLPQGFSALEPLVDLPIGINITRFQTLLALHRSYLTPGDSSSGWTAGAAAYYVGYLQPRTFLLKYNENGTITDAVDCALDPLSETKCTLKSFTVEKGIYQTSNFRVQPTESIVRFPNITNLCPFGEVFNATRFASVYAWNRKRISNCVADYSVLYNSASFSTFKCYGVSPTKLNDLCFTNVYADSFVIRGDEVRQIAPGQTGKIADYNYKLPDDFTGCVIAWNSNNLDSKVGGNYNYLYRLFRRSNLKPFERDISTEIYQAGSTPCNGVEGFNCYFPLQSYGFQPTNGVGYQPYRVVVLSFELLPAPATVCGPKKSTNLVKNKCVNFNFNGLTGTGVLTESNKKFLPFQQFGRDIADTTDAVRDPQTLEILDITPCSFGGVSVITPGTNTSNQVAVLYQGVNCTEVPVAIHADQLTPTWRVYSTGSNVFQTRAGCLIGAEHVNNSYECDIPIGAGICASYQTQTNSPRRARSVASQSIIAYTMSLGAENSVAYSNNSIAIPTNFTISVTTEILPVSMTKTSVDCTMYICGDSTECSNLLLQYGSFCTQLNRALTGIAVEQDKNTQEVFAQVKQIYKTPPIKDFGGFNFSQILPDPSKPSKRSFIEDLLFNKVTLADAGFIKQYGDCLGDIAARDLICAQKFNGLTVLPPLLTDEMIAQYCSALLAGTITSGWTFGAGAALQIPFAMQMAYRFNGIGVTQNVLYENQKLIANQFNSAIGKIQDSLSSAAPALGKLQDVVNQNAQALNTLVKQLSSNFGAISSVLNDILSRLDKVEAEVQIDRLITGRLQSLQTYVTQQLIRAAEIRASANLAATKMSECVLGQSKRVDFCGKGYHLMSFPQCAPHGVVFLHVTYVPAQEKNFTTAPAICHDGKAHFPREGVFVSNGTHWFVTQRNFYEPQIITTDNTFVSGNCDVVIGIVNNTVYDPLQPELDSGGGGSDIDPYKEFGSSYQLLNFLPLDFFPDLNALVDTATALYEEELTGREHCSPHHTAIRQALVCWDELTKLIAWMSSNITSEQVRTIIVNHVNDTWGLKVRQSLWFHLSCLTFGQHTVQEFLVSFGVWIRTPAPYRPPNAPILSTLPEHTVIC

SEQ ID NO: 11620 - protein, 1301 aa, Artificial Sequence
  SARS-CoV-2/USA/WA8-UW5/2020__EPI_ISL_413486 spike protein (1-1147)(T874C_S1055C) WhcAg construct
MFVFLVLLPLVSSQCVNLTTRTQLPPAYTNSFTRGVYYPDKVFRSSVLHSTQDLFLPFFSNVTWFHAIHVSGTNGTKRFDNPVLPFNDGVYFASTEKSNIIRGWIFGTTLDSKTQSLLIVNNATNVVIKVCEFQFCNDPFLGVYYHKNNKSWMESEFRVYSSANNCTFEYVSQPFLMDLEGKQGNFKNLREFVFKNIDGYFKIYSKHTPINLVRDLPQGFSALEPLVDLPIGINITRFQTLLALHRSYLTPGDSSSGWTAGAAAYYVGYLQPRTFLLKYNENGTITDAVDCALDPLSETKCTLKSFTVEKGIYQTSNFRVQPTESIVRFPNITNLCPFGEVFNATRFASVYAWNRKRISNCVADYSVLYNSASFSTFKCYGVSPTKLNDLCFTNVYADSFVIRGDEVRQIAPGQTGKIADYNYKLPDDFTGCVIAWNSNNLDSKVGGNYNYLYRLFRKSNLKPFERDISTEIYQAGSTPCNGVEGFNCYFPLQSYGFQPTNGVGYQPYRVVVLSFELLHAPATVCGPKKSTNLVKNKCVNFNFNGLTGTGVLTESNKKFLPFQQFGRDIADTTDAVRDPQTLEILDITPCSFGGVSVITPGTNTSNQVAVLYQDVNCTEVPVAIHADQLTPTWRVYSTGSNVFQTRAGCLIGAEYVNNSYECDIPIGAGICASYQTQTNSPRRARSVASQSIIAYTMSLGAENSVAYSNNSIAIPTNFTISVTTEILPVSMTKTSVDCTMYICGDSTECSNLLLQYGSFCTQLNRALTGIAVEQDKNTQEVFAQVKQIYKTPPIKDFGGFNFSQILPDPSKPSKRSFIEDLLFNKVTLADAGFIKQYGDCLGDIAARDLICAQKFNGLTVLPPLLTDEMIAQYCSALLAGTITSGWTFGAGAALQIPFAMQMAYRFNGIGVTQNVLYENQKLIANQFNSAIGKIQDSLSSTASALGKLQDVVNQNAQALNTLVKQLSSNFGAISSVLNDILSRLDKVEAEVQIDRLITGRLQSLQTYVTQQLIRAAEIRASANLAATKMSECVLGQSKRVDFCGKGYHLMSFPQCAPHGVVFLHVTYVPAQEKNFTTAPAICHDGKAHFPREGVFVSNGTHWFVTQRNFYEPQIITTDNTFVSGNCDVVIGIVNNTVYDPLQPELDSGGGGSDIDPYKEFGSSYQLLNFLPLDFFPDLNALVDTATALYEEELTGREHCSPHHTAIRQALVCWDELTKLIAWMSSNITSEQVRTIIVNHVNDTWGLKVRQSLWFHLSCLTFGQHTVQEFLVSFGVWIRTPAPYRPPNAPILSTLPEHTVIC

SEQ ID NO: 11621 - protein, 1301 aa, Artificial Sequence
  SARS-CoV-2/England/20102000506/2020__EPI_ISL_415147 spike protein (1-1147)(T874C_S1055C) WhcAg construct
MFVFLVLLPLVSSQCVNLTTRTQLPPAYTNSFTRGVYYPDKVFRSSVLHSTQDLFLPFFSNVTWFHAIHVSGTNGTKRFDNPVLPFNDGVYFASTEKSNIIRGWIFGTTLDSKTQSLLIVNNATNVVIKVCEFQFCNDPFLGVYYHKNNKSWMESEFRVYSSANNCTFEYVSQPFLMDLEGKQGNFKNLREFVFKNIDGYFKIYSKHTPINLVRDLPQGFSALEPLVDLPIGINITRFQTLLALHRSYLTPGDSSSGWTAGAAAYYVGYLQPRTFLLKYNENGTITDAVDCALDPLSETKCTLKSFTVEKGIYQTSNFRVQPTESIVRFPNITNLCPFGEVFNATRFASVYAWNRKRISNCVADYSVLYNSASFSTFKCYGVSPTKLNDLCFTNVYADSFVIRGDEVRQIAPGQTGKIADYNYKLPDDFTGCVIAWNSNNLDSKVGGNYNYLYRLFRKSNLKPFERDISTEIYQAGSTPCNGVEGFNCYFPLQSYGFQPTNGVGYQPYRVVVLSFELLHAPATVCGPKKSTNLVKNKCVNFNFNGLTGTGVLTESNKKFLPFQQFGRDIADTTDAVRDPQTLEILDITPCSFGGVSVITPGTNTSNQVAVLYQGVNCTEVPVAIHADQLTPTWRVYSTGSNVFQTRAGCLIGAEHVNNSYECDIPIGAGICASYQTQTNSPRRARSVASQSIIAYTMSLGAENSVAYSNNSIAIPTNFTISVTTEILPVSMTKTSVDCTMYICGDSTECSNLLLQYGSFCTQLNRALTGIAVEQDKNTQEVFAQVKQIYKTPPIKDFGGFNFSQILPDPSKPSKRSFIEDLLFNKVTLADAGFIKQYGYCLGDIAARDLICAQKFNGLTVLPPLLTDEMIAQYCSALLAGTITSGWTFGAGAALQIPFAMQMAYRFNGIGVTQNVLYENQKLIANQFNSAIGKIQDSLSSTASALGKLQDVVNQNAQALNTLVKQLSSNFGAISSVLNDILSRLDKVEAEVQIDRLITGRLQSLQTYVTQQLIRAAEIRASANLAATKMSECVLGQSKRVDFCGKGYHLMSFPQCAPHGVVFLHVTYVPAQEKNFTTAPAICHDGKAHFPREGVFVSNGTHWFVTQRNFYEPQIITTDNTFVSGNCDVVIGIVNNTVYDPLQPELDSGGGGSDIDPYKEFGSSYQLLNFLPLDFFPDLNALVDTATALYEEELTGREHCSPHHTAIRQALVCWDELTKLIAWMSSNITSEQVRTIIVNHVNDTWGLKVRQSLWFHLSCLTFGQHTVQEFLVSFGVWIRTPAPYRPPNAPILSTLPEHTVIC

SEQ ID NO: 11622 - protein, 1301 aa, Artificial Sequence
  SARS-CoV-2/Belgium/VAG-03013/2020__EPI_ISL_415155 spike protein (1-1147)(T874C_S1055C) WhcAg construct
MFVFLVLLPLVSSQCVNLTTRTQLPPAYTNSFTRGVYYPDKVFRSSVLHSTQDLFLPFFSNVTWFHAIHVSGTNGTKRFDNPVLPFNDGVYFASTEKSNIIRGWIFGTTLDSKTQSLLIVNNATNVVIKVCEFQFCNDPFLGVYYHKNNKSWMESEFRVYSSANNCTFEYVSQPFLMDLEGKQGNFKNLREFVFKNIDGYFKIYSKHTPINLVRDLPQGFSALEPLVDLPIGINITRFQTLLALHRSYLTPGDSSSGWTAGAAAYYVGYLQPRTFLLKYNENGTITDAVDCALDPLSETKCTLKSFTVEKGIYQTSNFRVQPTESIVRFPNITNLCPFGEVFNATRFASVYAWNRKRISNCVADYSVLYNSASFSTFKCYGVSPTKLNDLCFTNVYADSFVIRGDEVRQIAPGQTGKIADYNYKLPDDFTGCVIAWNSNNLDSKVGGNYNYLYRLFRKSNLKPFERDISTEIYQAGSTPCNGVEGFNCYFPLQSYGFQPTNGVGYQPYRVVVLSFELLHAPATVCGPKKSTNLVKNKCVNFNFNGLTGTGVLTESNKKFLPFQQFGRDIADTTDAVRDPQTLEILDITPCSFGGVSVITPGTNTSNQVAVLYQGVNCTEVPVAIHADQLTPTWRVYSTGSNVFQTRAGCLIGAEHVNNSYECDIPIGAGICASYQTQTNSPRRARSVASQSIIAYTMSLGAENSVAYSNNSIAIPTNFTISVTTEILPVSMTKTSVDCTMYICGDSTECSNLLLQYGSFCTQLNRALTGIAVEQDKNTQEVFAQVKQIYKTPPIKDFGGFNFSQILPDPSKPSKRSFIEDLLFNKVTLADAGFIKQYGDCLGDIAARDLICAQKFNGLTVLPPLLTDEMIAQYCSALLAGTITSGWTFGAGAALQIPFAMQMAYRFNGIGVTQNVLYENQKLIANQFNSAIGKIQDSLSSTATALGKLQDVVNQNAQALNTLVKQLSSNFGAISSVLNDILSRLDKVEAEVQIDRLITGRLQSLQTYVTQQLIRAAEIRASANLAATKMSECVLGQSKRVDFCGKGYHLMSFPQCAPHGVVFLHVTYVPAQEKNFTTAPAICHDGKAHFPREGVFVSNGTHWFVTQRNFYEPQIITTDNTFVSGNCDVVIGIVNNTVYDPLQPELDSGGGGSDIDPYKEFGSSYQLLNFLPLDFFPDLNALVDTATALYEEELTGREHCSPHHTAIRQALVCWDELTKLIAWMSSNITSEQVRTIIVNHVNDTWGLKVRQSLWFHLSCLTFGQHTVQEFLVSFGVWIRTPAPYRPPNAPILSTLPEHTVIC

SEQ ID NO: 11623 - protein, 1301 aa, Artificial Sequence
  SARS-CoV-2/Belgium/BC-03016/2020__EPI_ISL_415157 spike protein (1-1147)(T874C_S1055C) WhcAg construct
MFVFLVLLPLVSSQCVNLTTRTQLPPAYTNSFTRGVYYPDKVFRSSVLHSTQDLFLPFFSNVTWFHAIHVSGTNGTKRFDNPVLPFNDGVYFASTEKSNIIRGWIFGTTLDSKTQSLLIVNNATNVVIKVCEFQFCNDPFLGVYYHKNNKSWMESEFRVYSSANNCTFEYVSQPFLMDLEGKQGNFKNLREFVFKNIDGYFKIYSKHTPINLVRDLPQGFSALEPLVDLPIGINITRFQTLLALHRSYLTPGDSSSGWTAGAAAYYVGYLQPRTFLLKYNENGTITDAVDCALDPLSETKCTLKSFTVEKGIYQTSNFRVQPTESIVRFPNITNLCPFGEVFNATRFASVYAWNRKRISNCVADYSVLYNSASFSTFKCYGVSPTKLNDLCFTNVYADSFVIRGDEVRQIAPGQTGKIADYNYKLPDDFTGCVIAWNSNNLDSKVGGNYNYLYRLFRKSNLKPFERDISTEIYQAGSTPCNGVEGFNCYFPLQSYGFQPTNGVGYQPYRVVVLSFELLHAPATVCGPKKSTNLVKNKCVNFNFNGLTGTGVLTESNKKFLPFQQFGRDIADTTDAVRDPQTLEILDITPCSFGGVSVITPGTNTSNQVAVLYQGVNCTEVPVAIHADQLTPTWRVYSTGSNVFQTRAGCLIGAEHVNNSYECDIPIGAGICASYQTQTNSPRRARSVASQSIIAYTMSLGAENSVAYSNNSIAIPTNFTISVTTEILPVSMTKTSVDCTMYICGDSTECSNLLLQYGSFCTQLNRALTGIAVEQDKNTQEVFAQVKQIYKTPPIKDFGGFNFSQILPDPSKPSKRSFIEDLLFNKVTLADAGFIKQYGDCLGDIAARDLICAQKFNGLTVLPPLLTDEMIAQYCSALLAGTITSGWTFGAGAALQIPFAMQMAYRFNGIGVTQNVLYENQKLIANQFNSAIGKIQDSLSSTAPALGKLQDVVNQNAQALNTLVKQLSSNFGAISSVLNDILSRLDKVEAEVQIDRLITGRLQSLQTYVTQQLIRAAEIRASANLAATKMSECVLGQSKRVDFCGKGYHLMSFPQCAPHGVVFLHVTYVPAQEKNFTTAPAICHDGKAHFPREGVFVSNGTHWFVTQRNFYEPQIITTDNTFVSGNCDVVIGIVNNTVYDPLQPELDSGGGGSDIDPYKEFGSSYQLLNFLPLDFFPDLNALVDTATALYEEELTGREHCSPHHTAIRQALVCWDELTKLIAWMSSNITSEQVRTIIVNHVNDTWGLKVRQSLWFHLSCLTFGQHTVQEFLVSFGVWIRTPAPYRPPNAPILSTLPEHTVIC

SEQ ID NO: 11624 - protein, 1301 aa, Artificial Sequence
  SARS-CoV-2/Germany/BavPat3/2020__EPI_ISL_414521 spike protein (1-1147)(T874C_S1055C) WhcAg construct
MFVFLVLLPLVSSQCVNLTTRTQLPPAYTNSFTRGVYYPDKVFRSSVLHSTQDLFLPFFSNVTWFHAIHVSGTNGTKRFDNPVLPFNDGVYFASTEKSNIIRGWIFGTTLDSKTQSLLIVNNATNVVIKVCEFQFCNDPFLGVYYHKNNKSWMESEFRVYSSANNCTFEYVSQPFLMDLEGKQGNFKNLREFVFKNIDGYFKIYSKHTPINLVRDLPQGFSALEPLVDLPIGINITRFQTLLALHRSYLTPGDSSSGWTAGAAAYYVGYLQPRTFLLKYNENGTITDAVDCALDPLSETKCTLKSFTVEKGIYQTSNFRVQPTESIVRFPNITNLCPFGEVFNATRFASVYAWNRKRISNCVADYSVLYNSASFSTFKCYGVSPTKLNDLCFTNVYADSFVIRGDEVRQIAPGQTGKIADYNYKLPDDFTGCVIAWNSNNLDSKVGGNYNYLYRLFRKSNLKPFERDISTEIYQAGSTPCNGVEGFNCYFPLQSYGFQPTNGVGYQPYRVVVLSFELLHAPATVCGPKKSTNLVKNKCVNFNFNGLTGTGVLTESNKKFLPFQQFGRDIADTTDAVRDPQTLEILDITPCSFGGVSVITPGTNTSNQVAVLYQDVNCTEVPVAIHADQLTPTWRVYSTGSNVFQTRAGCLIGAEHVNNSYECDIPIGAGICASYQTQTNSPRRARSVASQSIIAYTMSLGAENSVAYSNNSIAIPTNFTISVTTEILPVSMTKTSVDCTMYICGDSTECSNLLLQYGSFCTQLNRALTGIAVEQDKNTQQVFAQVKQIYKTPPIKDFGGFNFSQILPDPSKPSKRSFIEDLLFNKVTLADAGFIKQYGDCLGDIAARDLICAQKFNGLTVLPPLLTDEMIAQYCSALLAGTITSGWTFGAGAALQIPFAMQMAYRFNGIGVTQNVLYENQKLIANQFNSAIGKIQDSLSSTASALGKLQDVVNQNAQALNTLVKQLSSNFGAISSVLNDILSRLDKVEAEVQIDRLITGRLQSLQTYVTQQLIRAAEIRASANLAATKMSECVLGQSKRVDFCGKGYHLMSFPQCAPHGVVFLHVTYVPAQEKNFTTAPAICHDGKAHFPREGVFVSNGTHWFVTQRNFYEPQIITTDNTFVSGNCDVVIGIVNNTVYDPLQPELDSGGGGSDIDPYKEFGSSYQLLNFLPLDFFPDLNALVDTATALYEEELTGREHCSPHHTAIRQALVCWDELTKLIAWMSSNITSEQVRTIIVNHVNDTWGLKVRQSLWFHLSCLTFGQHTVQEFLVSFGVWIRTPAPYRPPNAPILSTLPEHTVIC

SEQ ID NO: 11625 - protein, 1301 aa, Artificial Sequence
  SARS-CoV-2/France/HF1805/2020__EPI_ISL_414628 spike protein (1-1147)(T874C_S1055C) WhcAg construct
MFVFLVLLPLVSSQCVNLTTRTQLPPAYTNSFTRGVYYPDKVFRSSVLHSTQDLFLPFFSNVTWFHAIHVSGTNGTKRFDNPVLPFNDGVYFASTEKSNIIRGWIFGTTLDSKTQSLLIVNNATNVVIKVCEFQFCNDPFLGVYYHKNNKSWMESEFRVYSSANNCTFEYVSQPFLMDLEGKQGNFKNLREFVFKNIDGYFKIYSKHTPINLVRDLPQGFSALEPLVDLPIGINITRFQTLLALHRSYLTPGDSSSGWTAGAAAYYVGYLQPRTFLLKYNENGTITDAVDCALDPLSETKCTLKSFTVEKGIYQTSNFRVQPTESIVRFPNITNLCPFGEVFNATRFASVYAWNRKRISNCVADYSVLYNSASFSTFKCYGVSPTKLNDLCFTNVYADSFVIRGDEVRQIAPGQTGKIADYNYKLPDDFTGCVIAWNSNNLDSKVGGNYNYLYRLFRKSNLKPFERDISTEIYQAGSTPCNGVEGFNCYFPLQSYGFQPTNGVGYQPYRVVVLSFELLHAPATVCGPKKSTNLVKNKCVNFNFNGLTGTGVLTESNKKFLPFQQFGRDIADTTDAVRDPQTLEILDITPCSFGGVSVITPGTNTSNQVAVLYQGVNCTEVPVAIHADQLTPTWRVYSTGSNVFQTRAGCLIGAEHVNNSYECDIPIGAGICASYQTQTNSPRRARSVASQSIIAYTMSLGAENSVAYSNNSIAIPTNFTISVTTEILPVSMTKTSVDCTMYICGDSTECSNLLLQYGSFCTQLNRALTGIAVEQDKNTQEVFAQVKQIYKTPPIKDFGGFNFSQILPDPSKPSKRSFIEDLLFNKVTLADAGFIKQYGDCLGDIAARDLICAQKFNGLTVLPPLLTDEMIAQYCSALLAGTITSGWTFGAGAALQIPFAMQMAYRFNGIGVTQNVLYENQKLIANQFNSAIGKIQDSLSSTASALGKLQDVVNQNAQALNTLVKQLSSNFGAISSVLNDILSRLDKVEAEVQIDRLITGRLQSLQTYVTQQLIRAAEIRASANLAATKMSECVLGQSKRVDFCGKGYHLMSFPQCAPHGVVFLHVTYVPAQEKNFTTAPAICHDGKAHFPREGVFVSNGTHWFVTQRNFYEPQIITTDNTFVSGNCDVVIGVVNNTVYDPLQPELDSGGGGSDIDPYKEFGSSYQLLNFLPLDFFPDLNALVDTATALYEEELTGREHCSPHHTAIRQALVCWDELTKLIAWMSSNITSEQVRTIIVNHVNDTWGLKVRQSLWFHLSCLTFGQHTVQEFLVSFGVWIRTPAPYRPPNAPILSTLPEHTVIC

SEQ ID NO: 11626 - protein, 1301 aa, Artificial Sequence
  SARS-CoV-2/Netherlands/ZuidHolland_9/2020__EPI_ISL_414445 spike protein (1-1147)(T874C_S1055C) WhcAg construct
MFVFLVLLPLVSSQCVNLTTRTQLPPAYTNSFTRGVYYPDKVFRSSVLHSTQDLFLPFFSNVTWFHAIHVSGTNGTKRFDNPVLPFNDGVYFASTEKSNIIRGWIFGTTLDSKTQSLLIVNNATNVVIKVCEFQFCNDPFLGVYYHKNNKSWMESEFRVYSSANNCTFEYVSQPFLMDLEGKQGNFKNLREFVFKNIDGYFKIYSKHTPINLVRDLPQGFSALEPLVDLPIGINITRFQTLLALHRSYLTPGDSSSGWTAGAAAYYVGYLQPRTFLLKYNENGTITDAVDCALDPLSETKCTLKSFTVEKGIYQTSNFRVQPTESIVRFPNITNLCPFGEVFNATRFASVYAWNRKRISNCVADYSVLYNSASFSTFKCYGVSPTKLNDLCFTNVYADSFVIRGDEVRQIAPGQTGKIADYNYKLPDDFTGCVIAWNSNNLDSKVGGNYNYLYRLFRKSNLKPFERDISTEIYQAGSTPCNGVEGFNCYFPLQSYGFQPTNGVGYQPYRVVVLSFELLHAPATVCGPKKSTNLVKNKCVNFNFNGLTGTGVLTESNKKFLPFQQFGRDIADTTDAVRDPQTLEILDITPCSFGGVSVITPGTNTSNQVAVLYQGVNCTEVPVAIHADQLTPTWRVYSTGSNVFQTRAGCLIGAEHVNNSYECDIPIGAGICASYQTQTNSPRRARSVASQSIIAYTMSLGAENSVAYSNNSIAIPTNFTISVTTEILPVSMTKTSVDCTMYICGDSTECSNLLLQYGSFCTQLNRALTGIAVEQDKNTQEVFAQVKQIYKTPPIKDFGGFNFSQILPDPSKPSKRSFIEDLLFNKVTLADAGFIKQYGDCLGDIAARDLICVQKFNGLTVLPPLLTDEMIAQYCSALLAGTITSGWTFGAGAALQIPFAMQMAYRFNGIGVTQNVLYENQKLIANQFNSAIGKIQDSLSSTASALGKLQDVVNQNAQALNTLVKQLSSNFGAISSVLNDILSRLDKVEAEVQIDRLITGRLQSLQTYVTQQLIRAAEIRASANLAATKMSECVLGQSKRVDFCGKGYHLMSFPQCAPHGVVFLHVTYVPAQEKNFTTAPAICHDGKAHFPREGVFVSNGTHWFVTQRNFYEPQIITTDNTFVSGNCDVVIGIVNNTVYDPLQPELDSGGGGSDIDPYKEFGSSYQLLNFLPLDFFPDLNALVDTATALYEEELTGREHCSPHHTAIRQALVCWDELTKLIAWMSSNITSEQVRTIIVNHVNDTWGLKVRQSLWFHLSCLTFGQHTVQEFLVSFGVWIRTPAPYRPPNAPILSTLPEHTVIC

SEQ ID NO: 11627 - protein, 1301 aa, Artificial Sequence
  SARS-CoV-2/Finland/FIN03032020A/2020__EPI_ISL_413602 spike protein (1-1147)(T874C_S1055C) WhcAg construct
MFVFLVLLPLVSSQCVNLTTRTQLPPAYTNSFTRGVYYPDKVFRSSVLHSTQDLFLPFFSNVTWFHAIHVSGTNGTKRFDNPVLPFNDGVYFASTEKSNIIRGWIFGTTLDSKTQSLLIVNNATNVVIKVCEFQFCNDPFLGVYYHKNNKSWMESEFRVYSSANNCTFEYVSQPFLMDLEGKQGNFKNLREFVFKNIDGYFKIYSKHTPINLVRDLPQGFSALEPLVDLPIGINITRFQTLLALHRSYLTPGDSSSGWTAGAAAYYVGYLQPRTFLLKYNENGTITDAVDCALDPLSETKCTLKSFTVEKGIYQTSNFRVQPTESIVRFPNITNLCPFGEVFNATRFASVYAWNRKRISNCVADYSVLYNSASFSTFKCYGVSPTKLNDLCFTNVYADSFVIRGDEVRQIAPGQTGKIADYNYKLPDDFTGCVISWNSNNLDSKVGGNYNYLYRLFRKSNLKPFERDISTEIYQAGSTPCNGVEGFNCYFPLQSYGFQPTNGVGYQPYRVVVLSFELLHAPATVCGPKKSTNLVKNKCVNFNFNGLTGTGVLTESNKKFLPFQQFGRDIADTTDAVRDPQTLEILDITPCSFGGVSVITPGTNTSNQVAVLYQGVNCTEVPVAIHADQLTPTWRVYSTGSNVFQTRAGCLIGAEHVNNSYECDIPIGAGICASYQTQTNSPRRARSVASQSIIAYTMSLGAENSVAYSNNSIAIPTNFTISVTTEILPVSMTKTSVDCTMYICGDSTECSNLLLQYGSFCTQLNRALTGIAVEQDKNTQEVFAQVKQIYKTPPIKDFGGFNFSQILPDPSKPSKRSFIEDLLFNKVTLADAGFIKQYGDCLGDIAARDLICAQKFNGLTVLPPLLTDEMIAQYCSALLAGTITSGWTFGAGAALQIPFAMQMAYRFNGIGVTQNVLYENQKLIANQFNSAIGKIQDSLSSTASALGKLQDVVNQNAQALNTLVKQLSSNFGAISSVLNDILSRLDKVEAEVQIDRLITGRLQSLQTYVTQQLIRAAEIRASANLAATKMSECVLGQSKRVDFCGKGYHLMSFPQCAPHGVVFLHVTYVPAQEKNFTTAPAICHDGKAHFPREGVFVSNGTHWFVTQRNFYEPQIITTDNTFVSGNCDVVIGIVNNTVYDPLQPELDSGGGGSDIDPYKEFGSSYQLLNFLPLDFFPDLNALVDTATALYEEELTGREHCSPHHTAIRQALVCWDELTKLIAWMSSNITSEQVRTIIVNHVNDTWGLKVRQSLWFHLSCLTFGQHTVQEFLVSFGVWIRTPAPYRPPNAPILSTLPEHTVIC

SEQ ID NO: 11628 - protein, 1301 aa, Artificial Sequence
  SARS-CoV-2/France/GE1977/2020__EPI_ISL_414632 spike protein (1-1147)(T874C_S1055C) WhcAg construct
MFVFLVLLPLVSSQCVNLTTRTQLPPAYTNSFTRGVYYPDKVFRSSVLHSTQDLFLPFFSNVTWFHAIHVSGTNGTKRFDNPVLPFNDGVYFASTEKSNIIRGWIFGTTLDSKTQSLLIVNNATNVVIKVCEFQFCNDPFLGVYYHKNNKSWMESEFRVYSSANNCTFEYVSQPFLMDLEGKQGNFKNLREFVFKNIDGYFKIYSKHTPINLVRDLPQGFSALEPLVDLPIGINITRFQTLLALHRSYLTPGDSSSGWTAGAAAYYVGYLQPRTFLLKYNENGTITDAVDCALDPLSETKCTLKSFTVEKGIYQTSNFRVQPTESIVRFPNITNLCPFGEVFNATRFASVYAWNRKRISNCVADYSVLYNSASFSTFKCYGVSPTKLNDLCFTNVYADSFVIRGDEVRQIAPGQTGKIADYNYKLPDDFTGCVIAWNSNNLDSKVGGNYNYLYRLFRKSNLKPFERDISTEIYQAGSTPCNGVEGFNCYFPLQSYGFQPTNGVGYQPYRVVVLSFELLHAPATVCGPKKSTNLVKNKCVNFNFNGLTGTGVLTESNKKFLPFQQFGRDIADTTDAVRDPQTLEILDITPCSFGGVSVITPGTNTSNQVAVLYQGVNCTEVPVAIHADQLTPTWRVYSTGSNVFQTRAGCLIGAEHVNNSYECDIPIGAGICASYQTQTNSPRRARSVASQSIIAYTMSLGAENSVAYSNNSIAIPTNFTISVTTEILPVSMTKTSVDCTMYICGDSTECSNLLLQYGSFCTQLNRALTGIAVEQDKNTQEVFAQVKQIYKTPPIKDFGGFNFSQILPDPSKPSKRSFIEDLLFNKVTLADAGFIKQYGDCLGDIAARDLICAQKFNGLTVLPPLLTDEMIAQYCSALLAGTITSGWTFGAGAALQIPFAMQMAYRFNGIGVTQNVLYENQKLIANQFNSAIGKIQDSLFSTASALGKLQDVVNQNAQALNTLVKQLSSNFGAISSVLNDILSRLDKVEAEVQIDRLITGRLQSLQTYVTQQLIRAAEIRASANLAATKMSECVLGQSKRVDFCGKGYHLMSFPQCAPHGVVFLHVTYVPAQEKNFTTAPAICHDGKAHFPREGVFVSNGTHWFVTQRNFYEPQIITTDNTFVSGNCDVVIGIVNNTVYDPLQPELDSGGGGSDIDPYKEFGSSYQLLNFLPLDFFPDLNALVDTATALYEEELTGREHCSPHHTAIRQALVCWDELTKLIAWMSSNITSEQVRTIIVNHVNDTWGLKVRQSLWFHLSCLTFGQHTVQEFLVSFGVWIRTPAPYRPPNAPILSTLPEHTVIC

SEQ ID NO: 11629 - protein, 1301 aa, Artificial Sequence
  SARS-CoV-2/Finland/FIN-313/2020__EPI_ISL_414641 spike protein (1-1147)(T874C_S1055C) WhcAg construct
MFVFLVLLPLVSSQCVNLTTRTQLPPAYTNSFTRGVYYPDKVFRSSVLHSTQDLFLPFFSNVTWFHAIHVSGTNGTKRFDNPVLPFNDGVYFASTEKSNIIRGWIFGTTLDSKTQSLLIVNNATNVVIKVCEFQFCNDPFLGVYYHKNNKSWMESEFRVYSSANNCTFEYVSQPFLMDLEGKQGNFKNLREFVFKNIDGYFKIYSKHTPINLVRDLPQGFSALEPLVDLPIGINITRFKTLLALHRSYLTPGDSSSGWTAGAAAYYVGYLQPRTFLLKYNENGTITDAVDCALDPLSETKCTLKSFTVEKGIYQTSNFRVQPTESIVRFPNITNLCPFGEVFNATRFASVYAWNRKRISNCVADYSVLYNSASFSTFKCYGVSPTKLNDLCFTNVYADSFVIRGDEVRQIAPGQTGKIADYNYKLPDDFTGCVIAWNSNNLDSKVGGNYNYLYRLFRKSNLKPFERDISTEIYQAGSTPCNGVEGFNCYFPLQSYGFQPTNGVGYQPYRVVVLSFELLHAPATVCGPKKSTNLVKNKCVNFNFNGLTGTGVLTESNKKFLPFQQFGRDIADTTDAVRDPQTLEILDITPCSFGGVSVITPGTNTSNQVAVLYQGVNCTEVPVAIHADQLTPTWRVYSTGSNVFQTRAGCLIGAEHVNNSYECDIPIGAGICASYQTQTNSPRRARSVASQSIIAYTMSLGAENSVAYSNNSIAIPTNFTISVTTEILPVSMTKTSVDCTMYICGDSTECSNLLLQYGSFCTQLNRALTGIAVEQDKNTQEVFAQVKQIYKTPPIKDFGGFNFSQILPDPSKPSKRSFIEDLLFNKVTLADAGFIKQYGDCLGDIAARDLICAQKFNGLTVLPPLLTDEMIAQYCSALLAGTITSGWTFGAGAALQIPFAMQMAYRFNGIGVTQNVLYENQKLIANQFNSAIGKIQDSLSSTASALGKLQDVVNQNAQALNTLVKQLSSNFGAISSVLNDILSRLDKVEAEVQIDRLITGRLQSLQTYVTQQLIRAAEIRASANLAATKMSECVLGQSKRVDFCGKGYHLMSFPQCAPHGVVFLHVTYVPAQEKNFTTAPAICHDGKAHFPREGVFVSNGTHWFVTQRNFYEPQIITTDNTFVSGNCDVVIGIVNNTVYDPLQPELDSGGGGSDIDPYKEFGSSYQLLNFLPLDFFPDLNALVDTATALYEEELTGREHCSPHHTAIRQALVCWDELTKLIAWMSSNITSEQVRTIIVNHVNDTWGLKVRQSLWFHLSCLTFGQHTVQEFLVSFGVWIRTPAPYRPPNAPILSTLPEHTVIC

SEQ ID NO: 11630 - protein, 1301 aa, Artificial Sequence
  SARS-CoV-2/Netherlands/ZuidHolland_2/2020__EPI_ISL_414556 spike protein (1-1147)(T874C_S1055C) WhcAg construct
MFVFLVLLPLVSSQCVNLTTRTQLPPAYTNSFTRGVYYPDKVFRSSVLHSTQDLFLPFFSNVTWFHAIHVSGTNGTKRFDNPVLPFNDGVYFASTEKSNIIRGWIFGTTLDSKTQSLLIVNNATNVVIKVCEFQFCNDPFLGVYYHKNNKSWMESEFRVYSSANNCTFEYVSQPFLMDLEGKQGNFKNLREFVFKNIDGYFKIYSKHTPINLVRDLPQGFSALEPLVDLPIGINITRFQTLLALHRSYLTPGDSSSGWTAGAAAYYVGYLQPRTFLLKYNENGTITDAVDCALDPLSETKCTLKSFTVEKGIYQTSNFRVQPTESIVRFPNITNLCPFGEVFNATRFASVYAWNRKRISNCVADYSVLYNSASFSTFKCYGVSPTKLNDLCFTNVYADSFVIRGDEVRQIAPGQTGKIADYNYKLPDDFTGCVIAWNSNNLDSKVGGNYNYLYRLFRKSNLKPFERDISTEIYQAGSTPCNGVEGFNCYFPLQSYGFQPTNGVGYQPYRVVVLSFELLHAPATVCGPKKSTNLVKNKCVNFNFNGLTGTGVLTESNKKFLPFQQFGRDIADTTDAVRDPQTLEILDITPCSFGGVSVITPGTNTSNQVAVLYQGVNCTEVPVAIHADQLTPTWRVYSTGSNVFQTRAGCLIGAEHVNNSYECDIPIGAGICASYQTQTNSPRRARSVASQSIIAYTMSLGAENSVAYSNNSIAIPTNFTISVTTEILPVSMTKTSVDCTMYICGDSTECSNLLLQYGSFCTQLNRALTGIALEQDKNTQEVFAQVKQIYKTPPIKDFGGFNFSQILPDPSKPSKRSFIEDLLFNKVTLADAGFIKQYGDCLGDIAARDLICAQKFNGLTVLPPLLTDEMIAQYCSALLAGTITSGWTFGAGAALQIPFAMQMAYRFNGIGVTQNVLYENQKLIANQFNSAIGKIQDSLSSTASALGKLQDVVNQNAQALNTLVKQLSSNFGAISSVLNDILSRLDKVEAEVQIDRLITGRLQSLQTYVTQQLIRAAEIRASANLAATKMSECVLGQSKRVDFCGKGYHLMSFPQCAPHGVVFLHVTYVPAQEKNFTTAPAICHDGKAHFPREGVFVSNGTHWFVTQRNFYEPQIITTDNTFVSGNCDVVIGIVNNTVYDPLQPELDSGGGGSDIDPYKEFGSSYQLLNFLPLDFFPDLNALVDTATALYEEELTGREHCSPHHTAIRQALVCWDELTKLIAWMSSNITSEQVRTIIVNHVNDTWGLKVRQSLWFHLSCLTFGQHTVQEFLVSFGVWIRTPAPYRPPNAPILSTLPEHTVIC

SEQ ID NO: 11631 - protein, 1301 aa, Artificial Sequence
  SARS-CoV-2/USA/WA-UW31/2020__EPI_ISL_414618 spike protein (1-1147)(T874C_S1055C) WhcAg construct
MFVFLVLLPLVSSQCVNLTTRTQLPPAYTNSFTRGVYYPDKVFRSSVLHSTQDLFLPFFSNVTWFHAIHVSGTNGTKRFDNPVLPFNDGVYFASTEKSNIIRGWIFGTTLDSKTQSLLIVNNATNVVIKVCEFQFCNDPFLGVYYHKNNKSWMESEFRVYSSANNCTFEYVSQPFLMDLEGKQGNFKNLREFVFKNIDGYFKIYSKHTPINLVRDLPQGFSALEPLVDLPIGINITRFQTLLALHRSYLTPGDSSSGWTAGAAAYYVGYLQPRTFLLKYNENGTITDAVDCALDPLSETKCTLKSFTVEKGIYQTSNFRVQPTESIVRFPNITNLCPFGEVFNATRFASVYAWNRKRISNCVADYSVLYNSASFSTFKCYGVSPTKLNDLCFTNVYADSFVIRGDEVRQIAPGQTGKIADYNYKLPDDFTGCVIAWNSNNLDSKVGGNYNYLYRLFRKSNLKPFERDISTEIYQAGSTPCNGAEGFNCYFPLQSYGFQPTNGVGYQPYRVVVLSFELLHAPATVCGPKKSTNLVKNKCVNFNFNGLTGTGVLTESNKKFLPFQQFGRDIADTTDAVRDPQTLEILDITPCSFGGVSVITPGTNTSNQVAVLYQDVNCTEVPVAIHADQLTPTWRVYSTGSNVFQTRAGCLIGAEHVNNSYECDIPIGAGICASYQTQTNSPRRARSVASQSIIAYTMSLGAENSVAYSNNSIAIPTNFTISVTTEILPVSMTKTSVDCTMYICGDSTECSNLLLQYGSFCTQLNRALTGIAVEQDKNTQEVFAQVKQIYKTPPIKDFGGFNFSQILPDPSKPSKRSFIEDLLFNKVTLADAGFIKQYGDCLGDIAARDLICAQKFNGLTVLPPLLTDEMIAQYCSALLAGTITSGWTFGAGAALQIPFAMQMAYRFNGIGVTQNVLYENQKLIANQFNSAIGKIQDSLSSTASALGKLQDVVNQNAQALNTLVKQLSSNFGAISSVLNDILSRLDKVEAEVQIDRLITGRLQSLQTYVTQQLIRAAEIRASANLAATKMSECVLGQSKRVDFCGKGYHLMSFPQCAPHGVVFLHVTYVPAQEKNFTTAPAICHDGKAHFPREGVFVSNGTHWFVTQRNFYEPQIITTDNTFVSGNCDVVIGIVNNTVYDPLQPELDSGGGGSDIDPYKEFGSSYQLLNFLPLDFFPDLNALVDTATALYEEELTGREHCSPHHTAIRQALVCWDELTKLIAWMSSNITSEQVRTIIVNHVNDTWGLKVRQSLWFHLSCLTFGQHTVQEFLVSFGVWIRTPAPYRPPNAPILSTLPEHTVIC

SEQ ID NO: 11632 - protein, 1301 aa, Artificial Sequence
  SARS-CoV-2/South Korea/SNU01/2020__EPI_ISL_411929 spike protein (1-1147)(T874C_S1055C) WhcAg construct
MFVFLVLLPLVSSQCVNLTTRTQLPPAYTNSFTRGVYYPDKVFRSSVLHSTQDLFLPFFSNVTWFHAIHVSGTNGTKRFDNPVLPFNDGVYFASTEKSNIIRGWIFGTTLDSKTQSLLIVNNATNVVIKVCEFQFCNDPFLGVYYHKNNKSWMESEFRVYSSANNCTFEYVSQPFLMDLEGKQGNFKNLREFVFKNIDGYFKIYSKHTPINLVRDLPQGFWALEPLVDLPIGINITRFQTLLALHRSYLTPGDSSSGWTAGAAAYYVGYLQPRTFLLKYNENGTITDAVDCALDPLSETKCTLKSFTVEKGIYQTSNFRVQPTESIVRFPNITNLCPFGEVFNATRFASVYAWNRKRISNCVADYSVLYNSASFSTFKCYGVSPTKLNDLCFTNVYADSFVIRGDEVRQIAPGQTGKIADYNYKLPDDFTGCVIAWNSNNLDSKVGGNYNYLYRLFRKSNLKPFERDISTEIYQAGSTPCNGVEGFNCYFPLQSYGFQPTNGVGYQPYRVVVLSFELLHAPATVCGPKKSTNLVKNKCVNFNFNGLTGTGVLTESNKKFLPFQQFGRDIADTTDAVRDPQTLEILDITPCSFGGVSVITPGTNTSNQVAVLYQDVNCTEVPVAIHADQLTPTWRVYSTGSNVFQTRAGCLIGAEHVNNSYECDIPIGAGICASYQTQTNSPRRARSVASQSIIAYTMSLGAENSVAYSNNSIAIPTNFTISVTTEILPVSMTKTSVDCTMYICGDSTECSNLLLQYGSFCTQLNRALTGIAVEQDKNTQEVFAQVKQIYKTPPIKDFGGFNFSQILPDPSKPSKRSFIEDLLFNKVTLADAGFIKQYGDCLGDIAARDLICAQKFNGLTVLPPLLTDEMIAQYCSALLAGTITSGWTFGAGAALQIPFAMQMAYRFNGIGVTQNVLYENQKLIANQFNSAIGKIQDSLSSTASALGKLQDVVNQNAQALNTLVKQLSSNFGAISSVLNDILSRLDKVEAEVQIDRLITGRLQSLQTYVTQQLIRAAEIRASANLAATKMSECVLGQSKRVDFCGKGYHLMSFPQCAPHGVVFLHVTYVPAQEKNFTTAPAICHDGKAHFPREGVFVSNGTHWFVTQRNFYEPQIITTDNTFVSGNCDVVIGIVNNTVYDPLQPELDSGGGGSDIDPYKEFGSSYQLLNFLPLDFFPDLNALVDTATALYEEELTGREHCSPHHTAIRQALVCWDELTKLIAWMSSNITSEQVRTIIVNHVNDTWGLKVRQSLWFHLSCLTFGQHTVQEFLVSFGVWIRTPAPYRPPNAPILSTLPEHTVIC

SEQ ID NO: 11633 - protein, 1301 aa, Artificial Sequence
  SARS-CoV-2/China/WF0004/2020__EPI_ISL_413694 spike protein (1-1147)(T874C_S1055C) WhcAg construct
MFVFLVLLPLVSSQCVNLTTRTQLPPAYTNSFTRGVYYPDKVFRSSVLHSTQDLFLPFFSNVTWFHAIHVSGTNGTKRFDNPVLPFNDGVYFASTEKSNIIRGWIFGTTLDSKTQSLLIVNNATNVVIKVCEFQFCNDPFLGVYYHKNNKSWTESEFRVYSSANNCTFEYVSQPFLMDLEGKQGNFKNLREFVFKNIDGYFKIYSKHTPINLVRDLPQGFSALEPLVDLPIGINITRFQTLLALHRSYLTPGDSSSGWTAGAAAYYVGYLQPRTFLLKYNENGTITDAVDCALDPLSETKCTLKSFTVEKGIYQTSNFRVQPTESIVRFPNITNLCPFGEVFNATRFASVYAWNRKRISNCVADYSVLYNSASFSTFKCYGVSPTKLNDLCFTNVYADSFVIRGDEVRQIAPGQTGKIADYNYKLPDDFTGCVIAWNSNNLDSKVGGNYNYLYRLFRKSNLKPFERDISTEIYQAGSTPCNGVEGFNCYFPLQSYGFQPTNGVGYQPYRVVVLSFELLHAPATVCGPKKSTNLVKNKCVNFNFNGLTGTGVLTESNKKFLPFQQFGRDIADTTDAVRDPQTLEILDITPCSFGGVSVITPGTNTSNQVAVLYQDVNCTEVPVAIHADQLTPTWRVYSTGSNVFQTRAGCLIGAEHVNNSYECDIPIGAGICASYQTQTNSPRRARSVASQSIIAYTMSLGAENSVAYSNNSIAIPTNFTISVTTEILPVSMTKTSVDCTMYICGDSTECSNLLLQYGSFCTQLNRALTGIAVEQDKNTQEVFAQVKQIYKTPPIKDFGGFNFSQILPDPSKPSKRSFIEDLLFNKVTLADAGFIKQYGDCLGDIAARDLICAQKFNGLTVLPPLLTDEMIAQYCSALLAGTITSGWTFGAGAALQIPFAMQMAYRFNGIGVTQNVLYENQKLIANQFNSAIGKIQDSLSSTASALGKLQDVVNQNAQALNTLVKQLSSNFGAISSVLNDILSRLDKVEAEVQIDRLITGRLQSLQTYVTQQLIRAAEIRASANLAATKMSECVLGQSKRFDFCGKGYHLMSFPQCAPHGVVFLHVTYVPAQEKNFTTAPAICHDGKAHFPREGVFVSNGTHWFVTQRNFYEPQIITTDNTFVSGNCDVVIGIVNNTVYDPLQPELDSGGGGSDIDPYKEFGSSYQLLNFLPLDFFPDLNALVDTATALYEEELTGREHCSPHHTAIRQALVCWDELTKLIAWMSSNITSEQVRTIIVNHVNDTWGLKVRQSLWFHLSCLTFGQHTVQEFLVSFGVWIRTPAPYRPPNAPILSTLPEHTVIC

SEQ ID NO: 11634 - protein, 1301 aa, Artificial Sequence
  SARS-CoV-2/China/WF0028/2020__EPI_ISL_413791 spike protein (1-1147)(T874C_S1055C) WhcAg construct
MFVFLVLLPLVSSQCVNLTTRTQLPPAYTNSFTRGVYYPDKVFRSSVLHSTQDLFLPFFSNVTWFHAIHVSGTNGTKRFDNPVLPFNDGVYFASTEKSNIIRGWIFGTTLDSKTQSLLIVNNATNVVIKVCEFQFCNDPFLGVYYHKNNKSWMESEFRVYSSANNCTFEYVSQPFLMDLEGKQGNFKNLREFVFKNIDGYFKIYSKHTPINLVRDLPQGFSALEPLVDLPIGINITRFQTLLALHRSYLTPGDSSSGWTAGAAAYYVGYLQPRTFLLKYNENGTITDAVDCALDPLSETKCTLKSFTVEKGIYQTSNFRVQPTESIVRFPNITNLCPFGEVFNATRFASVYAWNRKRISNCVADYSVLYNSASFSTFKCYGVSPTKLNDLCFTNVYADSFVIRGDEVRQIAPGQTGKIADYNYKLPDDFTGCVIAWNSNNLDSKVGGNYNYLYRLFRKSNLKPFERDISTEIYQAGSTPCNGVEGFNCYFPLQSYGFQPTNGVGYQPYRVVVLSFELLHAPATVCGPKKSTNLVKNKCVNFNFNGLTGTGVLTESNKKFLPFQQFGRDIADTTDAVRDPQTLEILDITPCSFGGVSVITPGTNTSNQVAVLYQDVNCTEVPVAIHADQLTPTWRVYSTGSNVFQTRAGCLIGAEHVNNSYECDIPIGAGICASYQTQTNSPRRARSVASQSIIAYTMSLGAENSVAYSNNSIAIPTNFTISVTTEILPVSMTKTSVDCTMYICGDSTECSNLLLQYGSFCTQLNRALTGIAVEQDKNTQEVFAQVKQIYKTPPIKDFGGFNFSQILPDPSKPSKRSFIEDLLFNKVTLADAGFIKQYGDCLGDIAARDLICAQKFNGLTVLPPLLTDEMIAQYCSALLAGTITSGWTFGAGAALQIPFAMQMAYRFNGIGVTQNVLYENQKLIANQFNSAIGKIQDSLSSTASALGKLQDVVNQNAQALNTLVKQLSSNFGAISSVLNDILSRLDKVEAEVQIDRLITGRLQSLQTYVTQQLIRAAEIRASANLAATKMSECVLGQSKRVDFCGKGYHLMSFPQCAPHGVVFLHVTYVPAQEKNFTTAPAICHDGKAHFPREGVFVSNGTHWFVTQRNFYEPQIITTDNTFVSGNCDVVIGIVNNTVYDPLQPELESGGGGSDIDPYKEFGSSYQLLNFLPLDFFPDLNALVDTATALYEEELTGREHCSPHHTAIRQALVCWDELTKLIAWMSSNITSEQVRTIIVNHVNDTWGLKVRQSLWFHLSCLTFGQHTVQEFLVSFGVWIRTPAPYRPPNAPILSTLPEHTVIC

SEQ ID NO: 11635 - protein, 1301 aa, Artificial Sequence
  SARS-CoV-2/2019-nCoV/USA-CruiseA-18/2020__MT159716.1 spike protein (1-1147)(T874C_S1055C) WhcAg construct
MFVFLVLLPLVSSQCVNLTTRTQLPPAYTNSFTRGVYYPDKVFRSSVLHSTQDLFLPFFSNVTWFHAIHVSGTNGTKRFDNPVLPFNDGVYFASTEKSNIIRGWIFGTTLDSKTQSLLIVNNATNVVIKVCEFQFCNDPFLGVYYHKNNKSWMESELRVYSSANNCTFEYVSQPFLMDLEGKQGNFKNLREFVFKNIDGYFKIYSKHTPINLVRDLPQGFSALEPLVDLPIGINITRFQTLLALHRSYLTPGDSSSGWTAGAAAYYVGYLQPRTFLLKYNENGTITDAVDCALDPLSETKCTLKSFTVEKGIYQTSNFRVQPTESIVRFPNITNLCPFGEVFNATRFASVYAWNRKRISNCVADYSVLYNSASFSTFKCYGVSPTKLNDLCFTNVYADSFVIRGDEVRQIAPGQTGKIADYNYKLPDDFTGCVIAWNSNNLDSKVGGNYNYLYRLFRKSNLKPFERDISTEIYQAGSTPCNGVEGFNCYFPLQSYGFQPTNGVGYQPYRVVVLSFELLHAPATVCGPKKSTNLVKNKCVNFNFNGLTGTGVLTESNKKFLPFQQFGRDIADTTDAVRDPQTLEILDITPCSFGGVSVITPGTNTSNQVAVLYQDVNCTEVPVAIHADQLTPTWRVYSTGSNVFQTRAGCLIGAEHVNNSYECDIPIGAGICASYQTQTNSPRRARSVASQSIIAYTMSLGAENSVAYSNNSIAIPTNFTISVTTEILPVSMTKTSVDCTMYICGDSTECSNLLLQYGSFCTQLNRALTGIAVEQDKNTQEVFAQVKQIYKTPPIKDFGGFNFSQILPDPSKPSKRSFIEDLLFNKVTLADAGFIKQYGDCLGDIAARDLICAQKFNGLTVLPPLLTDEMIAQYCSALLAGTITSGWTFGAGAALQIPFAMQMAYRFNGIGVTQNVLYENQKLIANQFNSAIGKIQDSLSSTASALGKLQDVVNQNAQALNTLVKQLSSNFGAISSVLNDILSRLDKVEAEVQIDRLITGRLQSLQTYVTQQLIRAAEIRASANLAATKMSECVLGQSKRVDFCGKGYHLMSFPQCAPHGVVFLHVTYVPAQEKNFTTAPAICHDGKAHFPREGVFVSNGTHWFVTQRNFYEPQIITTDNTFVSGNCDVVIGIVNNTVYDPLQPELDSGGGGSDIDPYKEFGSSYQLLNFLPLDFFPDLNALVDTATALYEEELTGREHCSPHHTAIRQALVCWDELTKLIAWMSSNITSEQVRTIIVNHVNDTWGLKVRQSLWFHLSCLTFGQHTVQEFLVSFGVWIRTPAPYRPPNAPILSTLPEHTVIC

SEQ ID NO: 11636 - protein, 1301 aa, Artificial Sequence
  SARS-CoV-2/SARS-CoV-2/Yunnan-01/human/2020/CHN__MT049951.1 spike protein (1-1147)(T874C_S1055C) WhcAg construct
MFVFLVLLPLVSSQCVNLTTRTQLPPANTNSFTRGVYYPDKVFRSSVLHSTQDLFLPFFSNVTWFHAIHVSGTNGTKRFDNPVLPFNDGVYFASTEKSNIIRGWIFGTTLDSKTQSLLIVNNATNVVIKVCEFQFCNDPFLGVYYHKNNKSWMESEFRVYSSANNCTFEYVSQPFLMDLEGKQGNFKNLREFVFKNIDGYFKIYSKHTPINLVRDLPQGFSALEPLVDLPIGINITRFQTLLALHRSYLTPGDSSSGWTAGAAAYYVGYLQPRTFLLKYNENGTITDAVDCALDPLSETKCTLKSFTVEKGIYQTSNFRVQPTESIVRFPNITNLCPFGEVFNATRFASVYAWNRKRISNCVADYSVLYNSASFSTFKCYGVSPTKLNDLCFTNVYADSFVIRGDEVRQIAPGQTGKIADYNYKLPDDFTGCVIAWNSNNLDSKVGGNYNYLYRLFRKSNLKPFERDISTEIYQAGSTPCNGVEGFNCYFPLQSYGFQPTNGVGYQPYRVVVLSFELLHAPATVCGPKKSTNLVKNKCVNFNFNGLTGTGVLTESNKKFLPFQQFGRDIADTTDAVRDPQTLEILDITPCSFGGVSVITPGTNTSNQVAVLYQDVNCTEVPVAIHADQLTPTWRVYSTGSNVFQTRAGCLIGAEHVNNSYECDIPIGAGICASYQTQTNSPRRARSVASQSIIAYTMSLGAENSVAYSNNSIAIPTNFTISVTTEILPVSMTKTSVDCTMYICGDSTECSNLLLQYGSFCTQLNRALTGIAVEQDKNTQEVFAQVKQIYKTPPIKDFGGFNFSQILPDPSKPSKRSFIEDLLFNKVTLADAGFIKQYGDCLGDIAARDLICAQKFNGLTVLPPLLTDEMIAQYCSALLAGTITSGWTFGAGAALQIPFAMQMAYRFNGIGVTQNVLYENQKLIANQFNSAIGKIQDSLSSTASALGKLQDVVNQNAQALNTLVKQLSSNFGAISSVLNDILSRLDKVEAEVQIDRLITGRLQSLQTYVTQQLIRAAEIRASANLAATKMSECVLGQSKRVDFCGKGYHLMSFPQCAPHGVVFLHVTYVPAQEKNFTTAPAICHDGKAHFPREGVFVSNGTHWFVTQRNFYEPQIITTDNTFVSGNCDVVIGIVNNTVYDPLQPELDSGGGGSDIDPYKEFGSSYQLLNFLPLDFFPDLNALVDTATALYEEELTGREHCSPHHTAIRQALVCWDELTKLIAWMSSNITSEQVRTIIVNHVNDTWGLKVRQSLWFHLSCLTFGQHTVQEFLVSFGVWIRTPAPYRPPNAPILSTLPEHTVIC

SEQ ID NO: 11637 - protein, 1301 aa, Artificial Sequence
  SARS-CoV-2/USA/WA-UW292/2020__EPI_ISL_418077 spike protein (1-1147)(T874C_S1055C) WhcAg construct
MFVFLVLLPLVSSQCVNLTTRTQLPPAYTNSFTRGVYYPDKVFRSSVLHSTQDLFLPFFSNVTWFHAIHVSGTNGTKRFDNPVLPFNDGVYFASTEKSNIIRGWIFGTTLDSKTQSLLIVNNATNVVIKVCEFQFCNDPFLGVYYHKNNKSWMESEFRVYSSANNCTFEYVSQPFLMDLEGKQGNFKNLREFVFKNIDGYFKIYSKHTPINLVRDLPQGFSALEPLVDLPIGINITRFQTLLALHRSYLTPGDSSSGWTAGAAAYYVGYLQPRTFLLKYNENGTITDAVDCALDPLSETKCTLKSFTVEKGIYQTSNFRVQPTESIVRFPNITNLCPFGEVFNATRFASVYAWNRKRISNCVADYSVLYNSASFSTFKCYGVSPTKLNDLCFTNVYADSFVIRGDEVRQIAPGQTGKIADYNYKLPDDFTGCVIAWNSNNLDSKVGGNYNYLYRLFRKSNLKPFERDISTEIYQASSTPCNGVEGFNCYFPLQSYGFQPTNGVGYQPYRVVVLSFELLHAPATVCGPKKSTNLVKNKCVNFNFNGLTGTGVLTESNKKFLPFQQFGRDIADTTDAVRDPQTLEILDITPCSFGGVSVITPGTNTSNQVAVLYQDVNCTEVPVAIHADQLTPTWRVYSTGSNVFQTRAGCLIGAEHVNNSYECDIPIGAGICASYQTQTNSPRRARSVASQSIIAYTMSLGAENSVAYSNNSIAIPTNFTISVTTEILPVSMTKTSVDCTMYICGDSTECSNLLLQYGSFCTQLNRALTGIAVEQDKNTQEVFAQVKQIYKTPPIKDFGGFNFSQILPDPSKPSKRSFIEDLLFNKVTLADAGFIKQYGDCLGDIAARDLICAQKFNGLTVLPPLLTDEMIAQYCSALLAGTITSGWTFGAGAALQIPFAMQMAYRFNGIGVTQNVLYENQKLIANQFNSAIGKIQDSLSSTASALGKLQDVVNQNAQALNTLVKQLSSNFGAISSVLNDILSRLDKVEAEVQIDRLITGRLQSLQTYVTQQLIRAAEIRASANLAATKMSECVLGQSKRVDFCGKGYHLMSFPQCAPHGVVFLHVTYVPAQEKNFTTAPAICHDGKAHFPREGVFVSNGTHWFVTQRNFYEPQIITTDNTFVSGNCDVVIGIVNNTVYDPLQPELDSGGGGSDIDPYKEFGSSYQLLNFLPLDFFPDLNALVDTATALYEEELTGREHCSPHHTAIRQALVCWDELTKLIAWMSSNITSEQVRTIIVNHVNDTWGLKVRQSLWFHLSCLTFGQHTVQEFLVSFGVWIRTPAPYRPPNAPILSTLPEHTVIC

SEQ ID NO: 11638 - protein, 1301 aa, Artificial Sequence
  SARS-CoV-2/Iceland/192/2020__EPI_ISL_417819 spike protein (1-1147)(T874C_S1055C) WhcAg construct
MFVFFVLLPLVSSQCVNLTTRTQLPPAYTNSFTRGVYYPDKVFRSSVLHSTQDLFLPFFSNVTWFHAIHVSGTNGTKRFDNPVLPFNDGVYFASTEKSNIIRGWIFGTTLDSKTQSLLIVNNATNVVIKVCEFQFCNDPFLGVYYHKNNKSWMESEFRVYSSANNCTFEYVSQPFLMDLEGKQGNFKNLREFVFKNIDGYFKIYSKHTPINLVRDLPQGFSALEPLVDLPIGINITRFQTLLALHRSYLTPGDSSSGWTAGAAAYYVGYLQPRTFLLKYNENGTITDAVDCALDPLSETKCTLKSFTVEKGIYQTSNFRVQPTESIVRFPNITNLCPFGEVFNATRFASVYAWNRKRISNCVADYSVLYNSASFSTFKCYGVSPTKLNDLCFTNVYADSFVIRGDEVRQIAPGQTGKIADYNYKLPDDFTGCVIAWNSNNLDSKVGGNYNYLYRLFRKSNLKPFERDISTEIYQAGSTPCNGVEGFNCYFPLQSYGFQPTNGVGYQPYRVVVLSFELLHAPATVCGPKKSTNLVKNKCVNFNFNGLTGTGVLTESNKKFLPFQQFGRDIADTTDAVRDPQTLEILDITPCSFGGVSVITPGTNTSNQVAVLYQGVNCTEVPVAIHADQLTPTWRVYSTGSNVFQTRAGCLIGAEHVNNSYECDIPIGAGICASYQTQTNSPRRARSVASQSIIAYTMSLGAENSVAYSNNSIAIPTNFTISVTTEILPVSMTKTSVDCTMYICGDSTECSNLLLQYGSFCTQLNRALTGIAVEQDKNTQEVFAQVKQIYKTPPIKDFGGFNFSQILPDPSKPSKRSFIEDLLFNKVTLADAGFIKQYGDCLGDIAARDLICAQKFNGLTVLPPLLTDEMIAQYCSALLAGTITSGWTFGAGAALQIPFAMQMAYRFNGIGVTQNVLYENQKLIANQFNSAIGKIQDSLSSTASALGKLQDVVNQNAQALNTLVKQLSSNFGAISSVLNDILSRLDKVEAEVQIDRLITGRLQSLQTYVTQQLIRAAEIRASANLAATKMSECVLGQSKRVDFCGKGYHLMSFPQCAPHGVVFLHVTYVPAQEKNFTTAPAICHDGKAHFPREGVFVSNGTHWFVTQRNFYEPQIITTDNTFVSGNCDVVIGIVNNTVYDPLQPELDSGGGGSDIDPYKEFGSSYQLLNFLPLDFFPDLNALVDTATALYEEELTGREHCSPHHTAIRQALVCWDELTKLIAWMSSNITSEQVRTIIVNHVNDTWGLKVRQSLWFHLSCLTFGQHTVQEFLVSFGVWIRTPAPYRPPNAPILSTLPEHTVIC

SEQ ID NO: 11639 - protein, 1301 aa, Artificial Sequence
  SARS-CoV-2/Belgium/ULG-6939/2020__EPI_ISL_417020 spike protein (1-1147)(T874C_S1055C) WhcAg construct
MFVFLVLLPLVSSQCVNLTTRTQLPPAYTNSFTRGVYYPDKVFRSSVLHSTQDLFLPFFSNVTWFHAIHVSGTNGTKRFDNPVLPFNDGVYFASTEKSNIIRGWIFGTTLDSKTQSLLIVNNATNVVIKVCEFQFCNDPFLGVYYHKNNKSWMESEFRVYSSANNCTFEYVSQPFLMDLEGKQGNFKNLREFVFKNIDGYFKIYSKHTPINLVRDLPQGFSALEPLVDLPIGINITRFQTLLALHRSYLTPGDSSSGWTAGAAAYYVGYLQPRTFLLKYNENGTITDAVDCALDPLSETKCTLKSFTVEKGIYQTSNFRVQPTESIVRFPNITNLCPFGEVFNATRFASVYAWNRKRISNCVADYSVLYNSASFSTFKCYGVSPTKLNDLCFTNVYADSFVIRGDEVRQIAPGQTGKIADYNYKLPDDFTGCVIAWNSNNLDSKVGGNYNYLYRLFRKSNLKPFERDISTEIYQAGSTPCNGVEGFNCYFPLQSYGFQPTNGVGYQPYRVVVLSFELLHAPATVCGPKKSTNLVKNKCVNFNFNGLTGTGVLTESNKKFLPFQQFGRDIADTTDAVRDPQTLEILDITPCSFGGVSVITPGTNTSNQVAVLYQGVNCTEVPVAIHADQLTPTWRVYSTGSNVFQTRAGCLIGAEHVNNSYECDIPIGAGICASYQTQTNSPRRARSVASQSIIAYTMSLGAENSVVYSNNSIAIPTNFTISVTTEILPVSMTKTSVDCTMYICGDSTECSNLLLQYGSFCTQLNRALTGIAVEQDKNTQEVFAQVKQIYKTPPIKDFGGFNFSQILPDPSKPSKRSFIEDLLFNKVTLADAGFIKQYGDCLGDIAARDLICAQKFNGLTVLPPLLTDEMIAQYCSALLAGTITSGWTFGAGAALQIPFAMQMAYRFNGIGVTQNVLYENQKLIANQFNSAIGKIQDSLSSTASALGKLQDVVNQNAQALNTLVKQLSSNFGAISSVLNDILSRLDKVEAEVQIDRLITGRLQSLQTYVTQQLIRAAEIRASANLAATKMSECVLGQSKRVDFCGKGYHLMSFPQCAPHGVVFLHVTYVPAQEKNFTTAPAICHDGKAHFPREGVFVSNGTHWFVTQRNFYEPQIITTDNTFVSGNCDVVIGIVNNTVYDPLQPELDSGGGGSDIDPYKEFGSSYQLLNFLPLDFFPDLNALVDTATALYEEELTGREHCSPHHTAIRQALVCWDELTKLIAWMSSNITSEQVRTIIVNHVNDTWGLKVRQSLWFHLSCLTFGQHTVQEFLVSFGVWIRTPAPYRPPNAPILSTLPEHTVIC

SEQ ID NO: 11640 - protein, 1301 aa, Artificial Sequence
  SARS-CoV-2/France/HF2496/2020__EPI_ISL_418231 spike protein (1-1147)(T874C_S1055C) WhcAg construct
MFVFLVLLPLVSSQCVNLTTRTQLPPAYTNSFTRGVYYPDKVFRSSVLHSTQDLFLPFFSNVTWFHAIHVSGTNGTKRFDNPVLPFNDGVYFASTEKSNIIRGWIFGTTLDSKTQSLLIVNNATNVVIKVCEFQFCNDPFLGVYYHKNNKSWMESEFRVYSSANNCTFEYVSQPFLMDLEGKQGNFKNLREFVFKNIDGYFKIYSKHTPINLVRDLPQGFSALEPLVDLPIGINITRFQTLLALHRSYLTPGDSSSGWTAGAAAYYVGYLQPRTFLLKYNENGTITDAVDCALDPLSETKCTLKSFTVEKGIYQTSNFRVQPTESIVRFPNITNLCPFGEVFNATRFASVYAWNRKRISNCVADYSVLYNSASFSTFKCYGVSPTKLNDLCFTNVYADSFVIRGDEVRQIAPGQTGKIADYNYKLPDDFTGCVIAWNSNNLDSKVGGNYNYLYRLFRKSNLKPFERDISTEIYQAGSTPCNGVEGFNCYFPLQSYGFQPTNGVGYQPYRVVVLSFELLHAPATVCGPKKSTNLVKNKCVNFNFNGLTGTGVLTESNKKFLPFQQFGRDIADTTDAVRDPQTLEILDITPCSFGGVSVITPGTNTSNQVAVLYQGVNCTEVPVAIHADQLTPTWRVYSTGSNVFQTRAGCLIGAEHVNNSYECDIPIGAGICASYQTQTNSPRRARSVASQSIIAYTMSLGAENSVAYSNNSIAIPTNFTISVTTEILPVSMTKTSVDCTMYICGDSTECSNLLLQYGSFCTQLNRALTGIAVEQDKNTQEVFAQVKQIYKTPPIKDFGGFNFSQILPDPSKPSKRSFIEDLLFNKVTLADAGFIKQYGDCLGDIVARDLICAQKFNGLTVLPPLLTDEMIAQYCSALLAGTITSGWTFGAGAALQIPFAMQMAYRFNGIGVTQNVLYENQKLIANQFNSAIGKIQDSLSSTASALGKLQDVVNQNAQALNTLVKQLSSNFGAISSVLNDILSRLDKVEAEVQIDRLITGRLQSLQTYVTQQLIRAAEIRASANLAATKMSECVLGQSKRVDFCGKGYHLMSFPQCAPHGVVFLHVTYVPAQEKNFTTAPAICHDGKAHFPREGVFVSNGTHWFVTQRNFYEPQIITTDNTFVSGNCDVVIGIVNNTVYDPLQPELDSGGGGSDIDPYKEFGSSYQLLNFLPLDFFPDLNALVDTATALYEEELTGREHCSPHHTAIRQALVCWDELTKLIAWMSSNITSEQVRTIIVNHVNDTWGLKVRQSLWFHLSCLTFGQHTVQEFLVSFGVWIRTPAPYRPPNAPILSTLPEHTVIC

SEQ ID NO: 11641 - protein, 1301 aa, Artificial Sequence
  SARS-CoV-2/USA/WA-UW291/2020__EPI_ISL_418076 spike protein (1-1147)(T874C_S1055C) WhcAg construct
MFVFLVLLPLVSSQCVNLTTRTQLPPAYTNSFTRGVYYPDKVFRSSVLHSTQDLFLPFFSNVTWFHAIHVSGTNGTKRFDNPVLPFNDGVYFASTEKSNIIRGWIFGTTLDSKTQSLLIVNNATNVVIKVCEFQFCNDPFLGVYYHKNNKSWMESEFRVYSSANNCTFEYVSQPFLMDLEGKQGNFKNLREFVFKNIDGYFKIYSKHTPINLVRDLPQGFSALEPLVDLPIGINITRFQTLLALHRSYLTPGDSSSGWTAGAAAYYVGYLQPRTFLLKYNENGTITDAVDCALDPLSETKCTLKSFTVEKGIYQTSNFRVQPTESIVRFPNITNLCPFGEVFNATRFASVYAWNRKRISNCVADYSVLYNSASFSTFKCYGVSPTKLNDLCFTNVYADSFVIRGDEVRQIAPGQTGKIADYNYKLPDDFTGCVIAWNSNNLDSKVGGNYNYLYRLFRKSNLKPFERDISTEIYQAGSTPCNGVEGFNCYFPLQSYGFQPTNGVGYQPYRVVVLSFELLHAPATVCGPKKSTNLVKNKCVNFNFNGLTGTGVLTESNKKFLPFQQFGRDIADTTDAVRDPQTLEILDITPCSFGGVSVITPGTNTSNQVAVLYQGVNCTEVPVAIHADQLTPTWRVYSTGSNVFQTRAGCLIGAEHVNNSYECDIPIGAGICASYQTQTNSPRRARSVASQSIIAYTMSLGAENSVAYSNNSIAIPTNFTISVTTEILPVSMTKTSVDCTMYICGDSTECSNLLLQYGSFCTQLNRALTGIAVEQDKNTQEVFAQVKQIYKTPPIKDFGGFNFSQILPDPSKPSKRSFIEDLLFNKVTLADAGFIKQYGDCLGDIAARDLICAQKFNGLTVLPPLLTDEMIAQYCSALLAGTITSGWTFGAGAALQIPFAMQMAYRFNGIGVTQNVLYENQKLIANQFNSAIGKIQYSLSSTASALGKLQDVVNQNAQALNTLVKQLSSNFGAISSVLNDILSRLDKVEAEVQIDRLITGRLQSLQTYVTQQLIRAAEIRASANLAATKMSECVLGQSKRVDFCGKGYHLMSFPQCAPHGVVFLHVTYVPAQEKNFTTAPAICHDGKAHFPREGVFVSNGTHWFVTQRNFYEPQIITTDNTFVSGNCDVVIGIVNNTVYDPLQPELDSGGGGSDIDPYKEFGSSYQLLNFLPLDFFPDLNALVDTATALYEEELTGREHCSPHHTAIRQALVCWDELTKLIAWMSSNITSEQVRTIIVNHVNDTWGLKVRQSLWFHLSCLTFGQHTVQEFLVSFGVWIRTPAPYRPPNAPILSTLPEHTVIC

SEQ ID NO: 11642 - protein, 1301 aa, Artificial Sequence; identical to SEQ ID NO: 11605
  SARS-CoV-2/Portugal/PT0034/2020__EPI_ISL_418019 spike protein (1-1147)(T874C_S1055C) WhcAg construct

SEQ ID NO: 11643 - protein, 1301 aa, Artificial Sequence; identical to SEQ ID NO: 11597
  SARS-CoV-2/Iceland/202/2020__EPI_ISL_417750 spike protein (1-1147)(T874C_S1055C) WhcAg construct

SEQ ID NO: 11644 - protein, 1301 aa, Artificial Sequence
  SARS-CoV-2/USA/WA-UW261/2020__EPI_ISL_418046 spike protein (1-1147)(T874C_S1055C) WhcAg construct
MFVFLVLLPLVSSQCVNLTTRTQLPPAYTNSFTRGVYYPDKVFRSSVLHSTQDLFLPFFSNVTWFHAIHVSGTNGTKRFDNPVLPFNDGVYFASTEKSNIIRGWIFGTTLDSKTQSLLIVNNATNVVIKVCEFQFCNDPFLGVYYHKNNKSWMESEFRVYSSANNCTFEYVSQPFLMDLEGKQGNFKNLREFVFKNIDGYFKIYSKHTPINLVRDLPQGFSALEPLVDLPIGINITRFQTLLALHRSYLTPGDSSSGWTAGAAAYYVGYLQPRTFLLKYNENGTITDAVDCALDPLSETKCTLKSFTVEKGIYQTSNFRVQPTESIVRFPNITNLCPFGEVFNATRFTSVYAWNRKRISNCVADYSVLYNSASFSTFKCYGVSPTKLNDLCFTNVYADSFVIRGDEVRQIAPGQTGKIADYNYKLPDDFTGCVIAWNSNNLDSKVGGNYNYLYRLFRKSNLKPFERDISTEIYQAGSTPCNGVEGFNCYFPLQSYGFQPTNGVGYQPYRVVVLSFELLHAPATVCGPKKSTNLVKNKCVNFNFNGLTGTGVLTESNKKFLPFQQFGRDIADTTDAVRDPQTLEILDITPCSFGGVSVITPGTNTSNQVAVLYQDVNCTEVPVAIHADQLTPTWRVYSTGSNVFQTRAGCLIGAEHVNNSYECDIPIGAGICASYQTQTNSPRRARSVASQSIIAYTMSLGAENSVAYSNNSIAIPTNFTISVTTEILPVSMTKTSVDCTMYICGDSTECSNLLLQYGSFCTQLNRALTGIAVEQDKNTQEVFAQVKQIYKTPPIKDFGGFNFSQILPDPSKPSKRSFIEDLLFNKVTLADAGFIKQYGDCLGDIAARDLICAQKFNGLTVLPPLLTDEMIAQYCSALLAGTITSGWTFGAGAALQIPFAMQMAYRFNGIGVTQNVLYENQKLIANQFNSAIGKIQDSLSSTASALGKLQDVVNQNAQALNTLVKQLSSNFGAISSVLNDILSRLDKVEAEVQIDRLITGRLQSLQTYVTQQLIRAAEIRASANLAATKMSECVLGQSKRVDFCGKGYHLMSFPQCAPHGVVFLHVTYVPAQEKNFTTAPAICHDGKAHFPREGVFVSNGTHWFVTQRNFYEPQIITTDNTFVSGNCDVVIGIVNNTVYDPLQPELDSGGGGSDIDPYKEFGSSYQLLNFLPLDFFPDLNALVDTATALYEEELTGREHCSPHHTAIRQALVCWDELTKLIAWMSSNITSEQVRTIIVNHVNDTWGLKVRQSLWFHLSCLTFGQHTVQEFLVSFGVWIRTPAPYRPPNAPILSTLPEHTVIC

SEQ ID NO: 11645 - protein, 1301 aa, Artificial Sequence
  SARS-CoV-2/Portugal/PT0035/2020__EPI_ISL_418020 spike protein (1-1147)(T874C_S1055C) WhcAg construct
MFVFLVLLPLVSSQCVNLTTRTQLPPAYTNSFTRGVYYPDKVFRSSVLHSTQDLFLPFFSNVTWFHAIHVSGTNGTKRFDNPVLPFNDGVYFASTEKSNIIRGWIFGTTLDSKTQSLLIVNNATNVVIKVCEFQFCNDPFLGVYYHKNNKSWMESEFRVYSSANNCTFEYVSQPFLMDLEGKQGNFKNLREFVFKNIDGYFKIYSKHTPINLVRDLPQGFSALEPLVDLPIGINITRFQTLLALHRSYLTPGDSSSGWTAGAAAYYVGYLQPRTFLLKYNENGTITDAVDCALDPLSETKCTLKSFTVEKGIYQTSNFRVQPTESIVRFPNITNLCPFGEVFNATRFASVYAWNRKRISNCVADYSVLYNSASFSTFKCYGVSPTKLNDLCFTNVYADSFVIRGDEVRQIAPGQTGKIADYNYKLPDDFTGCVIAWNSNNLDSKVGGNYNYLYRLFRKSNLKPFERDISTEIYQAGSTPCNGVEGFNCYFPLQSYGFQPTNGVGYQPYRVVVLSFELLHAPATVCGPKKSTNLVKNKCVNFNFNGLTGTGVLTESNKKFLPFQQFGRDIADTTDAVRDPQTLEILDITPCSFGGVSVITPGTNTSNQVAVLYQDVNCTEVPVAIHADQLTPTWRVYSTGSNVFQTRAGCLIGAEHVNNSYECDIPIGAGICASYQTQTNSPRRARSVASQSIIAYTMSLGAENSVAYSNNSIAIPTNFTISVTTEILPVSMTKTSVDCTMYICGDSTECSNLLLQYGSFCTQLNRALTGIAVEQDKNTQEVFAQVKQIYKTPPIKDFGGFNFSQILPDPSKPSKRSFIEDLLFNKVTLADAGFIKQYGDCLGDISARDLICAQKFNGLTVLPPLLTDEMIAQYCSALLAGTITSGWTFGAGAALQIPFAMQMAYRFNGIGVTQNVLYENQKLIANQFNSAIGKIQDSLSSTASALGKLQDVVNQNAQALNTLVKQLSSNFGAISSVLNDILSRLDKVEAEVQIDRLITGRLQSLQTYVTQQLIRAAEIRASANLAATKMSECVLGQSKRVDFCGKGYHLMSFPQCAPHGVVFLHVTYVPAQEKNFTTAPAICHDGKAHFPREGVFVSNGTHWFVTQRNFYEPQIITTDNTFVSGNCDVVIGIVNNTVYDPLQPELDSGGGGSDIDPYKEFGSSYQLLNFLPLDFFPDLNALVDTATALYEEELTGREHCSPHHTAIRQALVCWDELTKLIAWMSSNITSEQVRTIIVNHVNDTWGLKVRQSLWFHLSCLTFGQHTVQEFLVSFGVWIRTPAPYRPPNAPILSTLPEHTVIC

SEQ ID NO: 11646 - protein, 1301 aa, Artificial Sequence
  SARS-CoV-2/USA/NY-NYUMC7/2020__EPI_ISL_418192 spike protein (1-1147)(T874C_S1055C) WhcAg construct
MFVFLVLLPLVSSQCVNLTTRTQLPPAYTNSFTRGVYYPDKVFRSSVLHSTQDLFLPFFSNVTWFHAIHVSGTNGTKRFDNPVLPFNDGVYFASTEKSNIIRGWIFGTTLDSKTQSLLIVNNATNVVIKVCEFQFCNDPFLGVYHHKNNKSWMESEFRVYSSANNCTFEYVSQPFLMDLEGKQGNFKNLREFVFKNIDGYFKIYSKHTPINLVRDLPQGFSALEPLVDLPIGINITRFQTLLALHRSYLTPGDSSSGWTAGAAAYYVGYLQPRTFLLKYNENGTITDAVDCALDPLSETKCTLKSFTVEKGIYQTSNFRVQPTESIVRFPNITNLCPFGEVFNATRFASVYAWNRKRISNCVADYSVLYNSASFSTFKCYGVSPTKLNDLCFTNVYADSFVIRGDEVRQIAPGQTGKIADYNYKLPDDFTGCVIAWNSNNLDSKVGGNYNYLYRLFRKSNLKPFERDISTEIYQAGSTPCNGVEGFNCYFPLQSYGFQPTNGVGYQPYRVVVLSFELLHAPATVCGPKKSTNLVKNKCVNFNFNGLTGTGVLTESNKKFLPFQQFGRDIADTTDAVRDPQTLEILDITPCSFGGVSVITPGTNTSNQVAVLYQGVNCTEVPVAIHADQLTPTWRVYSTGSNVFQTRAGCLIGAEHVNNSYECDIPIGAGICASYQTQTNSPRRARSVASQSIIAYTMSLGAENSVAYSNNSIAIPTNFTISVTTEILPVSMTKTSVDCTMYICGDSTECSNLLLQYGSFCTQLNRALTGIAVEQDKNTQEVFAQVKQIYKTPPIKDFGGFNFSQILPDPSKPSKRSFIEDLLFNKVTLADAGFIKQYGDCLGDIAARDLICAQKFNGLTVLPPLLTDEMIAQYCSALLAGTITSGWTFGAGAALQIPFAMQMAYRFNGIGVTQNVLYENQKLIANQFNSAIGKIQDSLSSTASALGKLQDVVNQNAQALNTLVKQLSSNFGAISSVLNDILSRLDKVEAEVQIDRLITGRLQSLQTYVTQQLIRAAEIRASANLAATKMSECVLGQSKRVDFCGKGYHLMSFPQCAPHGVVFLHVTYVPAQEKNFTTAPAICHDGKAHFPREGVFVSNGTHWFVTQRNFYEPQIITTDNTFVSGNCDVVIGIVNNTVYDPLQPELDSGGGGSDIDPYKEFGSSYQLLNFLPLDFFPDLNALVDTATALYEEELTGREHCSPHHTAIRQALVCWDELTKLIAWMSSNITSEQVRTIIVNHVNDTWGLKVRQSLWFHLSCLTFGQHTVQEFLVSFGVWIRTPAPYRPPNAPILSTLPEHTVIC

SEQ ID NO: 11647 - protein, 1301 aa, Artificial Sequence
  SARS-CoV-2/Iceland/189/2020__EPI_ISL_417709 spike protein (1-1147)(T874C_S1055C) WhcAg construct
MFVFLVLLPLVSSQCVNLTTRTQLPPAYTNSFTRGVYYPDKVFRSSVLHSTQDLFLPFFSNVTWFHAIHVSGTNGTKRFDNPVLPFNDGVYFASTEKSNIIRGWIFGTTLDSKTQSLLIVNNATNVVIKVCEFQFCNDPFLGVYYHKNNKSWMESEFRVYSSANNCTFEYVSQPFLMDLEGKQGNFKNLREFVFKNIDGYFKIYSKHTPINLVRDLPQGFSALEPLVDLPIGINITRFQTLLALHRSYLTPGDSSSGWTAGAAAYYVGYLQPRTFLLKYNENGTITDAVDCALDPLSETKCTLKSFTVEKGIYQTSNFRVQPTESIVRFPNITNLCPFGEVFNATRFASVYAWNRKRISNCVADYSVLYNSASFSTFKCYGVSPTKLNDLCFTNVYADSFVIRGDEVRQIAPGQTGKIADYNYKLPDDFTGCVIAWNSNNLDSKVGGNYNYLYRLFRKSNLKPFERDISTEIYQAGSTPCNGVEGFNCYFPLQSYGFQPTNGVGYQPYRVVVLSFELLHAPATVCGPKKSTNLVKNKCVNFNFNGLTGTGVLTESNKKFLPFQQFGRDIADTTDAVRDPQTLEILDITPCSFGGVSVITPGTNTSNQVAVLYQGVNCTEVPVAIHADQLTPTWRVYSTGSNVFQTRAGCLIGAEHVNNSYECDIPIGAGICASYQTQTNSPRRARSVASQSIIAYTMSLGAENSVAYSNNSIAIPTNFTISVTTEILPVSMTKTSVDCTMYICGDSTECSNLLLQYGSFCTQLNRALTGIAVEQDKNTQEVFAQVKQIYKTPPIKDFGGFNFSQILPDPSKPSKRSFIEDLLFNKVTLADAGFTKQYGDCLGDIAARDLICAQKFNGLTVLPPLLTDEMIAQYCSALLAGTITSGWTFGAGAALQIPFAMQMAYRFNGIGVTQNVLYENQKLIANQFNSAIGKIQDSLSSTASALGKLQDVVNQNAQALNTLVKQLSSNFGAISSVLNDILSRLDKVEAEVQIDRLITGRLQSLQTYVTQQLIRAAEIRASANLAATKMSECVLGQSKRVDFCGKGYHLMSFPQCAPHGVVFLHVTYVPAQEKNFTTAPAICHDGKAHFPREGVFVSNGTHWFVTQRNFYEPQIITTDNTFVSGNCDVVIGIVNNTVYDPLQPELDSGGGGSDIDPYKEFGSSYQLLNFLPLDFFPDLNALVDTATALYEEELTGREHCSPHHTAIRQALVCWDELTKLIAWMSSNITSEQVRTIIVNHVNDTWGLKVRQSLWFHLSCLTFGQHTVQEFLVSFGVWIRTPAPYRPPNAPILSTLPEHTVIC

SEQ ID NO: 11648 - protein, 1301 aa, Artificial Sequence
  SARS-CoV-2/Australia/NSW56/2020__EPI_ISL_417408 spike protein (1-1147)(T874C_S1055C) WhcAg construct
MFVFLVLLPLVSSQCVNLTTRTQLPPAYTNSFTRGVYYPDKVFRSSVLHSTQDLFLPFFSNVTWFHAIHVSGTNGTKRFDNPVLPFNDGVYFASTEKSNIIRGWIFGTTLDSKTQSLLIVNNATNVVIKVCEFQFCNDPFLGVYYHKNNKSWMESEFRVYSSANNCTFEYVSQPFLMDLEGKQGNFKNLREFVFKNIDGYFKIYSKHTPINLVRDLPQGFSALEPLVDLPIGINITRFQTLLALHRSYLTPGDSSSGWTAGAAAYYVGYLQPRTFLLKYNENGTITDAVDCALDPLSETKCTLKSFTVEKGIYQTSNFRVQPTESIVRFPNITNLCPFGEVFNATRFASVYAWNRKRISNCVADYSVLYNSASFSTFKCYGVSPTKLNDLCFTNVYADSFVIRGDEVRQIAPGQTGKIADYNYKLPDDFTGCVIAWNSNNLDSKVGGNYNYLYRLFRKSNLKPFERDISTEIYQAGSTPCNGVEGFNCYFPLQSYGFQPTNGVGYQPYRVVVLSFELLHAPATVCGPKKSTNLVKNKCVNFNFNGLTGTGVLTESNKKFLPFQQFGRDIADTTDAVRDPQTLEILDITPCSFGGVSVITPGTNTSNQVAVLYQDVNCTEVPVAIHADQLTPTWRVYSTGSNVFQTRAGCLIGAEHVNNSYECDIPIGAGICASYQTQTNSPRRARSVASQSIIAYTMSLGAENSVAYSNNSIAIPTNFTISVTTEILPVSMTKTSVDCTMYICGDSTECSNLLLQYGSFCTQLNRALTGIAVEQDKNTQEVFAQVKQIYKTPPIKDFGGFNFSQILPDSSKPSKRSFIEDLLFNKVTLADAGFIKQYGDCLGDIAARDLICAQKFNGLTVLPPLLTDEMIAQYCSALLAGTITSGWTFGAGAALQIPFAMQMAYRFNGIGVTQNVLYENQKLIANQFNSAIGKIQDSLSSTASALGKLQDVVNQNAQALNTLVKQLSSNFGAISSVLNDILSRLDKVEAEVQIDRLITGRLQSLQTYVTQQLIRAAEIRASANLAATKMSECVLGQSKRVDFCGKGYHLMSFPQCAPHGVVFLHVTYVPAQEKNFTTAPAICHDGKAHFPREGVFVSNGTHWFVTQRNFYEPQIITTDNTFVSGNCDVVIGIVNNTVYDPLQPELDSGGGGSDIDPYKEFGSSYQLLNFLPLDFFPDLNALVDTATALYEEELTGREHCSPHHTAIRQALVCWDELTKLIAWMSSNITSEQVRTIIVNHVNDTWGLKVRQSLWFHLSCLTFGQHTVQEFLVSFGVWIRTPAPYRPPNAPILSTLPEHTVIC

SEQ ID NO: 11649 - protein, 1301 aa, Artificial Sequence
  SARS-CoV-2/Iceland/280/2020__EPI_ISL_417608 spike protein (1-1147)(T874C_S1055C) WhcAg construct
MFVFLVLLPLVSSQCVNLTTRTQLPPAYTNSFTRGVYYPDKVFRSSVLHSTQDLFLPFFSNVTWFHAIHVSGTNGTKRFDNPVLPFNDGVYFASTEKSNIIRGWIFGTTLDSKTQSLLIVNNATNVVIKVCEFQFCNDPFLGVYYHKNNKSWMESEFRVYSSANNCTFEYVSQPFLMDLEGKQGNFKNLREFVFKNIDGYFKIYSKHTPINLVRDLPQGFSALEPLVDLPIGINITRFQTLLALHRSYLTPGDSSSGWTAGAAAYYVGYLQPRTFLLKYNENGTITDAVDCALDPLSETKCTLKSFTVEKGIYQTSNFRVQPTESIVRFPNITNLCPFGEVFNATRFASVYAWNRKRISNCVADYSVLYNSASFSTFKCYGVSPTKLNDLCFTNVYADSFVIRGDEVRQIAPGQTGKIADYNYKLPDDFTGCVIAWNSNNLDSKVGGNYNYLYRLFRKSNLKPFERDISTEIYQAGSTPCNGVEGFNCYFPLQSYGFQPTNGVGYQPYRVVVLSFELLHAPATVCGPKKSTNLVKNKCVNFNFNGLTGTGVLTESNKKFLPFQQFGRDIADTTDAVRDPQTLEILDITPCSFGGVSVITPGTNTSNQVAVLYQGVNCTEVPVAIHADQLTPTWRVYSTGSNVFQTRAGCLIGAEHVNNSYECDIPIGAGICASYHTQTNSPRRARSVASQSIIAYTMSLGAENSVAYSNNSIAIPTNFTISVTTEILPVSMTKTSVDCTMYICGDSTECSNLLLQYGSFCTQLNRALTGIAVEQDKNTQEVFAQVKQIYKTPPIKDFGGFNFSQILPDPSKPSKRSFIEDLLFNKVTLADAGFIKQYGDCLGDIAARDLICAQKFNGLTVLPPLLTDEMIAQYCSALLAGTITSGWTFGAGAALQIPFAMQMAYRFNGIGVTQNVLYENQKLIANQFNSAIGKIQDSLSSTASALGKLQDVVNQNAQALNTLVKQLSSNFGAISSVLNDILSRLDKVEAEVQIDRLITGRLQSLQTYVTQQLIRAAEIRASANLAATKMSECVLGQSKRVDFCGKGYHLMSFPQCAPHGVVFLHVTYVPAQEKNFTTAPAICHDGKAHFPREGVFVSNGTHWFVTQRNFYEPQIITTDNTFVSGNCDVVIGIVNNTVYDPLQPELDSGGGGSDIDPYKEFGSSYQLLNFLPLDFFPDLNALVDTATALYEEELTGREHCSPHHTAIRQALVCWDELTKLIAWMSSNITSEQVRTIIVNHVNDTWGLKVRQSLWFHLSCLTFGQHTVQEFLVSFGVWIRTPAPYRPPNAPILSTLPEHTVIC

SEQ ID NO: 11650 - protein, 1301 aa, Artificial Sequence; identical to SEQ ID NO: 11605
  SARS-CoV-2/Iceland/247/2020__EPI_ISL_417575 spike protein (1-1147)(T874C_S1055C) WhcAg construct

SEQ ID NO: 11651 - protein, 1301 aa, Artificial Sequence
  SARS-CoV-2/Iceland/238/2020__EPI_ISL_417566 spike protein (1-1147)(T874C_S1055C) WhcAg construct
MFVFLVLLPLVSSQCVNLTTRTQLPPAYTNSFTRGVYYPDKVFRSSVLHSTQDLFLPFFSNVTWFHAIHVSGTNGTKRFDNPVLPFNDGVYFASTEKSNIIRGWIFGTTLDSKTQSLLIVNNATNVVIKVCEFQFCNDPFLGVYYHKNNKSWMESEFRVYSSANNCTFEYVSQPFLMDLEGKQGNFKNLREFVFKNIDGYFKIYSKHTPINLVRDLPQGFSALEPLVDLPIGINITRFQTLLALHRSYLTPGDSSSGWTAGAAAYYVGYLQPRTFLLKYNENGTITDAVDCALDPLSETKCTLKSFTVEKGIYQTSNFRVQPTESIVRFPNITNLCPFGEVFNATRFASVYAWNRKRISNCVADYSVLYNSASFSTFKCYGVSPTKLNDLCFTNVYADSFVIRGDEVRQIAPGQTGKIADYNYKLPDDFTGCVIAWNSNNLDSKVGGNYNYLYRLFRKSNLKPFERDISTEIYQAGSTPCNGVEGFNCYFPLQSYGFQPTNGVGYQPYRVVVLSFELLHAPATVCGPKKSTNLVKNKCVNFNFNGLTGTGVLTESNKKFLPFQQFGRDIADTTDAVRDPQTLEILDITPCSFGGVSVITPGTNTSNQVAVLYQGVNCTEVPVAIHADQLTPTWRVYSTGSNVFQTRAGCLIGAEHVNNSYECDIPIGAGICASYQTQTNSPRRARSVASQSIIAYTMSLGAENSVAYSNNSIAIPTNFTISVTTEILPVSMTKTSVDCTMYICGDSTECSNLLLQYGSFCTQLNRALTGIAVEQDKNTQEVFAQVKQIYKTPPIKDFGGFNFSQILPDPSKPSKRSFIEDLLFNKVTLADVGFIKQYGDCLGDIAARDLICAQKFNGLTVLPPLLTDEMIAQYCSALLAGTITSGWTFGAGAALQIPFAMQMAYRFNGIGVTQNVLYENQKLIANQFNSAIGKIQDSLSSTASALGKLQDVVNQNAQALNTLVKQLSSNFGAISSVLNDILSRLDKVEAEVQIDRLITGRLQSLQTYVTQQLIRAAEIRASANLAATKMSECVLGQSKRVDFCGKGYHLMSFPQCAPHGVVFLHVTYVPAQEKNFTTAPAICHDGKAHFPREGVFVSNGTHWFVTQRNFYEPQIITTDNTFVSGNCDVVIGIVNNTVYDPLQPELDSGGGGSDIDPYKEFGSSYQLLNFLPLDFFPDLNALVDTATALYEEELTGREHCSPHHTAIRQALVCWDELTKLIAWMSSNITSEQVRTIIVNHVNDTWGLKVRQSLWFHLSCLTFGQHTVQEFLVSFGVWIRTPAPYRPPNAPILSTLPEHTVIC

SEQ ID NO: 11652 - protein, 1301 aa, Artificial Sequence
  SARS-CoV-2/Greece/16/2020__EPI_ISL_418265 spike protein (1-1147)(T874C_S1055C) WhcAg construct
MFVFLVLLPLVSSQCVNLTTRTQLPPAYTNSFTRGVYYPDKVFRSSVLHSTQDLFLPFFSNVTWFHAIHVSGTNGTKRFDNPVLPFNDGVYFASTEKSNIIRGWIFGTTLDSKTQSLLIVNNATNVVIKVCEFQFCNDPFLGVYYHKNNKSWMESEFRVYSSANNCTFEYVSQPFLMDLEGKQGNFKNLREFVFKNVDGYFKIYSKHTPINLVRDLPQGFSALEPLVDLPIGINITRFQTLLALHRSYLTPGDSSSGWTAGAAAYYVGYLQPRTFLLKYNENGTITDAVDCALDPLSETKCTLKSFTVEKGIYQTSNFRVQPTESIVRFPNITNLCPFGEVFNATRFASVYAWNRKRISNCVADYSVLYNSASFSTFKCYGVSPTKLNDLCFTNVYADSFVIRGDEVRQIAPGQTGKIADYNYKLPDDFTGCVIAWNSNNLDSKVGGNYNYLYRLFRKSNLKPFERDISTEIYQAGSTPCNGVEGFNCYFPLQSYGFQPTNGVGYQPYRVVVLSFELLHAPATVCGPKKSTNLVKNKCVNFNFNGLTGTGVLTESNKKFLPFQQFGRDIADTTDAVRDPQTLEILDITPCSFGGVSVITPGTNTSNQVAVLYQDVNCTEVPVAIHADQLTPTWRVYSTGSNVFQTRAGCLIGAEHVNNSYECDIPIGAGICASYQTQTNSPRRARSVASQSIIAYTMSLGAENSVAYSNNSIAIPTNFTISVTTEILPVSMTKTSVDCTMYICGDSTECSNLLLQYGSFCTQLNRALTGIAVEQDKNTQEVFAQVKQIYKTPPIKDFGGFNFSQILPDPSKPSKRSFIEDLLFNKVTLADAGFIKQYGDCLGDIAARDLICAQKFNGLTVLPPLLTDEMIAQYCSALLAGTITSGWTFGAGAALQIPFAMQMAYRFNGIGVTQNVLYENQKLIANQFNSAIGKIQDSLSSTASALGKLQDVVNQNAQALNTLVKQLSSNFGAISSVLNDILSRLDKVEAEVQIDRLITGRLQSLQTYVTQQLIRAAEIRASANLAATKMSECVLGQSKRVDFCGKGYHLMSFPQCAPHGVVFLHVTYVPAQEKNFTTAPAICHDGKAHFPREGVFVSNGTHWFVTQRNFYEPQIITTDNTFVSGNCDVVIGIVNNTVYDPLQPELDSGGGGSDIDPYKEFGSSYQLLNFLPLDFFPDLNALVDTATALYEEELTGREHCSPHHTAIRQALVCWDELTKLIAWMSSNITSEQVRTIIVNHVNDTWGLKVRQSLWFHLSCLTFGQHTVQEFLVSFGVWIRTPAPYRPPNAPILSTLPEHTVIC

SEQ ID NO: 11653 - protein, 1301 aa, Artificial Sequence
  SARS-CoV-2/Iceland/319/2020__EPI_ISL_417648 spike protein (1-1147)(T874C_S1055C) WhcAg construct
MFVFLVLLPLVSSQCVNLTTRTQLPPAYTNSFTRGVYYPDKVFRSSVLHSTQDLFLPFFSNVTWFHAIHVSGTNGTKRFDNPVLPFNDGVYFASTEKSNIIRGWIFGTTLDSKTQSLLIVNNATNVVIKVCEFQFCNDPFLGVYYHKNNKSWMESEFRVYSSANNCTFEYVSQPFLIDLEGKQGNFKNLREFVFKNIDGYFKIYSKHTPINLVRDLPQGFSALEPLVDLPIGINITRFQTLLALHRSYLTPGDSSSGWTAGAAAYYVGYLQPRTFLLKYNENGTITDAVDCALDPLSETKCTLKSFTVEKGIYQTSNFRVQPTESIVRFPNITNLCPFGEVFNATRFASVYAWNRKRISNCVADYSVLYNSASFSTFKCYGVSPTKLNDLCFTNVYADSFVIRGDEVRQIAPGQTGKIADYNYKLPDDFTGCVIAWNSNNLDSKVGGNYNYLYRLFRKSNLKPFERDISTEIYQAGSTPCNGVEGFNCYFPLQSYGFQPTNGVGYQPYRVVVLSFELLHAPATVCGPKKSTNLVKNKCVNFNFNGLTGTGVLTESNKKFLPFQQFGRDIADTTDAVRDPQTLEILDITPCSFGGVSVITPGTNTSNQVAVLYQGVNCTEVPVAIHADQLTPTWRVYSTGSNVFQTRAGCLIGAEHVNNSYECDIPIGAGICASYQTQTNSPRRARSVASQSIIAYTMSLGAENSVAYSNNSIAIPTNFTISVTTEILPVSMTKTSVDCTMYICGDSTECSNLLLQYGSFCTQLNRALTGIAVEQDKNTQEVFAQVKQIYKTPPIKDFGGFNFSQILPDPSKPSKRSFIEDLLFNKVTLADAGFIKQYGDCLGDIAARDLICAQKFNGLTVLPPLLTDEMIAQYCSALLAGTITSGWTFGAGAALQIPFAMQMAYRFNGIGVTQNVLYENQKLIANQFNSAIGKIQDSLSSTASALGKLQDVVNQNAQALNTLVKQLSSNFGAISSVLNDILSRLDKVEAEVQIDRLITGRLQSLQTYVTQQLIRAAEIRASANLAATKMSECVLGQSKRVDFCGKGYHLMSFPQCAPHGVVFLHVTYVPAQEKNFTTAPAICHDGKAHFPREGVFVSNGTHWFVTQRNFYEPQIITTDNTFVSGNCDVVIGIVNNTVYDPLQPELDSGGGGSDIDPYKEFGSSYQLLNFLPLDFFPDLNALVDTATALYEEELTGREHCSPHHTAIRQALVCWDELTKLIAWMSSNITSEQVRTIIVNHVNDTWGLKVRQSLWFHLSCLTFGQHTVQEFLVSFGVWIRTPAPYRPPNAPILSTLPEHTVIC

SEQ ID NO: 11654 - protein, 1301 aa, Artificial Sequence
  SARS-CoV-2/Congo/94/2020__EPI_ISL_417947 spike protein (1-1147)(T874C_S1055C) WhcAg construct
MFVFLVLLPLVSSQCVNLTTRTQLPPAYTNSFTRGVYYPDKVFRSSVLHSTQDLFLPFFSNVTWFHAIHVSGTNGTKRFDNPVLPFNDGVYFASTEKSNIIRGWIFGTTLDSKTQSLLIVNNATNVVIKVCEFQFCNDPFLGVYYHKNNKSWMESEFRVYSSANNCTFEYVSQPFLMDLEGKQGNFKNLREFVFKNIDGYFKIYSKHTPINLVRDLPQGFSALEPLVDLPIGINITRFQTLLALHRSYLTPGDSSSGWTAGAAAYYVGYLQPRTFLLKYNENGTITDAVDCALDPLSETKCTLKSFTVEKGIYQTSNFRVQPTESIVRFPNITNLCPFGEVFNATRFASVYAWNRKRISNCVADYSVLYNSASFSTFKCYGVSPTKLNDLCFTNVYADSFVIRGDEVRQIAPGQTGKIADYNYKLPDDFTGCVIAWNSNNLDSKVGGNYNYLYRLFRKSNLKPFERDISTEIYQAGSTPCNGVEGFNCYFPLQSYGFQPTNGVGYQPYRVVVLSFELLHAPATVCGPKKSTNLVKNKCVNFNFNGLTGTGVLTESNKKFLPFQQFGRDIADTTDAVRDPQTLEILDITPCSFGGVSVITPGTNTSNQVAVLYQGVNCTEVPVAIHADQLTPTWRVYSTGSNVFQTRAGCLIGAEHVNNSYECDIPIGAGICASYQTQTNSPRRARSVASQSIIAYTMSLGAENSVAYSNNSIAIPTNFTISVTTEILPVSMTKTSVDCTMYICGDSTECSNLLLQYGSFCTQLNRALTGIAVEQDKNTQEVFAQVKQIYKTPPIKDFGGFNFSQILPDPSKPSKRSFIEDILFNKVTLADAGFIKQYGDCLGDIAARDLICAQKFNGLTVLPPLLTDEMIAQYCSALLAGTITSGWTFGAGAALQIPFAMQMAYRFNGIGVTQNVLYENQKLIANQFNSAIGKIQDSLSSTASALGKLQDVVNQNAQALNTLVKQLSSNFGAISSVLNDILSRLDKVEAEVQIDRLITGRLQSLQTYVTQQLIRAAEIRASANLAATKMSECVLGQSKRVDFCGKGYHLMSFPQCAPHGVVFLHVTYVPAQEKNFTTAPAICHDGKAHFPREGVFVSNGTHWFVTQRNFYEPQIITTDNTFVSGNCDVVIGIVNNTVYDPLQPELDSGGGGSDIDPYKEFGSSYQLLNFLPLDFFPDLNALVDTATALYEEELTGREHCSPHHTAIRQALVCWDELTKLIAWMSSNITSEQVRTIIVNHVNDTWGLKVRQSLWFHLSCLTFGQHTVQEFLVSFGVWIRTPAPYRPPNAPILSTLPEHTVIC

SEQ ID NO: 11655 - protein, 1301 aa, Artificial Sequence
  SARS-CoV-2/Congo/158/2020__EPI_ISL_417950 spike protein (1-1147)(T874C_S1055C) WhcAg construct
MFVFLVLLPLVSSQCVNLTTRTQLPPAYTNSFTRGVYYPDKVFRSSVLHSTQDLFLPFFSNVTWFHAIHVSGTNGTKRFDNPVLPFNDGVYFASTEKSNIIRGWIFGTTLDSKTQSLLIVNNATNVVIKVCEFQFCNDPFLGVYYHKNNKSWMESEFRVYSSANNCTFEYVSQPFLMDLEGKQGNFKNLREFVFKNIDGYFKIYSKHTPINLVRDLPQGFSALEPLVDLPIGINITRFQTLLALHRSYLTPGDSSSGWTAGAAAYYVGYLQPRTFLLKYNENGTITDAVDCALDPLSETKCTLKSFTVEKGIYQTSNFRVQPTESIVRFPNITNLCPFGEVFNATRFASVYAWNRKRISNCVADYSVLYNSASFSTFKCYGVSPTKLNDLCFTNVYADSFVIRGDEVRQIAPGQTGKIADYNYKLPDDFTGCVIAWNSNNLDSKVGGNYNYLYRLFRKSNLKPFERDISTEIYQAGSTPCNGVEGFNCYFPLQSYGFQPTNGVGYQPYRVVVLSFELLHAPATVCGPKKSTNLVKNKCVNFNFNGLTGTGVLTESNKKFLPFQQFGRDIADTTDAVRDPQTLEILDITPCSFGGVSVITPGTNTSNQVAVLYQDVNCTEVPVAIHADQLTPTWRVYSTGSNVFQTRAGCLIGAEHVNNSYECDIPIGAGICASYQTQTNSPRRARSVASQSIIAYTMSLGAENSVAYSNNSIAIPTNFTISVTTEILPVSMTKTSVDCTMYICGDSTECSNLLLQYGSFCTQLNRALTGIAVEQDKNTQEVFAQVKQIYKTPPIKDFGGFNFSQILPDPSKPSKRSFIEDLLFNKVTLADAGFIKQYGDCLGDIAARDLICAQKFNGLTVLPPLLTDEMIAQYCSALLAGTITSGWTFGAGAALQIPFAMQMAYRFNGIGVTQNVLYENQKLIANQFNSAIGKIQDSLSSTASALGKLQDVVNQNAQALNTLVKQLSSNFGAISSVLNDILSRLDKVEAEVQIDRLITGRLQSLQTYVTQQLIRAAEIRASANLAATKMSECVLGQSKRVDFCGKGYHLMSFPQCAPHGVVFLHVTYVPAQEKNFTTAPAICHDGKAHFPREGVFVSNGTHWFVTQRNFYEPQIITTDNTFLSGNCDVVIGIVNNTVYDPLQPELDSGGGGSDIDPYKEFGSSYQLLNFLPLDFFPDLNALVDTATALYEEELTGREHCSPHHTAIRQALVCWDELTKLIAWMSSNITSEQVRTIIVNHVNDTWGLKVRQSLWFHLSCLTFGQHTVQEFLVSFGVWIRTPAPYRPPNAPILSTLPEHTVIC

SEQ ID NO: 11656 - protein, 1301 aa, Artificial Sequence
  SARS-CoV-2/USA/UT-00034/2020__EPI_ISL_417977 spike protein (1-1147)(T874C_S1055C) WhcAg construct
MFVFLVLLPLVSSQCVNLTTRTQLPPAYTNSFTRGVYYPDKVFRSSVLHSTQDLFLPFFSNVTWFHAIHVSGTNGTKRFDNPVLPFNDGVYFASTEKSNIIRGWIFGTTLDSKTQSLLIVNNATNVVIKVCEFQFCNDPFLGVYYYKNNKSWMESEFRVYSSANNCTFEYVSQPFLMDLEGKQGNFKNLREFVFKNIDGYFKIYSKHTPINLVRDLPQGFSALEPLVDLPIGINITRFQTLLALHRSYLTPGDSSSGWTAGAAAYYVGYLQPRTFLLKYNENGTITDAVDCALDPLSETKCTLKSFTVEKGIYQTSNFRVQPTESIVRFPNITNLCPFGEVFNATRFASVYAWNRKRISNCVADYSVLYNSASFSTFKCYGVSPTKLNDLCFTNVYADSFVIRGDEVRQIAPGQTGKIADYNYKLPDDFTGCVIAWNSNNLDSKVGGNYNYLYRLFRKSNLKPFERDISTEIYQAGSTPCNGVEGFNCYFPLQSYGFQPTNGVGYQPYRVVVLSFELLHAPATVCGPKKSTNLVKNKCVNFNFNGLTGTGVLTESNKKFLPFQQFGRDIADTTDAVRDPQTLEILDITPCSFGGVSVITPGTNTSNQVAVLYQGVNCTEVPVAIHADQLTPTWRVYSTGSNVFQTRAGCLIGAEHVNNSYECDIPIGAGICASYQTQTNSPRRARSVASQSIIAYTMSLGAENSVAYSNNSIAIPTNFTISVTTEILPVSMTKTSVDCTMYICGDSTECSNLLLQYGSFCTQLNRALTGIAVEQDKNTQEVFAQVKQIYKTPPIKDFGGFNFSQILPDPSKPSKRSFIEDLLFNKVTLADAGFIKQYGDCLGDIAARDLICAQKFNGLTVLPPLLTDEMIAQYCSALLAGTITSGWTFGAGAALQIPFAMQMAYRFNGIGVTQNVLYENQKLIANQFNSAIGKIQDSLSSTASALGKLQDVVNQNAQALNTLVKQLSSNFGAISSVLNDILSRLDKVEAEVQIDRLITGRLQSLQTYVTQQLIRAAEIRASANLAATKMSECVLGQSKRVDFCGKGYHLMSFPQCAPHGVVFLHVTYVPAQEKNFTTAPAICHDGKAHFPREGVFVSNGTHWFVTQRNFYEPQIITTDNTFVSGNCDVVIGIVNNTVYDPLQPELDSGGGGSDIDPYKEFGSSYQLLNFLPLDFFPDLNALVDTATALYEEELTGREHCSPHHTAIRQALVCWDELTKLIAWMSSNITSEQVRTIIVNHVNDTWGLKVRQSLWFHLSCLTFGQHTVQEFLVSFGVWIRTPAPYRPPNAPILSTLPEHTVIC

SEQ ID NO: 11657 - protein, 1301 aa, Artificial Sequence
  SARS-CoV-2/USA/UT-00033/2020__EPI_ISL_417976 spike protein (1-1147)(T874C_S1055C) WhcAg construct
MFVFLVLLPLVSSQCVNLTTRTQLPPAYTNSFTRGVYYPDKVFRSSVLHSTQDLFLPFFSNVTWFHAIHVSGTNGTKRFDNPVLPFNDGVYFASTEKSNIIRGWIFGTTLDSKTQSLLIVNNATNVVIKVCEFQFCNDPFLGVYYHKNNKSWMESEFRVYSSANNCTFEYVSQPFLMDLEGKQGNFKNLREFVFKNIDGYFKIYSKHTPINLVRDLPQGFSALEPLVDLPIGINITRFQTLLALHRSYLTPGDSSSGLTAGAAAYYVGYLQPRTFLLKYNENGTITDAVDCALDPLSETKCTLKSFTVEKGIYQTSNFRVQPTESIVRFPNITNLCPFGEVFNATRFASVYAWNRKRISNCVADYSVLYNSASFSTFKCYGVSPTKLNDLCFTNVYADSFVIRGDEVRQIAPGQTGKIADYNYKLPDDFTGCVIAWNSNNLDSKVGGNYNYLYRLFRKSNLKPFERDISTEIYQAGSTPCNGVEGFNCYFPLQSYGFQPTNGVGYQPYRVVVLSFELLHAPATVCGPKKSTNLVKNKCVNFNFNGLTGTGVLTESNKKFLPFQQFGRDIADTTDAVRDPQTLEILDITPCSFGGVSVITPGTNTSNQVAVLYQGVNCTEVPVAIHADQLTPTWRVYSTGSNVFQTRAGCLIGAEHVNNSYECDIPIGAGICASYQTQTNSPRRARSVASQSIIAYTMSLGAENSVAYSNNSIAIPTNFTISVTTEILPVSMTKTSVDCTMYICGDSTECSNLLLQYGSFCTQLNRALTGIAVEQDKNTQEVFAQVKQIYKTPPIKDFGGFNFSQILPDPSKPSKRSFIEDLLFNKVTLADAGFIKQYGDCLGDIAARDLICAQKFNGLTVLPPLLTDEMIAQYCSALLAGTITSGWTFGAGAALQIPFAMQMAYRFNGIGVTQNVLYENQKLIANQFNSAIGKIQDSLSSTASALGKLQDVVNQNAQALNTLVKQLSSNFGAISSVLNDILSRLDKVEAEVQIDRLITGRLQSLQTYVTQQLIRAAEIRASANLAATKMSECVLGQSKRVDFCGKGYHLMSFPQCAPHGVVFLHVTYVPAQEKNFTTAPAICHDGKAHFPREGVFVSNGTHWFVTQRNFYEPQIITTDNTFVSGNCDVVIGIVNNTVYDPLQPELDSGGGGSDIDPYKEFGSSYQLLNFLPLDFFPDLNALVDTATALYEEELTGREHCSPHHTAIRQALVCWDELTKLIAWMSSNITSEQVRTIIVNHVNDTWGLKVRQSLWFHLSCLTFGQHTVQEFLVSFGVWIRTPAPYRPPNAPILSTLPEHTVIC

SEQ ID NO: 11658 - protein, 1301 aa, Artificial Sequence
  SARS-CoV-2/USA/WI-13/2020__EPI_ISL_417516 spike protein (1-1147)(T874C_S1055C) WhcAg construct
MFVFLVLLPLVSSQCVNLTTRTQLPPAYTNSFTRGVYYPDKVFRSSVLHSTQDLFLPFFSNVTWFHAIHVSGTNGTKRFDNPVLPFNDGVYFASTEKSNIIRGWIFGTTLDSKTQSLLIVNNATNVVIKVCEFQFCNDPFLGVYYHKNNKSWMESEFRVYSSANNCTFEYVSQPFLMDLEGKQGNFKNLREFVFKNIDGYFKIYSKHTPINLVRDLPQGFSALEPLVDLPIGINITRFQTLLALHRSYLTPGDSSSGWTAGAAAYYVGYLQPRTFLLKYNENGTITDAVDCALDPLSETKCTLKSFTVEKGIYQTSNFRVLPTESIVRFPNITNLCPFGEVFNATRFASVYAWNRKRISNCVADYSVLYNSASFSTFKCYGVSPTKLNDLCFTNVYADSFVIRGDEVRQIAPGQTGKIADYNYKLPDDFTGCVIAWNSNNLDSKVGGNYNYLYRLFRKSNLKPFERDISTEIYQAGSTPCNGVEGFNCYFPLQSYGFQPTNGVGYQPYRVVVLSFELLHAPATVCGPKKSTNLVKNKCVNFNFNGLTGTGVLTESNKKFLPFQQFGRDIADTTDAVRDPQTLEILDITPCSFGGVSVITPGTNTSNQVAVLYQGVNCTEVPVAIHADQLTPTWRVYSTGSNVFQTRAGCLIGAEHVNNSYECDIPIGAGICASYQTQTNSPRRARSVASQSIIAYTMSLGAENSVAYSNNSIAIPTNFTISVTTEILPVSMTKTSVDCTMYICGDSTECSNLLLQYGSFCTQLNRALTGIAVEQDKNTQEVFAQVKQIYKTPPIKDFGGFNFSQILPDPSKPSKRSFIEDLLFNKVTLADAGFIKQYGDCLGDIAARDLICAQKFNGLTVLPPLLTDEMIAQYCSALLAGTITSGWTFGAGAALQIPFAMQMAYRFNGIGVTQNVLYENQKLIANQFNSAIGKIQDSLSSTASALGKLQDVVNQNAQALNTLVKQLSSNFGAISSVLNDILSRLDKVEAEVQIDRLITGRLQSLQTYVTQQLIRAAEIRASANLAATKMSECVLGQSKRVDFCGKGYHLMSFPQCAPHGVVFLHVTYVPAQEKNFTTAPAICHDGKAHFPREGVFVSNGTHWFVTQRNFYEPQIITTDNTFVSGNCDVVIGIVNNTVYDPLQPELDSGGGGSDIDPYKEFGSSYQLLNFLPLDFFPDLNALVDTATALYEEELTGREHCSPHHTAIRQALVCWDELTKLIAWMSSNITSEQVRTIIVNHVNDTWGLKVRQSLWFHLSCLTFGQHTVQEFLVSFGVWIRTPAPYRPPNAPILSTLPEHTVIC

SEQ ID NO: 11659 - protein, 1300 aa, Artificial Sequence
  SARS-CoV-2/India/1-27/2020__EPI_ISL_413522 spike protein (1-1146)(T873C_S1054C) WhcAg construct
MFVFLVLLPLVSSQCVNLTTRTQLPPAYTNSFTRGVYYPDKVFRSSVLHSTQDLFLPFFSNVTWFHAIHVSGTNGTKRFDNPVLPFNDGVYFASTEKSNIIRGWIFGTTLDSKTQSLLIVNNATNVVIKVCEFQFCNDPFLGVYHKNNKSWMESEFRVYSSANNCTFEYVSQPFLMDLEGKQGNFKNLREFVFKNIDGYFKIYSKHTPINLVRDLPQGFSALEPLVDLPIGINITRFQTLLALHRSYLTPGDSSSGWTAGAAAYYVGYLQPRTFLLKYNENGTITDAVDCALDPLSETKCTLKSFTVEKGIYQTSNFRVQPTESIVRFPNITNLCPFGEVFNATRFASVYAWNRKRISNCVADYSVLYNSASFSTFKCYGVSPTKLNDLCFTNVYADSFVIRGDEVIQIAPGQTGKIADYNYKLPDDFTGCVIAWNSNNLDSKVGGNYNYLYRLFRKSNLKPFERDISTEIYQAGSTPCNGVEGFNCYFPLQSYGFQPTNGVGYQPYRVVVLSFELLHAPATVCGPKKSTNLVKNKCVNFNFNGLTGTGVLTESNKKFLPFQQFGRDIADTTDAVRDPQTLEILDITPCSFGGVSVITPGTNTSNQVAVLYQDVNCTEVPVAIHADQLTPTWRVYSTGSNVFQTRAGCLIGAEHVNNSYECDIPIGAGICASYQTQTNSPRRARSVASQSIIAYTMSLGAENSVAYSNNSIAIPTNFTISVTTEILPVSMTKTSVDCTMYICGDSTECSNLLLQYGSFCTQLNRALTGIAVEQDKNTQEVFAQVKQIYKTPPIKDFGGFNFSQILPDPSKPSKRSFIEDLLFNKVTLADAGFIKQYGDCLGDIAARDLICAQKFNGLTVLPPLLTDEMIAQYCSALLAGTITSGWTFGAGAALQIPFAMQMAYRFNGIGVTQNVLYENQKLIANQFNSAIGKIQDSLSSTASALGKLQDVVNQNAQALNTLVKQLSSNFGAISSVLNDILSRLDKVEAEVQIDRLITGRLQSLQTYVTQQLIRAAEIRASANLAATKMSECVLGQSKRVDFCGKGYHLMSFPQCAPHGVVFLHVTYVPAQEKNFTTAPAICHDGKAHFPREGVFVSNGTHWFVTQRNFYEPQIITTDNTFVSGNCDVVIGIVNNTVYDPLQPELDSGGGGSDIDPYKEFGSSYQLLNFLPLDFFPDLNALVDTATALYEEELTGREHCSPHHTAIRQALVCWDELTKLIAWMSSNITSEQVRTIIVNHVNDTWGLKVRQSLWFHLSCLTFGQHTVQEFLVSFGVWIRTPAPYRPPNAPILSTLPEHTVIC

SEQ ID NO: 11660 - protein, 1295 aa, Artificial Sequence
  SARS-CoV-2/pangolin/Guangxi/P4L/2017__EPI_ISL_410538 spike protein (1-1141)(T868C_S1049C) WhcAg construct
MFVFLFVLPLVSSQCVNLTTRTGIPPGYTNSSTRGVYYPDKVFRSSILHLTQDLFLPFFSNVTWFNTINYQGGFKKFDNPVLPFNDGVYFASTEKSNIIRGWIFGTTLDARTQSLLIVNNATNVVIKVCEFQFCTDPFLGVYYHNNNKTWVENEFRVYSSANNCTFEYISQPFLMDLEGKQGNFKNLREFVFKNVDGYFKIYSKHTPIDLVRDLPRGFAALEPLVDLPIGINITRFQTLLALHRSYLTPGNLESGWTTGAAAYYVGYLQQRTFLLSYNQNGTITDAVDCSLDPLSETKCTLKSLTVEKGIYQTSNFRVQPTISIVRFPNITNLCPFGEVFNASKFASVYAWNRKRISNCVADYSVLYNSTSFSTFKCYGVSPTKLNDLCFTNVYADSFVVKGDEVRQIAPGQTGVIADYNYKLPDDFTGCVIAWNSVKQDALTGGNYGYLYRLFRKSKLKPFERDISTEIYQAGSTPCNGQVGLNCYYPLERYGFHPTTGVNYQPFRVVVLSFELLNGPATVCGPKLSTTLVKDKCVNFNFNGLTGTGVLTTSKKQFLPFQQFGRDISDTTDAVRDPQTLEILDITPCSFGGVSVITPGTNTSNQVAVLYQDVNCTEVPMAIHAEQLTPAWRVYSAGANVFQTRAGCLVGAEHVNNSYECDIPVGAGICASYHSMSSLRSVNQRSIIAYTMSLGAENSVAYSNNSIAIPTNFTISVTTEILPVSMTKTSVDCTMYICGDSIECSNLLLQYGSFCTQLNRALTGIAVEQDKNTQEVFAQVKQIYKTPPIKDFGGFNFSQILPDPSKPSKRSFIEDLLFNKVTLADAGFIKQYGDCLGDIAARDLICAQKFNGLTVLPPLLTDEMIAQYCSALLAGTITSGWTFGAGAALQIPFAMQMAYRFNGIGVTQNVLYENQKLIANQFNSAIGKIQDSLSSTASALGKLQDVVNQNAQALNTLVKQLSSNFGAISSVLNDILSRLDKVEAEVQIDRLITGRLQSLQTYVTQQLIRAAEIRASANLAATKMSECVLGQSKRVDFCGKGYHLMSFPQCAPHGVVFLHVTYVPAQEKNFTTAPAICHEGKAHFPREGVFVSNGTHWFITQRNFYEPQIITTDNTFVSGSCDVVIGIVNNTVYDPLQPELDSGGGGSDIDPYKEFGSSYQLLNFLPLDFFPDLNALVDTATALYEEELTGREHCSPHHTAIRQALVCWDELTKLIAWMSSNITSEQVRTIIVNHVNDTWGLKVRQSLWFHLSCLTFGQHTVQEFLVSFGVWIRTPAPYRPPNAPILSTLPEHTVIC

SEQ ID NO: 11661 - protein, 1295 aa, Artificial Sequence
  SARS-CoV-2/pangolin/Guangxi/P5L/2017__EPI_ISL_410540 spike protein (1-1141)(T868C_S1049C) WhcAg construct
MFVFLFVLPLVSSQCVNLTTRTGIPPGYTNSSTRGVYYPDKVFRSSILHLTQDLFLPFFSNVTWFNTINYQGGFKKFDNPVLPFNDGVYFASTEKSNIIRGWIFGTTLDARTQSLLIVNNATNVVIKVCEFQFCTDPFLGVYYHNNNKTWVENEFRVYSSANNCTFEYISQPFLMDLEGKQGNFKNLREFVFKNVDGYFKIYSKHTPIDLVRDLPRGFAALEPLVDLPIGINITRFQTLLALHRSYLTPGKLESGWTTGAAAYYVGYLQQRTFLLSYNQNGTITDAVDCSLDPLSETKCTLKSLTVEKGIYQTSNFRVQPTISIVRFPNITNLCPFGEVFNASKFASVYAWNRKRISNCVADYSVLYNSTSFSTFKCYGVSPTKLNDLCFTNVYADSFVVKGDEVRQIAPGQTGVIADYNYKLPDDFTGCVIAWNSVKQDALTGGNYGYLYRLFRKSKLKPFERDISTEIYQAGSTPCNGQVGLNCYYPLERYGFHPTTGVNYQPFRVVVLSFELLNGPATVCGPKLSTTLVKDKCVNFNFNGLTGTGVLTTSKKQFLPFQQFGRDISDTTDAVRDPQTLEILDITPCSFGGVSVITPGTNTSNQVAVLYQDVNCTEVPMAIHAEQLTPAWRVYSAGANVFQTRAGCLVGAEHVNNSYECDIPVGAGICASYHSMSSFRSVNQRSIIAYTMSLGAENSVAYSNNSIAIPTNFTISVTTEILPVSMTKTSVDCTMYICGDSIECSNLLLQYGSFCTQLNRALTGIAVEQDKNTQEVFAQVKQIYKTPPIKDFGGFNFSQILPDPSKPSKRSFIEDLLFNKVTLADAGFIKQYGDCLGDIAARDLICAQKFNGLTVLPPLLTDEMIAQYCSALLAGTITSGWTFGAGAALQIPFAMQMAYRFNGIGVTQNVLYENQKLIANQFNSAIGKIQDSLSSTASALGKLQDVVNQNAQALNTLVKQLSSNFGAISSVLNDILSRLDKVEAEVQIDRLITGRLQSLQTYVTQQLIRAAEIRASANLAATKMSECVLGQSKRVDFCGKGYHLMSFPQCAPHGVVFLHVTYVPAQEKNFTTAPAICHEGKAHFPREGVFVSNGTHWFITQRNFYEPQIITTDNTFVSGSCDVVIGIVNNTVYDPLQPELDSGGGGSDIDPYKEFGSSYQLLNFLPLDFFPDLNALVDTATALYEEELTGREHCSPHHTAIRQALVCWDELTKLIAWMSSNITSEQVRTIIVNHVNDTWGLKVRQSLWFHLSCLTFGQHTVQEFLVSFGVWIRTPAPYRPPNAPILSTLPEHTVIC

SEQ ID NO: 11662 - protein, 1295 aa, Artificial Sequence
  SARS-CoV-2/pangolin/Guangxi/P5E/2017__EPI_ISL_410541 spike protein (1-1141)(T868C_S1049C) WhcAg construct
MFVFLFVLPLVSSQCVNLTTRTGIPPGYTNSSTRGVYYPDKVFRSSILHLTQDLFLPFFSNVTWFNTITYQGGSKKFDNPVLPFNDGVYFASTEKSNIIRGWIFGTTLDARTQSLLIVNNATNVVIKVCEFQFCTDPFLGVYYHNNNKTWVENEFRVYSSANNCTFEYISQPFLMDLEGKQGNFKNLREFVFKNVDGYFKIYSKHTPIDLVRDLPRGFAALEPLVDLPIGINITRFQTLLALHRSYLTPGKLESGWTTGAAAYYVGYLQQRTFLLSYNQNGTITDAVDCSLDPLSETKCTLKSLTVEKGIYQTSNFRVQPTISIVRFPNITNLCPFGEVFNASKFASVYAWNRKRISNCVADYSVLYNSTSFSTFKCYGVSPTKLNDLCFTNVYADSFVVKGDEVRQIAPGQTGVIADYNYKLPDDFTGCVIAWNSVKQDALTGDNYGYLYRLFRKSKLKPFERDISTEIYQAGSTPCNGQVGLNCYYPLERYGFHPTTGVNYQPFRVVVLSFELLNGPATVCGPKLSTTLVKDKCVNFNFNGLTGTGVLTTSKKQFLPFQQFGRDISDTTDAVRDPQTLEILDITPCSFGGVSVITPGTNTSNQVAVLYQDVNCTEVPMAIHAEQLTPAWRVYSAGANVFQTRAGCLVGAEHVNNSYECDIPVGAGICASYHSMSSFRSVNQRSIIAYTMSLGAENSVAYSNNSIAIPTNFTISVTTEILPVSMTKTSVDCTMYICGDSIECSNLLLQYGSFCTQLNRALTGIAVEQDKNTQEVFAQVKQIYKTPPIKDFGGFNFSQILPDPSKPSKRSFIEDLLFNKVTLADAGFIKQYGDCLGDIAARDLICAQKFNGLTVLPPLLTDEMIAQYCSALLAGTITSGWTFGAGAALQIPFAMQMAYRFNGIGVTQNVLYENQKLIANQFNSAIGKIQDSLSSTASALGKLQDVVNQNAQALNTLVKQLSSNFGAISSVLNDILSRLDKVEAEVQIDRLITGRLQSLQTYVTQQLIRAAEIRASANLAATKMSECVLGQSKRVDFCGKGYHLMSFPQCAPHGVVFLHVTYVPAQEKNFTTAPAICHEGKAHFPREGVFVSNGTHWFITQRNFYEPQIITTDNTFVSGSCDVVIGIVNNTVYDPLQPELDSGGGGSDIDPYKEFGSSYQLLNFLPLDFFPDLNALVDTATALYEEELTGREHCSPHHTAIRQALVCWDELTKLIAWMSSNITSEQVRTIIVNHVNDTWGLKVRQSLWFHLSCLTFGQHTVQEFLVSFGVWIRTPAPYRPPNAPILSTLPEHTVIC

SEQ ID NO: 11663 - protein, 1293 aa, Artificial Sequence
  SARS-CoV-2/pangolin/Guangxi/P1E/2017__EPI_ISL_410539 spike protein (1-1139)(T866C_S1047C) WhcAg construct
MFVFLFVLPLVSSQCVNLTTRTGIQPGYTNSSTRGVYYPDKVFRSSILHLTQDLFLPFFSNVTWFNTINYQGGFKKFDNPVLPFNDGVYFASTEKSNIIRGWIFGTTLDARTQSLLIVNNATNVVIKVCEFQFCTDPFLGVYYHNNNKTWVENEFRVYSSANNCTFEYISQPFLMDLEGKQGNFKNLREFVFKNVDGYFKIYSKHTPIDLVRDLPRGFAALEPLVDLPIGINITRFQTLLALHRSYLTPGKLESGWTTGAAAYYVGYLQQRTFLLSYNQNGTITDAVDCSLDPLSETKCTLKSLTVEKGIYQTSNFRVQPTISIVRFPNITNLCPFGEVFNASKFASVYAWNRKRISNCVADYSVLYNSTSFSTFKCYGVSPTKLNDLCFTNVYADSFVVKGDEVRQIAPGQTGVIADYNYKLPDDFTGCVIAWNSVKQDALTGGNYLYRLFRKSKLKPFERDISTEIYQAGSTPCNGQVGLNCYYPLERYGFHPTTGVNYQPFRVVVLSFELLNGPATVCGPKLSTTLVKDKCVNFNFNGLTGTGVLTTSKKQFLPFQQFGRDISDTTDAVRDPQTLEILDITPCSFGGVSVITPGTNTSNQVAVLYQDVNCTEVPMAIHAEQLTPAWRVYSAGANVFQTRAGCLVGAEHVNNSYECDIPVGAGICASYHSMSSLRSVNQRSIIAYTMSLGAENSVAYSNNSIAIPTNFTISVTTEILPVSMTKTSVDCTMYICGDSIECSNLLLQYGSFCTQLNRALTGIAVEQDKNTQEVFAQVKQIYKTPPIKDFGGFNFSQILPDPSKPSKRSFIEDLLFNKVTLADAGFIKQYGDCLGDIAARDLICAQKFNGLTVLPPLLTDEMIAQYCSALLAGTITSGWTFGAGAALQIPFAMQMAYRFNGIGVTQNVLYENQKLIANQFNSAIGKIQDSLSSTASALGKLQDVVNQNAQALNTLVKQLSSNFGAISSVLNDILSRLDKVEAEVQIDRLITGRLQSLQTYVTQQLIRAAEIRASANLAATKMSECVLGQSKRVDFCGKGYHLMSFPQCAPHGVVFLHVTYVPAQEKNFTTAPAICHEGKAHFPREGVFVSNGTHWFITQRNFYEPQIITTDNTFVSGSCDVVIGIVNNTVYDPLQPELDSGGGGSDIDPYKEFGSSYQLLNFLPLDFFPDLNALVDTATALYEEELTGREHCSPHHTAIRQALVCWDELTKLIAWMSSNITSEQVRTIIVNHVNDTWGLKVRQSLWFHLSCLTFGQHTVQEFLVSFGVWIRTPAPYRPPNAPILSTLPEHTVIC

SEQ ID NO: 11664 - RNA, 3822 nt, Artificial Sequence; identical to SEQ ID NO: 116
  SARS-CoV-2/Wuhan/WIV05/2019__EPI_ISL_402128 spike protein CDS wt (1-1273)

SEQ ID NO: 11665 - RNA, 3810 nt, Artificial Sequence; identical to SEQ ID NO: 118
  SARS-CoV-2/bat/Yunnan/RaTG13/2013__EPI_ISL_402131 spike protein CDS wt (1-1269)

SEQ ID NO: 11666 - RNA, 3822 nt, Artificial Sequence; identical to SEQ ID NO: 119
  SARS-CoV-2/Wuhan/HBCDC-HB-01/2019__EPI_ISL_402132 spike protein CDS wt (1-1273)

SEQ ID NO: 11667 - RNA, 3822 nt, Artificial Sequence; identical to SEQ ID NO: 121
  SARS-CoV-2/Guangdong/20SF028/2020__EPI_ISL_403936 spike protein CDS wt (1-1273)

SEQ ID NO: 11668 - RNA, 3822 nt, Artificial Sequence; identical to SEQ ID NO: 126
  SARS-CoV-2/Shenzhen/SZTH-001/2020__EPI_ISL_406592 spike protein CDS wt (1-1273)

SEQ ID NO: 11669 - RNA, 3822 nt, Artificial Sequence; identical to SEQ ID NO: 127
  SARS-CoV-2/Shenzhen/SZTH-004/2020__EPI_ISL_406595 spike protein CDS wt (1-1273)

SEQ ID NO: 11670 - RNA, 3822 nt, Artificial Sequence; identical to SEQ ID NO: 128
  SARS-CoV-2/France/IDF0372/2020__EPI_ISL_406596 spike protein CDS wt (1-1273)

SEQ ID NO: 11671 - RNA, 3822 nt, Artificial Sequence; identical to SEQ ID NO: 130
  SARS-CoV-2/Australia/VIC01/2020__EPI_ISL_406844 spike protein CDS wt (1-1273)

SEQ ID NO: 11672 - RNA, 3822 nt, Artificial Sequence; identical to SEQ ID NO: 131
  SARS-CoV-2/Germany/BavPat1/2020__EPI_ISL_406862 spike protein CDS wt (1-1273)

SEQ ID NO: 11673 - RNA, 3822 nt, Artificial Sequence
  SARS-CoV-2/Wuhan/HBCDC-HB-02/2020__EPI_ISL_412978 spike protein CDS wt (1-1273)
auguuuguuuuucuuguuuuauugccacuagucucuagucaguguguuaaucuuacaaccagaacucaauuacccccugcauacacuaauucuuucacacgugguguuuauuacccugacaaaguuuucagauccucaguuuuacauucaacucaggacuuguucuuaccuuucuuuuccaauguuacuugguuccaugcuauacaugucucugggaccaaugguacuaagagguuugauaacccuguccuaccauuuaaugaugguguuuauuuugcuuccacugagaagucuaacauaauaagaggcuggauuuuugguacuacuuuagauucgaagacccagucccuacuuauuguuaauaacgcuacuaauguuguuauuaaagucugugaauuucaauuuuguaaugauccauuuuuggguguuuauuaccacaaaaacaacaaaaguuggauggaaagugaguucagaguuuauucuagugcgaauaauugcacuuuugaauaugucucucagccuuuucuuauggaccuugaaggaaaacaggguaauuucaaaaaucuuagggaauuuguguuuaagaauauugaugguuauuuuaaaauauauucuaagcacacgccuauuaauuuagugcgugaucucccucaggguuuuucggcuuuagaaccauugguagauuugccaauagguauuaacaucacuagguuucaaacuuuacuugcuuuacauagaaguuauuugacuccuggugauucuucuucagguuggacagcuggugcugcagcuuauuauguggguuaucuucaaccuaggacuuuucuauuaaaauauaaugaaaauggaaccauuacagaugcuguagacugugcacuugacccucucucagaaacaaaguguacguugaaauccuucacuguagaaaaaggaaucuaucaaacuucuaacuuuagaguccaaccaacagaaucuauuguuagauuuccuaauauuacaaacuugugcccuuuuggugaaguuuuuaacgccaccagauuugcaucuguuuaugcuuggaacaggaagagaaucagcaacuguguugcugauuauucuguccuauauaauuccgcaucauuuuccacuuuuaaguguuauggagugucuccuacuaaauuaaaugaucucugcuuuacuaaugucuaugcagauucauuuguaauuagaggugaugaagucagacaaaucgcuccagggcaaacuggaaagauugcugauuauaauuauaaauuaccagaugauuuuacaggcugcguuauagcuuggaauucuaacaaucuugauucuaagguuggugguaauuauaauuaccuguauagauuguuuaggaagucuaaucucaaaccuuuugagagagauauuucaacugaaaucuaucaggccgguagcacaccuuguaaugguguugaagguuuuaauuguuacuuuccuuuacaaucauaugguuuccaacccacuaaugguguugguuaccaaccauacagaguaguaguacuuucuuuugaacuucuacaugcaccagcaacuguuuguggaccuaaaaagucuacuaauuugguuaaaaacaaaugugucaauuucaacuucaaugguuuaacaggcacagguguucuuacugagucuaacaaaaaguuucugccuuuccaacaauuuggcagagacauugcugacacuacugaugcuguccgugauccacagacacuugagauucuugacauuacaccauguucuuuugguggugucaguguuauaacaccaggaacaaauacuucuaaccagguugcuguucuuuaucaggauguuaacugcacagaagucccuguugcuauucaugcagaucaacuuacuccuacuuggcguguuuauucuacagguucuaauguuuuucaaacacgugcaggcuguuuaauaggggcugaacaugucaacaacucauaugagugugacauacccauuggugcagguauaugcgcuaguuaucagacucagacuaauucuccucggcgggcacguaguguagcuagucaauccaucauugccuacacuaugucacuuggugcagaaaauucaguugcuuacucuaauaacucuauugccauacccacaaauuuuacuauuaguguuaccacagaaauucuaccagugucuaugaccaagacaucaguagauuguacaauguacauuuguggugauucaacugaaugcagcaauuuuuuguugcaauauggcaguuuuuguacacaauuaaaccgugcuuuaacuggaauagcuguugaacaagacaaaaacacccaagaaguuuuugcacaagucaaacaaauuuacaaaacaccaccaauuaaagauuuuggugguuuuaauuuuucacaaauauuaccagauccaucaaaaccaagcaagaggucauuuauugaagaucuacuuuucaacaaagugacacuugcagaugcuggcuucaucaaacaauauggugauugccuuggugauauugcugcuagagaccucauuugugcacaaaaguuuaacggccuuacuguuuugccaccuuugcucacagaugaaaugauugcucaauacacuucugcacuguuagcggguacaaucacuucugguuggaccuuuggugcaggugcugcauuacaaauaccauuugcuaugcaaauggcuuauagguuuaaugguauuggaguuacacagaauguucucuaugagaaccaaaaauugauugccaaccaauuuaauagugcuauuggcaaaauucaagacucacuuucuuccacagcaagugcacuuggaaaacuucaagauguggucaaccaaaaugcacaagcuuuaaacacgcuuguuaaacaacuuagcuccaauuuuggugcaauuucaaguguuuuaaaugauauccuuucacgucuugacaaaguugaggcugaagugcaaauugauagguugaucacaggcagacuucaaaguuugcagacauaugugacucaacaauuaauuagagcugcagaaaucagagcuucugcuaaucuugcugcuacuaaaaugucagaguguguacuuggacaaucaaaaagaguugauuuuuguggaaagggcuaucaucuuauguccuucccucagucagcaccucaugguguagucuucuugcaugugacuuaugucccugcacaagaaaagaacuucacaacugcuccugccauuugucaugauggaaaagcacacuuuccucgugaaggugucuuuguuucaaauggcacacacugguuuguaacacaaaggaauuuuuaugaaccacaaaucauuacuacagacaacacauuugugucugguaacugugauguuguaauaggaauugucaacaacacaguuuaugauccuuugcaaccugaauuagacucauucaaggaggaguuagauaaauauuuuaagaaucauacaucaccagauguugauuuaggugacaucucuggcauuaaugcuucaguuguaaacauucaaaaagaaauugaccgccucaaugagguugccaagaauuuaaaugaaucucucaucgaucuccaagaacuuggaaaguaugagcaguauauaaaauggccaugguacauuuggcuagguuuuauagcuggcuugauugccauaguaauggugacaauuaugcuuugcuguaugaccaguugcuguaguugucucaagggcuguuguucuuguggauccugcugcaaauuugaugaagacgacucugagccagugcucaaaggagucaaauuacauuacacauaa

SEQ ID NO: 11674 - RNA, 3822 nt, Artificial Sequence
  SARS-CoV-2/Australia/QLD02/2020__EPI_ISL_407896 spike protein CDS wt (1-1273)
auguuuguuuuucuuguuuuauugccacuagucucuagucaguguguuaaucuuacaaccagaacucaauuacccccugcauacacuaauucuuucacacgugguguuuauuacccugacaaaguuuucagauccucaguuuuacauucaacucaggacuuguucuuaccuuucuuuuccaauguuacuugguuccaugcuauacaugucucugggaccaaugguacuaagagguuugauaacccuguccuaccauuuaaugaugguguuuauuuugcuuccacugagaagucuaacauaauaagaggcuggauuuuugguacuacuuuagauucgaagacccagucccuacuuauuguuaauaacgcuacuaauguuguuauuaaagucugugaauuucaauuuuguaaugauccauuuuuggguguuuauuaccacaaaaacaacaaaaguuggauggaaagugaguucagaguuuauucuagugcgaauaauugcacuuuugaauaugucucucagccuuuucuuauggaccuugaaggaaaacaggguaauuucaaaaaucuuagggaauuuguguuuaagaauauugaugguuauuuuaaaauauauucuaagcacacgccuauuaauuuagugcgugaucucccucaggguuuuucggcuuuagaaccauugguagauuugccaauagguauuaacaucacuagguuucaaacuuuacuugcuuuacauagaaguuauuugacuccuggugauucuucuucagguuggacagcuggugcugcagcuuauuauguggguuaucuucaaccuaggacuuuucuauuaaaauauaaugaaaauggaaccauuacagaugcuguagacugugcacuugacccucucucagaaacaaaguguacguugaaauccuucacuguagaaaaaggaaucuaucaaacuucuaacuuuagaguccaaccaacagaaucuauuguuagauuuccuaauauuacaaacuugugcccuuuuggugaaguuuuuaacgccaccagauuugcaucuguuuaugcuuggaacaggaagagaaucagcaacuguguugcugauuauucuguccuauauaauuccgcaucauuuuccacuuuuaaguguuauggagugucuccuacuaaauuaaaugaucucugcuuuacuaaugucuaugcagauucauuuguaauuagaggugaugaagucagacaaaucgcuccagggcaaacuggaaagauugcugauuauaauuauaaauuaccagaugauuuuacaggcugcguuauagcuuggaauucuaacaaucuugauucuaagguuggugguaauuauaauuaccuguauagauuguuuaggaagucuaaucucaaaccuuuugagagagauauuucaacugaaaucuaucaggccgguagcacaccuuguaaugguguugaagguuuuaauuguuacuuuccuuuacaaucauaugguuuccaacccacuaaugguguugguuaccaaccauacagaguaguaguacuuucuuuugaacuucuacaugcaccagcaacuguuuguggaccuaaaaagucuacuaauuugguuaaaaacaaaugugucaauuucaacuucaaugguuuaacaggcacagguguucuuacugagucuaacaaaaaguuucugccuuuccaacaauuuggcagagacauugcugacacuacugaugcuguccgugauccacagacacuugagauucuugacauuacaccauguucuuuugguggugucaguguuauaacaccaggaacaaauacuucuaaccagguugcuguucuuuaucaggauguuaacugcacagaagucccuguugcuauucaugcagaucaacuuacuccuacuuggcguguuuauucuacagguucuaauguuuuucaaacacgugcaggcuguuuaauaggggcugaacaugucaacaacucauaugagugugacauacccauuggugcagguauaugcgcuaguuaucagacucagacuaauucuccucggcgggcacguaguguagcuagucaauccaucauugccuacacuaugucacuuggugcagaaaauucaguugcuuacucuaauaacucuauugccauacccacaaauuuuacuauuaguguuaccacagaaauucuaccagugucuaugaccaagacaucaguagauuguacaauguacauuuguggugauucaacugaaugcagcaaucuuuuguugcaauauggcaguuuuuguacacaauuaaaccgugcuuuaacuggaauagcuguugaacaagacaaaaacacccaagaaguuuuugcacaagucaaacaaauuuacaaaacaccaccaauuaaagauuuuggugguuuuaauuuuucacaaauauuaccagauccaucaaaaccaagcaagaggucauuuauugaagaucuacuuuucaacaaagugacacuugcagaugcuggcuucaucaaacaauauggugauugccuuggugauauugcugcuagagaccucauuugugcacaaaaguuuaacggccuuacuguuuugccaccuuugcucacagaugaaaugauugcucaauacacuucugcacuguuagcggguacaaucacuucugguuggaccuuuggugcaggugcugcauuacaaauaccauuugcuaugcaaauggcuuauagguuuaaugguauuggaguuacacagaauguucucuaugagaaccaaaaauugauugccaaccaauuuaauagugcuauuggcaaaauucaagacucacuuucuuccacagcaagugcacuuggaaaacuucaagauguggucaaccaaaaugcacaagcuuuaaacacgcuuguuaaacaacuuagcuccaauuuuggugcaauuucaaguguuuuaaaugauauccuuucacgucuugacaaaguugaggcugaagugcaaauugauagguugaucacaggcagacuucaaaguuugcagacauaugugacucaacaauuaauuagagcugcagaaaucagagcuucugcuaaucuugcugcuacuaaaaugucagaguguguacuuggacaaucaaaaagaguugauuuuuguggaaagggcuaucaucuuauguccuucccucagucagcaccucaugguguagucuucuugcaugugacuuaugucccugcacaagaaaagaacuucacaacugcuccugccauuugucaugauggaaaagcacacuuuccucgugaaggugucuuuguuucaaauggcacacacugguuuguaacacaaaggaauuuuuaugaaccacaaaucauuacuacagacaacacauuugugucugguaacugugauguuguaauaggaauugucaacaacacaguuuaugauccuuugcaacuugaauuagacucauucaaggaggaguuagauaaauauuuuaagaaucauacaucaccagauguugauuuaggugacaucucuggcauuaaugcuucaguuguaaacauucaaaaagaaauugaccgccucaaugagguugccaagaauuuaaaugaaucucucaucgaucuccaagaacuuggaaaguaugagcaguauauaaaauggccaugguacauuuggcuagguuuuauagcuggcuugauugccauaguaauggugacaauuaugcuuugcuguaugaccaguugcuguaguugucucaagggcuguuguucuuguggauccugcugcaaauuugaugaagacgacucugagccagugcucaaaggagucaaauuacauuacacauaa

SEQ ID NO: 11675 - RNA, 3822 nt, Artificial Sequence
  SARS-CoV-2/India/1-31/2020__EPI_ISL_413523 spike protein CDS wt (1-1273)
auguuuguuuuucuuguuuuauugccacuagucucuagucaguguguuaaucuuacaaccagaacucaauuacccccugcauacacuaauucuuucacacgugguguuuauuacccugacaaaguuuucagauccucaguuuuacauucaacucaggacuuguucuuaccuuucuuuuccaauguuacuugguuccaugcuauacaugucucugggaccaaugguacuaagagguuugauaacccuguccuaccauuuaaugaugguguuuauuuugcuuccacugagaagucuaacauaauaagaggcuggauuuuugguacuacuuuagauucgaagacccagucccuacuuauuguuaauaacgcuacuaauguuguuauuaaagucugugaauuucaauuuuguaaugauccauuuuuggguguuuauuaccacaaaaacaacaaaaguuggauggaaagugaguucagaguuuauucuagugcgaauaauugcacuuuugaauaugucucucagccuuuucuuauggaccuugaaggaaaacaggguaauuucaaaaaucuuagggaauuuguguuuaagaauauugaugguuauuuuaaaauauauucuaagcacacgccuauuaauuuagugcgugaucucccucaggguuuuucggcuuuagaaccauugguagauuugccaauagguauuaacaucacuagguuucaaacuuuacuugcuuuacauagaaguuauuugacuccuggugauucuucuucagguuggacagcuggugcugcagcuuauuauguggguuaucuucaaccuaggacuuuucuauuaaaauauaaugaaaauggaaccauuacagaugcuguagacugugcacuugacccucucucagaaacaaaguguacguugaaauccuucacuguagaaaaaggaaucuaucaaacuucuaacuuuagaguccaaccaacagaaucuauuguuagauuuccuaauauuacaaacuugugcccuuuuggugaaguuuuuaacgccaccagauuugcaucuguuuaugcuuggaacaggaagagaaucagcaacuguguugcugauuauucuguccuauauaauuccgcaucauuuuccacuuuuaaguguuauggagugucuccuacuaaauuaaaugaucucugcuuuacuaaugucuaugcagauucauuuguaauuagaggugaugaagucagacaaaucgcuccagggcaaacuggaaagauugcugauuauaauuauaaauuaccagaugauuuuacaggcugcguuauagcuuggaauucuaacaaucuugauucuaagguuggugguaauuauaauuaccuguauagauuguuuaggaagucuaaucucaaaccuuuugagagagauauuucaacugaaaucuaucaggccgguagcacaccuuguaaugguguugaagguuuuaauuguuacuuuccuuuacaaucauaugguuuccaacccacuaaugguguugguuaccaaccauacagaguaguaguacuuucuuuugaacuucuacaugcaccagcaacuguuuguggaccuaaaaagucuacuaauuugguuaaaaacaaaugugucaauuucaacuucaaugguuuaacaggcacagguguucuuacugagucuaacaaaaaguuucugccuuuccaacaauuuggcagagacauugcugacacuacugaugcuguccgugauccacagacacuugagauucuugacauuacaccauguucuuuugguggugucaguguuauaacaccaggaacaaauacuucuaaccagguugcuguucuuuaucaggauguuaacugcacagaagucccuguugcuauucaugcagaucaacuuacuccuacuuggcguguuuauucuacagguucuaauguuuuucaaacacgugcaggcuguuuaauaggggcugaacaugucaacaacucauaugagugugacauacccauuggugcagguauaugcgcuaguuaucagacucagacuaauucuccucggcgggcacguaguguagcuagucaauccaucauugccuacacuaugucacuuggugcagaaaauucaguugcuuacucuaauaacucuauugccauacccacaaauuuuacuauuaguguuaccacagaaauucuaccagugucuaugaccaagacaucaguagauuguacaauguacauuuguggugauucaacugaaugcagcaaucuuuuguugcaauauggcaguuuuuguacacaauuaaaccgugcuuuaacuggaauagcuguugaacaagacaaaaacacccaagaaguuuuugcacaagucaaacaaauuuacaaaacaccaccaauuaaagauuuuggugguuuuaauuuuucacaaauauuaccagauccaucaaaaccaagcaagaggucauuuauugaagaucuacuuuucaacaaagugacacuugcagaugcuggcuucaucaaacaauauggugauugccuuggugauauugcugcuagagaccucauuugugcacaaaaguuuaacggccuuacuguuuugccaccuuugcucacagaugaaaugauugcucaauacacuucugcacuguuagcggguacaaucacuucugguuggaccuuuggugcaggugcugcauuacaaauaccauuugcuaugcaaauggcuuauagguuuaaugguauuggaguuacacagaauguucucuaugagaaccaaaaauugauugccaaccaauuuaauaguguuauuggcaaaauucaagacucacuuucuuccacagcaagugcacuuggaaaacuucaagauguggucaaccaaaaugcacaagcuuuaaacacgcuuguuaaacaacuuagcuccaauuuuggugcaauuucaaguguuuuaaaugauauccuuucacgucuugacaaaguugaggcugaagugcaaauugauagguugaucacaggcagacuucaaaguuugcagacauaugugacucaacaauuaauuagagcugcagaaaucagagcuucugcuaaucuugcugcuacuaaaaugucagaguguguacuuggacaaucaaaaagaguugauuuuuguggaaagggcuaucaucuuauguccuucccucagucagcaccucaugguguagucuucuugcaugugacuuaugucccugcacaagaaaagaacuucacaacugcuccugccauuugucaugauggaaaagcacacuuuccucgugaaggugucuuuguuucaaauggcacacacugguuuguaacacaaaggaauuuuuaugaaccacaaaucauuacuacagacaacacauuugugucugguaacugugauguuguaauaggaauugucaacaacacaguuuaugauccuuugcaaccugaauuagacucauucaaggaggaguuagauaaauauuuuaagaaucauacaucaccagauguugauuuaggugacaucucuggcauuaaugcuucaguuguaaacauucaaaaagaaauugaccgccucaaugagguugccaagaauuuaaaugaaucucucaucgaucuccaagaacuuggaaaguaugagcaguauauaaaauggccaugguacauuuggcuagguuuuauagcuggcuugauugccauaguaauggugacaauuaugcuuugcuguaugaccaguugcuguaguugucucaagggcuguuguucuuguggauccugcugcaaauuugaugaagacgacucugagccagugcucaaaggagucaaauuacauuacacauaa

SEQ ID NO: 11676 - RNA, 3822 nt, Artificial Sequence
  SARS-CoV-2/Guangdong/GD2020087-P0008/2020__EPI_ISL_413863 spike protein CDS wt (1-1273)
auguuuguuuuucuuguuuuauugccacuagucucuagucaguguguuaaucuuacaaccagaacucaauuacccccugcauacacuaauucuuucacacgugguguuuauuacccugacaaaguuuucagauccucaguuuuacauucaacucaggacuuguucuuaccuuucuuuuccaauguuacuugguuccaugcuauacaugucucugggaccaaugguacuaagagguuugauaacccuguccuaccauuuaaugaugguguuuauuuugcuuccacugagaagucuaacauaauaagaggcuggauuuuugguacuacuuuagauucgaagacccagucccuacuuauuguuaauaacgcuacuaauguuguuauuaaagucugugaauuucaauuuuguaaugauccauuuuuggguguuuauuaccacaaaaacaacaaaaguuggauggaaagugaguucagaguuuauucuagugcgaauaauugcacuuuugaauaugucucucagccuuuucuuauggaccuugaaggaaaacaggguaauuucaaaaaucuuagggaauuuguguuuaagaauauugaugguuauuuuaaaauauauucuaagcacacgccuauuaauuuagugcgugaucucccucaggguuuuucggcuuuagaaccauugguagauuugccaauagguauuaacaucacuagguuucaaacuuuacuugcuuuacauagaaguuauuugacuccuggugauucuucuucagguuggacagcuggugcugcagcuuauuauguggguuaucuucaaccuaggacuuuucuauuaaaauauaaugaaaauggaaccauuacagaugcuguagacugugcacuugacccucucucagaaacaaaguguacguugaaauccuucacuguagaaaaaggaaucuaucaaacuucuaacuuuagaguccaaccaacagaaucuauuguuagauuuccuaauauuacaaacuugugcccuuuuggugaaguuuuuaacgccaccagauuugcaucuguuuaugcuuggaacaggaagagaaucagcaacuguguugcugauuauucuguccuauauaauuccgcaucauuuuccacuuuuaaguguuauggagugucuccuacuaaauuaaaugaucucugcuuuacuaaugucuaugcagauucauuuguaauuagaggugaugaagucagagaaaucgcuccagggcaaacuggaaagauugcugauuauaauuauaaauuaccagaugauuuuacaggcugcguuauagcuuggaauucuaacaaucuugauucuaagguuggugguaauuauaauuaccuguauagauuguuuaggaagucuaaucucaaaccuuuugagagagauauuucaacugaaaucuaucaggccgguagcacaccuuguaaugguguugaagguuuuaauuguuacuuuccuuuacaaucauaugguuuccaacccacuaaugguguugguuaccaaccauacagaguaguaguacuuucuuuugaacuucuacaugcaccagcaacuguuuguggaccuaaaaagucuacuaauuugguuaaaaacaaaugugucaauuucaacuucaaugguuuaacaggcacagguguucuuacugagucuaacaaaaaguuucugccuuuccaacaauuuggcagagacauugcugacacuacugaugcuguccgugauccacagacacuugagauucuugacauuacaccauguucuuuugguggugucaguguuauaacaccaggaacaaauacuucuaaccagguugcuguucuuuaucaggauguuaacugcacagaagucccuguugcuauucaugcagaucaacuuacuccuacuuggcguguuuauucuacagguucuaauguuuuucaaacacgugcaggcuguuuaauaggggcugaacaugucaacaacucauaugagugugacauacccauuggugcagguauaugcgcuaguuaucagacucagacuaauucuccucggcgggcacguaguguagcuagucaauccaucauugccuacacuaugucacuuggugcagaaaauucaguugcuuacucuaauaacucuauugccauacccacaaauuuuacuauuaguguuaccacagaaauucuaccagugucuaugaccaagacaucaguagauuguacaauguacauuuguggugauucaacugaaugcagcaaucuuuuguugcaauauggcaguuuuuguacacaauuaaaccgugcuuuaacuggaauagcuguugaacaagacaaaaacacccaagaaguuuuugcacaagucaaacaaauuuacaaaacaccaccaauuaaagauuuuggugguuuuaauuuuucacaaauauuaccagauccaucaaaaccaagcaagaggucauuuauugaagaucuacuuuucaacaaagugacacuugcagaugcuggcuucaucaaacaauauggugauugccuuggugauauugcugcuagagaccucauuugugcacaaaaguuuaacggccuuacuguuuugccaccuuugcucacagaugaaaugauugcucaauacacuucugcacuguuagcggguacaaucacuucugguuggaccuuuggugcaggugcugcauuacaaauaccauuugcuaugcaaauggcuuauagguuuaaugguauuggaguuacacagaauguucucuaugagaaccaaaaauugauugccaaccaauuuaauagugcuauuggcaaaauucaagacucacuuucuuccacagcaagugcacuuggaaaacuucaagauguggucaaccaaaaugcacaagcuuuaaacacgcuuguuaaacaacuuagcuccaauuuuggugcaauuucaaguguuuuaaaugauauccuuucacgucuugacaaaguugaggcugaagugcaaauugauagguugaucacaggcagacuucaaaguuugcagacauaugugacucaacaauuaauuagagcugcagaaaucagagcuucugcuaaucuugcugcuacuaaaaugucagaguguguacuuggacaaucaaaaagaguugauuuuuguggaaagggcuaucaucuuauguccuucccucagucagcaccucaugguguagucuucuugcaugugacuuaugucccugcacaagaaaagaacuucacaacugcuccugccauuugucaugauggaaaagcacacuuuccucgugaaggugucuuuguuucaaauggcacacacugguuuguaacacaaaggaauuuuuaugaaccacaaaucauuacuacagacaacacauuugugucugguaacugugauguuguaauaggaauugucaacaacacaguuuaugauccuuugcaaccugaauuagacucauucaaggaggaguuagauaaauauuuuaagaaucauacaucaccagauguugauuuaggugacaucucuggcauuaaugcuucaguuguaaacauucaaaaagaaauugaccgccucaaugagguugccaagaauuuaaaugaaucucucaucgaucuccaagaacuuggaaaguaugagcaguauauaaaauggccaugguacauuuggcuagguuuuauagcuggcuugauugccauaguaauggugacaauuaugcuuugcuguaugaccaguugcuguaguugucucaagggcuguuguucuuguggauccugcugcaaauuugaugaagacgacucugagccagugcucaaaggagucaaauuacauuacacauaa

SEQ ID NO: 11677 - RNA, 3822 nt, Artificial Sequence
  SARS-CoV-2/Sweden/01/2020__EPI_ISL_411951 spike protein CDS wt (1-1273)
auguuuguuuuucuuguuuuauugccacuagucucuagucaguguguuaaucuuacaaccagaacucaauuacccccugcauacacuaauucuuucacacgugguguuuauuacccugacaaaguuuucagauccucaguuuuacauucaacucaggacuuguucuuaccuuucuuuuccaauguuacuugguuccaugcuauacaugucucugggaccaaugguacuaagagguuugauaacccuguccuaccauuuaaugaugguguuuauuuugcuuccacugagaagucuaacauaauaagaggcuggauuuuugguacuacuuuagauucgaagacccagucccuacuuauuguuaauaacgcuacuaauguuguuauuaaagucugugaauuucaauuuuguaaugauccauuuuuggguguuuauuaccacaaaaacaacaaaaguuggauggaaagugaguucagaguuuauucuagugcgaauaauugcacuuuugaauaugucucucagccuuuucuuauggaccuugaaggaaaacaggguaauuucaaaaaucuuagggaauuuguguuuaagaauauugaugguuauuuuaaaauauauucuaagcacacgccuauuaauuuagugcgugaucucccucaggguuuuucggcuuuagaaccauugguagauuugccaauagguauuaacaucacuagguuucaaacuuuacuugcuuuacauagaaguuauuugacuccuggugauucuucuucagguuggacagcuggugcugcagcuuauuauguggguuaucuucaaccuaggacuuuucuauuaaaauauaaugaaaauggaaccauuacagaugcuguagacugugcacuugacccucucucagaaacaaaguguacguugaaauccuucacuguagaaaaaggaaucuaucaaacuucuaacuuuagaguccaaccaacagaaucuauuguuagauuuccuaauauuacaaacuugugcccuuuuggugaaguuuuuaacgccaccagauuugcaucuguuuaugcuuggaacaggaagagaaucagcaacuguguugcugauuauucuguccuauauaauuccgcaucauuuuccacuuuuaaguguuauggagugucuccuacuaaauuaaaugaucucugcuuuacuaaugucuaugcagauucauuuguaauuagaggugaugaagucagacaaaucgcuccagggcaaacuggaaagauugcugauuauaauuauaaauuaccagaugauuuuacaggcugcguuauagcuuggaauucuaacaaucuugauucuaagguuggugguaauuauaauuaccuguauagauuguuuaggaagucuaaucucaaaccuuuugagagagauauuucaacugaaaucuaucaggccgguagcacaccuuguaaugguguugaagguuuuaauuguuacuuuccuuuacaaucauaugguuuccaacccacuaaugguguugguuaccaaccauacagaguaguaguacuuucuuuugaacuucuacaugcaccagcaacuguuuguggaccuaaaaagucuacuaauuugguuaaaaacaaaugugucaauuucaacuucaaugguuuaacaggcacagguguucuuacugagucuaacaaaaaguuucugccuuuccaacaauuuggcagagacauugcugacacuacugaugcuguccgugauccacagacacuugagauucuugacauuacaccauguucuuuugguggugucaguguuauaacaccaggaacaaauacuucuaaccagguugcuguucuuuaucaggauguuaacugcacagaagucccuguugcuauucaugcagaucaacuuacuccuacuuggcguguuuauucuacagguucuaauguuuuucaaacacgugcaggcuguuuaauaggggcugaacaugucaacaacucauaugagugugacauacccauuggugcagguauaugcgcuaguuaucagacucagacuaauucuccucggcgggcacguaguguagcuagucaauccaucauugccuacacuaugucacuuggugcagaaaauucaguugcuuacucuaauaacucuauugccauacccacaaauuuuacuauuaguguuaccacagaaauucuaccagugucuaugaccaagacaucaguagauuguacaauguacauuuguggugauucaacugaaugcagcaaucuuuuguugcaauauggcaguuuuuguacacaauuaaaccgugcuuuaacuggaauagcuguugaacaagacaaaaacacccaagaaguuuuugcacaagucaaacaaauuuacaaaacaccaccaauuaaagauuguggugguuuuaauuuuucacaaauauuaccagauccaucaaaaccaagcaagaggucauuuauugaagaucuacuuuucaacaaagugacacuugcagaugcuggcuucaucaaacaauauggugauugccuuggugauauugcugcuagagaccucauuugugcacaaaaguuuaacggccuuacuguuuugccaccuuugcucacagaugaaaugauugcucaauacacuucugcacuguuagcggguacaaucacuucugguuggaccuuuggugcaggugcugcauuacaaauaccauuugcuaugcaaauggcuuauagguuuaaugguauuggaguuacacagaauguucucuaugagaaccaaaaauugauugccaaccaauuuaauagugcuauuggcaaaauucaagacucacuuucuuccacagcaagugcacuuggaaaacuucaagauguggucaaccaaaaugcacaagcuuuaaacacgcuuguuaaacaacuuagcuccaauuuuggugcaauuucaaguguuuuaaaugauauccuuucacgucuugacaaaguugaggcugaagugcaaauugauagguugaucacaggcagacuucaaaguuugcagacauaugugacucaacaauuaauuagagcugcagaaaucagagcuucugcuaaucuugcugcuacuaaaaugucagaguguguacuuggacaaucaaaaagaguugauuuuuguggaaagggcuaucaucuuauguccuucccucagucagcaccucaugguguagucuucuugcaugugacuuaugucccugcacaagaaaagaacuucacaacugcuccugccauuugucaugauggaaaagcacacuuuccucgugaaggugucuuuguuucaaauggcacacacugguuuguaacacaaaggaauuuuuaugaaccacaaaucauuacuacagacaacacauuugugucugguaacugugauguuguaauaggaauugucaacaacacaguuuaugauccuuugcaaccugaauuagacucauucaaggaggaguuagauaaauauuuuaagaaucauacaucaccagauguugauuuaggugacaucucuggcauuaaugcuucaguuguaaacauucaaaaagaaauugaccgccucaaugagguugccaagaauuuaaaugaaucucucaucgaucuccaagaacuuggaaaguaugagcaguauauaaaauggccaugguacauuuggcuagguuuuauagcuggcuugauugccauaguaauggugacaauuaugcuuugcuguaugaccaguugcuguaguugucucaagggcuguuguucuuguggauccugcugcaaauuugaugaagacgacucugagccagugcucaaaggagucaaauuacauuacacauaa

SEQ ID NO: 11678 - RNA, 3822 nt, Artificial Sequence
  SARS-CoV-2/Tianmen/HBCDC-HB-07/2020__EPI_ISL_412983 spike protein CDS wt (1-1273)
auguuuguuuuucuuguuuuauugccacuagucucuagucaguguguuaaucuuacaaccagaacucaauuacccccugcauacacuaauucuuucacacgugguguuuauuacccugacaaaguuuucagauccucaguuuuacauucaacucaggacuuguucuuaccuuucuuuuccaauguuacuugguuccaugcuauacaugucucugggaccaaugguacuaagagguuugauaacccuguccuaccauuuaaugaugguguuuauuuugcuuccacugagaagucuaacauaauaagaggcuggauuuuugguacuacuuuagauucgaagacccagucccuacuuauuguuaauaacgcuacuaauguuguuauuaaagucugugaauuucaauuuuguaaugauccauuuuuggguguuuauuaccacaaaaacaacaaaaguuggauggaaagugaguucagaguuuauucuagugcgaauaauugcacuuuugaauaugucucucagccuuuucuuauggaccuugaaggaaaacaggguaauuucaaaaaucuuagggaauuuguguuuaagaauauugaugguuauuuuaaaauauauucuaagcacacgccuauuaauuuagugcgugaucucccucaggguuuuucggcuuuagaaccauugguagauuugccaauagguauuaacaucacuagguuucaaacuuuacuugcuuuacauagaaguuauuugacuccuggugauucuucuucagguuggacagcuggugcugcagcuuauuauguggguuaucuucaaccuaggacuuuucuauuaaaauauaaugaaaauggaaccauuacagaugcuguagacugugcacuugacccucucucagaaacaaaguguacguugaaauccuucacuguagaaaaaggaaucuaucaaacuucuaacuuuagaguccaaccaacagaaucuauuguuagauuuccuaauauuacaaacuugugcccuuuuggugaaguuuuuaacgccaccagauuugcaucuguuuaugcuuggaacaggaagagaaucagcaacuguguugcugauuauucuguccuauauaauuccgcaucauuuuccacuuuuaaguguuauggagugucuccuacuaaauuaaaugaucucugcuuuacuaaugucuaugcagauucauuuguaauuagaggugaugaagucagacaaaucgcuccagggcaaacuggaaagauugcugauuauaauuauaaauuaccagaugauuuuacaggcugcguuauagcuuggaauucuaacaaucuugauucuaagguuggugguaauuauaauuaccuguauagauuguuuaggaagucuaaucucaaaccuuuugagagagauauuucaacugaaaucuaucaggccgguagcacaccuuguaaugguguugaagguuuuaauuguuacuuuccuuuacaaucauaugguuuccaacccacuaaugguguugguuaccaaccauacagaguaguaguacuuucuuuugaacuucuacaugcaccagcaacuguuuguggaccuaaaaagucuacuaauuugguuaaaaacaaaugugucaauuucaacuucaaugguuuaacaggcacagguguucuuacugagucuaacaaaaaguuucugccuuuccaacaauuuggcagagacauugcugacacuacugaugcuguccgugauccacagacacuugagauucuugacauuacaccauguucuuuugguggugucaguguuauaacaccaggaacaaauacuucuaaccagguugcuguucuuuaucaggaucuuaacugcacagaagucccuguugcuauucaugcagaucaacuuacuccuacuuggcguguuuauucuacagguucuaauguuuuucaaacacgugcaggcuguuuaauaggggcugaacaugucaacaacucauaugagugugacauacccauuggugcagguauaugcgcuaguuaucagacucagacuaauucuccucggcgggcacguaguguagcuagucaauccaucauugccuacacuaugucacuuggugcagaaaauucaguugcuuacucuaauaacucuauugccauacccacaaauuuuacuauuaguguuaccacagaaauucuaccagugucuaugaccaagacaucaguagauuguacaauguacauuuguggugauucaacugaaugcagcaaucuuuuguugcaauauggcaguuuuuguacacaauuaaaccgugcuuuaacuggaauagcuguugaacaagacaaaaacacccaagaaguuuuugcacaagucaaacaaauuuacaaaacaccaccaauuaaagauuuuggugguuuuaauuuuucacaaauauuaccagauccaucaaaaccaagcaagaggucauuuauugaagaucuacuuuucaacaaagugacacuugcagaugcuggcuucaucaaacaauauggugauugccuuggugauauugcugcuagagaccucauuugugcacaaaaguuuaacggccuuacuguuuugccaccuuugcucacagaugaaaugauugcucaauacacuucugcacuguuagcggguacaaucacuucugguuggaccuuuggugcaggugcugcauuacaaauaccauuugcuaugcaaauggcuuauagguuuaaugguauuggaguuacacagaauguucucuaugagaaccaaaaauugauugccaaccaauuuaauagugcuauuggcaaaauucaagacucacuuucuuccacagcaagugcacuuggaaaacuucaagauguggucaaccaaaaugcacaagcuuuaaacacgcuuguuaaacaacuuagcuccaauuuuggugcaauuucaaguguuuuaaaugauauccuuucacgucuugacaaaguugaggcugaagugcaaauugauagguugaucacaggcagacuucaaaguuugcagacauaugugacucaacaauuaauuagagcugcagaaaucagagcuucugcuaaucuugcugcuacuaaaaugucagaguguguacuuggacaaucaaaaagaguugauuuuuguggaaagggcuaucaucuuauguccuucccucagucagcaccucaugguguagucuucuugcaugugacuuaugucccugcacaagaaaagaacuucacaacugcuccugccauuugucaugauggaaaagcacacuuuccucgugaaggugucuuuguuucaaauggcacacacugguuuguaacacaaaggaauuuuuaugaaccacaaaucauuacuacagacaacacauuugugucugguaacugugauguuguaauaggaauugucaacaacacaguuuaugauccuuugcaaccugaauuagacucauucaaggaggaguuagauaaauauuuuaagaaucauacaucaccagauguugauuuaggugacaucucuggcauuaaugcuucaguuguaaacauucaaaaagaaauugaccgccucaaugagguugccaagaauuuaaaugaaucucucaucgaucuccaagaacuuggaaaguaugagcaguauauaaaauggccaugguacauuuggcuagguuuuauagcuggcuugauugccauaguaauggugacaauuaugcuuugcuguaugaccaguugcuguaguugucucaagggcuguuguucuuguggauccugcugcaaauuugaugaagacgacucugagccagugcucaaaggagucaaauuacauuacacauaa

SEQ ID NO: 11679 - RNA, 3822 nt, Artificial Sequence
  SARS-CoV-2/Hong Kong/case42_VM20002493/2020__EPI_ISL_414527 spike protein CDS wt (1-1273)
auguuuguuuuucuuguuuuauugccacuagucucuagucaguguguuaaucuuacaaccagaacucaauuacccccugcauacacuaauucuuucacacgugguguuuauuacccugacaaaguuuucagauccucaguuuuacauucaacucaggacuuguucuuaccuuucuuuuccaauguuacuugguuccaugcuauacaugucucugggaccaaugguacuaagagguuugauaacccuguccuaccauuuaaugaugguguuuauuuugcuuccacugagaagucuaacauaauaagaggcuggauuuuugguacuacuuuagauucgaagacccagucccuacuuauuguuaauaacgcuacuaauguuguuauuaaagucugugaauuucaauuuuguaaugauccauuuuuggguguuuauuaccacaaaaacaacaaaaguuggauggaaagugaguucagaguuuauucuagugcgaauaauugcacuuuugaauaugucucucagccuuuucuuauggaccuugaaggaaaacaggguaauuucaaaaaucuuagggaauuuguguuuaagaauauugaugguuauuuuaaaauauauucuaagcacacgccuauuaauuuagugcgugaucucccucaggguuuuucggcuuuagaaccauugguagauuugccaauagguauuaacaucacuagguuucaaacuuuacuugcuuuacauagaaguuauuugacuccuggugauucuucuucagguuggacagcuggugcugcagcuuauuauguggguuaucuucaaccuaggacuuuucuauuaaaauauaaugaaaauggaaccauuacagaugcuguagacugugcacuugacccucucucagaaacaaaguguacguugaaauccuucacuguagaaaaaggaaucuaucaaacuucuaacuuuagaguccaaccaacagaaucuauuguuagauuuccuaauauuacaaacuugugcccuuuuggugaaguuuuuaacgccaccagauuugcaucuguuuaugcuuggaacaggaagagaaucagcaacuguguugcugauuauucuguccuauauaauuccgcaucauuuuccacuuuuaaguguuauggagugucuccuacuaaauuaaaugaucucugcuuuacuaaugucuaugcagauucauuuguaauuagaggugaugaagucagacaaaucgcuccagggcaaacuggaaagauugcugauuauaauuauaaauuaccagaugauuuuacaggcugcguuauagcuuggaauucuaacaaucuugauucuaagguuggugguaauuauaauuaccuguauagauuguuuaggaagucuaaucucaaaccuuuugagagagauauuucaacugaaaucuaucaggccgguagcacaccuuguaaugguguugaagguuuuaauuguuacuuuccuuuacaaucauaugguuuccaacccacuaaugguguugguuaccaaccauacagaguaguaguacuuucuuuugaacuucuacaugcaccagcaacuguuuguggaccuaaaaagucuacuaauuugguuaaaaacaaaugugucaauuucaacuucaaugguuuaacaggcacagguguucuuacugagucuaacaaaaaguuucugccuuuccaacaauuuggcagagacauugcugacacuacugaugcuguccgugauccacagacacuugagauucuugacauuacaccauguucuuuugguggugucaguguuauaacaccaggaacaaauacuucuaaccagguugcuguucuuuaucaggauguuaacugcacagaagucccuguugcuauucaugcagaucaacuuacuccuacuuggcguguuuauucuacagguucuaauguuuuucaaacacgugcaggcuguuuaauaggggcugaacaugucaacaacucauaugagugugacauacccauuggugcagguauaugcgcuaguuaucagacucagacuaauucuccucggcgggcacguaguguagcuagucaauccaucauugccuacacuaugucacuuggugcagaaaauucaguugcuuacucuaauaacucuauugccauacccacaaauuuugcuauuaguguuaccacagaaauucuaccagugucuaugaccaagacaucaguagauuguacaauguacauuuguggugauucaacugaaugcagcaaucuuuuguugcaauauggcaguuuuuguacacaauuaaaccgugcuuuaacuggaauagcuguugaacaagacaaaaacacccaagaaguuuuugcacaagucaaacaaauuuacaaaacaccaccaauuaaagauuuuggugguuuuaauuuuucacaaauauuaccagauccaucaaaaccaagcaagaggucauuuauugaagaucuacuuuucaacaaagugacacuugcagaugcuggcuucaucaaacaauauggugauugccuuggugauauugcugcuagagaccucauuugugcacaaaaguuuaacggccuuacuguuuugccaccuuugcucacagaugaaaugauugcucaauacacuucugcacuguuagcggguacaaucacuucugguuggaccuuuggugcaggugcugcauuacaaauaccauuugcuaugcaaauggcuuauagguuuaaugguauuggaguuacacagaauguucucuaugagaaccaaaaauugauugccaaccaauuuaauagugcuauuggcaaaauucaagacucacuuucuuccacagcaagugcacuuggaaaacuucaagauguggucaaccaaaaugcacaagcuuuaaacacgcuuguuaaacaacuuagcuccaauuuuggugcaauuucaaguguuuuaaaugauauccuuucacgucuugacaaaguugaggcugaagugcaaauugauagguugaucacaggcagacuucaaaguuugcagacauaugugacucaacaauuaauuagagcugcagaaaucagagcuucugcuaaucuugcugcuacuaaaaugucagaguguguacuuggacaaucaaaaagaguugauuuuuguggaaagggcuaucaucuuauguccuucccucagucagcaccucaugguguagucuucuugcaugugacuuaugucccugcacaagaaaagaacuucacaacugcuccugccauuugucaugauggaaaagcacacuuuccucgugaaggugucuuuguuucaaauggcacacacugguuuguaacacaaaggaauuuuuaugaaccacaaaucauuacuacagacaacacauuugugucugguaacugugauguuguaauaggaauugucaacaacacaguuuaugauccuuugcaaccugaauuagacucauucaaggaggaguuagauaaauauuuuaagaaucauacaucaccagauguugauuuaggugacaucucuggcauuaaugcuucaguuguaaacauucaaaaagaaauugaccgccucaaugagguugccaagaauuuaaaugaaucucucaucgaucuccaagaacuuggaaaguaugagcaguauauaaaauggccaugguacauuuggcuagguuuuauagcuggcuugauugccauaguaauggugacaauuaugcuuugcuguaugaccaguugcuguaguugucucaagggcuguuguucuuguggauccugcugcaaauuugaugaagacgacucugagccagugcucaaaggagucaaauuacauuacacauaa

SEQ ID NO: 11680 - RNA, 3822 nt, Artificial Sequence
  SARS-CoV-2/USA/CruiseA-23/2020__EPI_ISL_414482 spike protein CDS wt (1-1273)
auguuuguuuuucuuguuuuauugccacuagucucuagucaguguguuaaucuuacaaccagaacucaauuacccccugcauacacuaauucuuucacacgugguguuuauuacccugacaaaguuuucagauccucaguuuuacauucaacucaggacuuguucuuaccuuucuuuuccaauguuacuugguuccaugcuauacaugucucugggaccaaugguacuaagagguuugauaacccuguccuaccauuuaaugaugguguuuauuuugcuuccacugagaagucuaacauaauaagaggcuggauuuuugguacuacuuuagauucgaagacccagucccuacuuauuguuaauaacgcuacuaauguuguuauuaaagucugugaauuucaauuuuguaaugauccauuuuuggguguuuauuaccacaaaaacaacaaaaguuggauggaaagugaguucagaguuuauucuagugcgaauaauugcacuuuugaauaugucucucagccuuuucuuauggaccuugaaguaaaacaggguaauuucaaaaaucuuagggaauuuguguuuaagaauauugaugguuauuuuaaaauauauucuaagcacacgccuauuaauuuagugcgugaucucccucaggguuuuucggcuuuagaaccauugguagauuugccaauagguauuaacaucacuagguuucaaacuuuacuugcuuuacauagaaguuauuugacuccuggugauucuucuucagguuggacagcuggugcugcagcuuauuauguggguuaucuucaaccuaggacuuuucuauuaaaauauaaugaaaauggaaccauuacagaugcuguagacugugcacuugacccucucucagaaacaaaguguacguugaaauccuucacuguagaaaaaggaaucuaucaaacuucuaacuuuagaguccaaccaacagaaucuauuguuagauuuccuaauauuacaaacuugugcccuuuuggugaaguuuuuaacgccaccagauuugcaucuguuuaugcuuggaacaggaagagaaucagcaacuguguugcugauuauucuguccuauauaauuccgcaucauuuuccacuuuuaaguguuauggagugucuccuacuaaauuaaaugaucucugcuuuacuaaugucuaugcagauucauuuguaauuagaggugaugaagucagacaaaucgcuccagggcaaacuggaaagauugcugauuauaauuauaaauuaccagaugauuuuacaggcugcguuauagcuuggaauucuaacaaucuugauucuaagguuggugguaauuauaauuaccuguauagauuguuuaggaagucuaaucucaaaccuuuugagagagauauuucaacugaaaucuaucaggccgguagcacaccuuguaaugguguugaagguuuuaauuguuacuuuccuuuacaaucauaugguuuccaacccacuaaugguguugguuaccaaccauacagaguaguaguacuuucuuuugaacuucuacaugcaccagcaacuguuuguggaccuaaaaagucuacuaauuugguuaaaaacaaaugugucaauuucaacuucaaugguuuaacaggcacagguguucuuacugagucuaacaaaaaguuucugccuuuccaacaauuuggcagagacauugcugacacuacugaugcuguccgugauccacagacacuugagauucuugacauuacaccauguucuuuugguggugucaguguuauaacaccaggaacaaauacuucuaaccagguugcuguucuuuaucaggauguuaacugcacagaagucccuguugcuauucaugcagaucaacuuacuccuacuuggcguguuuauucuacagguucuaauguuuuucaaacacgugcaggcuguuuaauaggggcugaacaugucaacaacucauaugagugugacauacccauuggugcagguauaugcgcuaguuaucagacucagacuaauucuccucggcgggcacguaguguagcuagucaauccaucauugccuacacuaugucacuuggugcagaaaauucaguugcuuacucuaauaacucuauugccauacccacaaauuuuacuauuaguguuaccacagaaauucuaccagugucuaugaccaagacaucaguagauuguacaauguacauuuguggugauucaacugaaugcagcaaucuuuuguugcaauauggcaguuuuuguacacaauuaaaccgugcuuuaacuggaauagcuguugaacaagacaaaaacacccaagaaguuuuugcacaagucaaacaaauuuacaaaacaccaccaauuaaagauuuuggugguuuuaauuuuucacaaauauuaccagauccaucaaaaccaagcaagaggucauuuauugaagaucuacuuuucaacaaagugacacuugcagaugcuggcuucaucaaacaauauggugauugccuuggugauauugcugcuagagaccucauuugugcacaaaaguuuaacggccuuacuguuuugccaccuuugcucacagaugaaaugauugcucaauacacuucugcacuguuagcggguacaaucacuucugguuggaccuuuggugcaggugcugcauuacaaauaccauuugcuaugcaaauggcuuauagguuuaaugguauuggaguuacacagaauguucucuaugagaaccaaaaauugauugccaaccaauuuaauagugcuauuggcaaaauucaagacucacuuucuuccacagcaagugcacuuggaaaacuucaagauguggucaaccaaaaugcacaagcuuuaaacacgcuuguuaaacaacuuagcuccaauuuuggugcaauuucaaguguuuuaaaugauauccuuucacgucuugacaaaguugaggcugaagugcaaauugauagguugaucacaggcagacuucaaaguuugcagacauaugugacucaacaauuaauuagagcugcagaaaucagagcuucugcuaaucuugcugcuacuaaaaugucagaguguguacuuggacaaucaaaaagaguugauuuuuguggaaagggcuaucaucuuauguccuucccucagucagcaccucaugguguagucuucuugcaugugacuuaugucccugcacaagaaaagaacuucacaacugcuccugccauuugucaugauggaaaagcacacuuuccucgugaaggugucuuuguuucaaauggcacacacugguuuguaacacaaaggaauuuuuaugaaccacaaaucauuacuacagacaacacauuugugucugguaacugugauguuguaauaggaauugucaacaacacaguuuaugauccuuugcaaccugaauuagacucauucaaggaggaguuagauaaauauuuuaagaaucauacaucaccagauguugauuuaggugacaucucuggcauuaaugcuucaguuguaaacauucaaaaagaaauugaccgccucaaugagguugccaagaauuuaaaugaaucucucaucgaucuccaagaacuuggaaaguaugagcaguauauaaaauggccaugguacauuuggcuagguuuuauagcuggcuugauugccauaguaauggugacaauuaugcuuugcuguaugaccaguugcuguaguugucucaagggcuguuguucuuguggauccugcugcaaauuugaugaagacgacucugagccagugcucaaaggagucaaauuacauuacacauaa

SEQ ID NO: 11681 - RNA, 3822 nt, Artificial Sequence
  SARS-CoV-2/Hong Kong/case85_VM20002868/2020__EPI_ISL_414519 spike protein CDS wt (1-1273)
auguuuguuuuucuuguuuuagugccacuagucucuagucaguguguuaaucuuacaaccagaacucaauuacccccugcauacacuaauucuuucacacgugguguuuauuacccugacaaaguuuucagauccucaguuuuacauucaacucaggacuuguucuuaccuuucuuuuccaauguuacuugguuccaugcuauacaugucucugggaccaaugguacuaagagguuugauaacccuguccuaccauuuaaugaugguguuuauuuugcuuccacugagaagucuaacauaauaagaggcuggauuuuugguacuacuuuagauucgaagacccagucccuacuuauuguuaauaacgcuacuaauguuguuauuaaagucugugaauuucaauuuuguaaugauccauuuuuggguguuuauuaccacaaaaacaacaaaaguuggauggaaagugaguucagaguuuauucuagugcgaauaauugcacuuuugaauaugucucucagccuuuucuuauggaccuugaaggaaaacaggguaauuucaaaaaucuuagggaauuuguguuuaagaauauugaugguuauuuuaaaauauauucuaagcacacgccuauuaauuuagugcgugaucucccucaggguuuuucggcuuuagaaccauugguagauuugccaauagguauuaacaucacuagguuucaaacuuuacuugcuuuacauagaaguuauuugacuccuggugauucuucuucagguuggacagcuggugcugcagcuuauuauguggguuaucuucaaccuaggacuuuucuauuaaaauauaaugaaaauggaaccauuacagaugcuguagacugugcacuugacccucucucagaaacaaaguguacguugaaauccuucacuguagaaaaaggaaucuaucaaacuucuaacuuuagaguccaaccaacagaaucuauuguuagauuuccuaauauuacaaacuugugcccuuuuggugaaguuuuuaacgccaccagauuugcaucuguuuaugcuuggaacaggaagagaaucagcaacuguguugcugauuauucuguccuauauaauuccgcaucauuuuccacuuuuaaguguuauggagugucuccuacuaaauuaaaugaucucugcuuuacuaaugucuaugcagauucauuuguaauuagaggugaugaagucagacaaaucgcuccagggcaaacuggaaagauugcugauuauaauuauaaauuaccagaugauuuuacaggcugcguuauagcuuggaauucuaacaaucuugauucuaagguuggugguaauuauaauuaccuguauagauuguuuaggaagucuaaucucaaaccuuuugagagagauauuucaacugaaaucuaucaggccgguagcacaccuuguaaugguguugaagguuuuaauuguuacuuuccuuuacaaucauaugguuuccaacccacuaaugguguugguuaccaaccauacagaguaguaguacuuucuuuugaacuucuacaugcaccagcaacuguuuguggaccuaaaaagucuacuaauuugguuaaaaacaaaugugucaauuucaacuucaaugguuuaacaggcacagguguucuuacugagucuaacaaaaaguuucugccuuuccaacaauuuggcagagacauugcugacacuacugaugcuguccgugauccacagacacuugagauucuugacauuacaccauguucuuuugguggugucaguguuauaacaccaggaacaaauacuucuaaccagguugcuguucuuuaucaggauguuaacugcacagaagucccuguugcuauucaugcagaucaacuuacuccuacuuggcguguuuauucuacagguucuaauguuuuucaaacacgugcaggcuguuuaauaggggcugaacaugucaacaacucauaugagugugacauacccauuggugcagguauaugcgcuaguuaucagacucagacuaauucuccucggcgggcacguaguguagcuagucaauccaucauugccuacacuaugucacuuggugcagaaaauucaguugcuuacucuaauaacucuauugccauacccacaaauuuuacuauuaguguuaccacagaaauucuaccagugucuaugaccaagacaucaguagauuguacaauguacauuuguggugauucaacugaaugcagcaaucuuuuguugcaauauggcaguuuuuguacacaauuaaaccgugcuuuaacuggaauagcuguugaacaagacaaaaacacccaagaaguuuuugcacaagucaaacaaauuuacaaaacaccaccaauuaaagauuuuggugguuuuaauuuuucacaaauauuaccagauccaucaaaaccaagcaagaggucauuuauugaagaucuacuuuucaacaaagugacacuugcagaugcuggcuucaucaaacaauauggugauugccuuggugauauugcugcuagagaccucauuugugcacaaaaguuuaacggccuuacuguuuugccaccuuugcucacagaugaaaugauugcucaauacacuucugcacuguuagcggguacaaucacuucugguuggaccuuuggugcaggugcugcauuacaaauaccauuugcuaugcaaauggcuuauagguuuaaugguauuggaguuacacagaauguucucuaugagaaccaaaaauugauugccaaccaauuuaauagugcuauuggcaaaauucaagacucacuuucuuccacagcaagugcacuuggaaaacuucaagauguggucaaccaaaaugcacaagcuuuaaacacgcuuguuaaacaacuuagcuccaauuuuggugcaauuucaaguguuuuaaaugauauccuuucacgucuugacaaaguugaggcugaagugcaaauugauagguugaucacaggcagacuucaaaguuugcagacauaugugacucaacaauuaauuagagcugcagaaaucagagcuucugcuaaucuugcugcuacuaaaaugucagaguguguacuuggacaaucaaaaagaguugauuuuuguggaaagggcuaucaucuuauguccuucccucagucagcaccucaugguguagucuucuugcaugugacuuaugucccugcacaagaaaagaacuucacaacugcuccugccauuugucaugauggaaaagcacacuuuccucgugaaggugucuuuguuucaaauggcacacacugguuuguaacacaaaggaauuuuuaugaaccacaaaucauuacuacagacaacacauuugugucugguaacugugauguuguaauaggaauugucaacaacacaguuuaugauccuuugcaaccugaauuagacucauucaaggaggaguuagauaaauauuuuaagaaucauacaucaccagauguugauuuaggugacaucucuggcauuaaugcuucaguuguaaacauucaaaaagaaauugaccgccucaaugagguugccaagaauuuaaaugaaucucucaucgaucuccaagaacuuggaaaguaugagcaguauauaaaauggccaugguacauuuggcuagguuuuauagcuggcuugauugccauaguaauggugacaauuaugcuuugcuguaugaccaguugcuguaguugucucaagggcuguuguucuuguggauccugcugcaaauuugaugaagacgacucugagccagugcucaaaggagucaaauuacauuacacauaa

SEQ ID NO: 11682 - RNA, 3822 nt, Artificial Sequence
  SARS-CoV-2/England/200990660/2020__EPI_ISL_414523 spike protein CDS wt (1-1273)
auguuuguuuuucuuguuuuauugccacuagucucuagucaguguguuaaucuuacaaccagaacucaauuacccccugcauacacuaauucuuucacacgugguguuuauuacccugacaaaguuuucagauccucaguuuuacauucaacucaggacuuguucuuaccuuucuuuuccaauguuacuugguuccaugcuauacaugucucugggaccaaugguacuaagagguuugauaacccuguccuaccauuuaaugaugguguuuauuuugcuuccacugagaagucuaacauaauaagaggcuggauuuuugguacuacuuuagauucgaagacccagucccuacuuauuguuaauaacgcuacuaauguuguuauuaaagucugugaauuucaauuuuguaaugauccauuuuuggguguuuauuaccacaaaaacaacaaaaguuggauggaaagugaguucagaguuuauucuagugcgaauaauugcacuuuugaauaugucucucagccuuuucuuauggaccuugaaggaaaacaggguaauuucaaaaaucuuagggaauuuguguuuaagaauauugaugguuauuuuaaaauauauucuaagcacacgccuauuaauuuagugcgugaucucccucaggguuuuucggcuuuagaaccauugguagauuugccaauagguauuaacaucacuagguuucaaacuuuacuugcuuuacauagaaguuauuugacuccuggugauucuucuucagguuggacagcuggugcugcagcuuauuauguggguuaucuucaaccuaggacuuuucuauuaaaauauaaugaaaauggaaccauuacagaugcuguagacugugcacuugacccucucucagaaacaaaguguacguugaaauccuucacuguagaaaaaggaaucuaucaaacuucuaacuuuagaguccaaccaacagaaucuauuguuagauuuccuaauauuacaaacuugugcccuuuuggugaaguuuuuaacgccaccagauuugcaucuguuuaugcuuggaacaggaagagaaucagcaacuguguugcugauuauucuguccuauauaauuccgcaucauuuuccacuuuuaaguguuauggagugucuccuacuaaauuaaaugaucucugcuuuacuaaugucuaugcagauucauuuguaauuagaggugaugaagucagacaaaucgcuccagggcaaacuggaaagauugcugauuauaauuauaaauuaccagaugauuuuacaggcugcguuauagcuuggaauucuaacaaucuugauucuaagguuggugguaauuauaauuaccuguauagauuguuuaggaagucuaaucucaaaccuuuugagagagauauuucaacugaaaucuaucaggccgguagcacaccuuguaaugguguugaagguuuuaauuguuacuuuccuuuacaaucauaugguuuccaacccacuaaugguguugguuaccaaccauacagaguaguaguacuuucuuuugaacuucuacaugcaccagcaacuguuuguggaccuaaaaagucuacuaauuugguuaaaaacaaaugugucaauuucaacuucaaugguuuaacaggcacagguguucuuacugagucuaacaaaaaguuucugccuuuccaacaauuuggcagagacauugcugacacuacugaugcuguccgugauccacagacacuugagauucuugacauuacaccauguucuuuugguggugucaguguuauaacaccaggaacaaauacuucuaaccagguugcuguucuuuaucaggguguuaacugcacagaagucccuguugcuauucaugcagaucaacuuacuccuacuuggcguguuuauucuacagguucuaauguuuuucaaacacgugcaggcuguuuaauaggggcugaacaugucaacaacucauaugagugugacauacccauuggugcagguauaugcgcuaguuaucagacucagacuaauucuccucggcgggcacguaguguagcuagucaauccaucauugccuacacuaugucacuuggugcagaaaauucaguugcuuacucuaauaacucuauugccauacccacaaauuuuacuauuaguguuaccacagaaauucuaccagugucuaugaccaagacaucaguagauuguacaauguacauuuguggugauucaacugaaugcagcaaucuuuuguugcaauauggcaguuuuuguacacaauuaaaccgugcuuuaacuggaauagcuguugaacaagacaaaaacacccaagaaguuuuugcacaagucaaacaaauuuacaaaacaccaccaauuaaagauuuuggugguuuuaauuuuucacaaauauuaccagauccaucaaaaccaagcaagaggucauuuauugaagaucuacuuuucaacaaagugacacuugcagaugcuggcuucaucaaacaauauggugauugccuuggugauauugcugcuagagaccucauuugugcacaaaaguuuaacggccuuacuguuuugccaccuuugcucacagaugaaaugauugcucaauacacuucugcacuguuagcggguacaaucacuucugguuggaccuuuggugcaggugcugcauuacaaauaccauuugcuaugcaaauggcuuauagguuuaaugguauuggaguuacacagaauguucucuaugagaaccaaaaauugauugccaaccaauuuaauagugcuauuggcaaaauucaagacucacuuucuuccacagcaagugcacuuggaaaacuucaagauguggucaaccaaaaugcacaagcuuuaaacacgcuuguuaaacaacuuagcuccaauuuuggugcaauuucaaguguuuuaaaugauauccuuucacgucuugacaaaguugaggcugaagugcaaauugauagguugaucacaggcagacuucaaaguuugcagacauaugugacucaacaauuaauuagagcugcagaaaucagagcuucugcuaaucuugcugcuacuaaaaugucagaguguguacuuggacaaucaaaaagaguugauuuuuguggaaagggcuaucaucuuauguccuucccucagucagcaccucaugguguagucuucuugcaugugacuuaugucccugcacaagaaaagaacuucacaacugcuccugccauuugucaugauggaaaagcacacuuuccucgugaaggugucuuuguuucaaauggcacacacugguuuguaacacaaaggaauuuuuaugaaccacaaaucauuacuacagacaacacauuugugucugguaacugugauguuguaauaggaauugucaacaacacaguuuaugauccuuugcaaccugaauuagacucauucaaggaggaguuagauaaauauuuuaagaaucauacaucaccagauguugauuuaggugacaucucuggcauuaaugcuucaguuguaaacauucaaaaagaaauugaccgccucaaugagguugccaagaauuuaaaugaaucucucaucgaucuccaagaacuuggaaaguaugagcaguauauaaaauggccaugguacauuuggcuagguuuuauagcuggcuugauugccauaguaauggugacaauuaugcuuugcuguaugaccaguugcuguaguugucucaagggcuguuguucuuguggauccugcugcaaauuugaugaagacgacucugagcuagugcucaaaggagucaaauuacauuacacauaa

SEQ ID NO: 11683 - RNA, 3822 nt, Artificial Sequence
  SARS-CoV-2/Australia/NSW09/2020__EPI_ISL_413595 spike protein CDS wt (1-1273)
auguuuguuuuucuuguuuuauugccacuagucucuagucaguguguuaaucuuacaaccagaacucaauuacccccugcauacacuaauucuuucacacgugguguuuauuacccugacaaaguuuucagauccucaguuuuacauucaacucaggacuuguucuuaccuuucuuuuccaauguuacuugguuccaugcuauacaugucucugggaccaaugguacuaagagguuugauaacccuguccuaccauuuaaugaugguguuuauuuugcuuccacugagaagucuaacauaauaagaggcuggauuuuugguacuacuuuagauucgaagacccagucccuacuuauuguuaauaacgcuacuaauguuguuauuaaagucugugaauuucaauuuuguaaugauccauuuuuggguguuuauuaccacaaaaacaacaaaaguuggauggaaagugaguucagaguuuauucuagugcgaauaauugcacuuuugaauaugucucucagccuuuucuuauggaccuugaaggaaaacaggguaauuucaaaaaucuuagggaauuuguguuuaagaauauugaugguuauuuuaaaauauauucuaagcacacgccuauuaauuuagugcgugaucucccucaggguuuuucggcuuuagaaccauugguagauuugccaauagguauuaacaucacuagguuucaaacuuuacuugcuuuacauagaaguuauuugacuccuggugauucuucuucagguuggacagcuggugcugcagcuuauuauguggguuaucuucaaccuaggacuuuucuauuaaaauauaaugaaaauggaaccauuacagaugcuguagacugugcacuugacccucucucagaaacaaaguguacguugaaauccuucacuguagaaaaaggaaucuaucaaacuucuaacuuuagaguccaaccaacagaaucuauuguuagauuuccuaauauuacaaacuugugcccuuuuggugaaguuuuuaacgccaccagauuugcaucuguuuaugcuuggaacaggaagagaaucagcaacuguguugcugauuauucuguccuauauaauuccgcaucauuuuccacuuuuaaguguuauggagugucuccuacuaaauuaaaugaucucugcuuuacuaaugucuaugcagauucauuuguaauuagaggugaugaagucagacaaaucgcuccagggcaaacuggaaagauugcugauuauaauuauaaauuaccagaugauuuuacaggcugcguuauagcuuggaauucuaacaaucuugauucuaagguuggugguaauuauaauuaccuguauagauuguuuaggaagucuaaucucaaaccuuuugagagagauauuucaacugaaaucuaucaggccgguagcacaccuuguaaugguguugaagguuuuaauuguuacuuuccuuuacaaucauaugguuuccaacccacuaaugguguugguuaccaaccauacagaguaguaguacuuucuuuugaacuucuacaugcaccagcaacuguuuguggaccuaaaaagucuacuaauuugguuaaaaacaaaugugucaauuucaacuucaaugguuuaacaggcacagguguucuuacugagucuaacaaaaaguuucugccuuuccaacaauuuggcagagacauugcugacacuacugaugcuguccgugauccacagacacuugagauucuugacauuacaccauguucuuuugguggugucaguguuauaacaccaggaacaaauacuucuaaccagguugcuguucuuuaucaggauguuaacugcacagaagucccuguugcuauucaugcagaucaacuuacuccuacuuggcguguuuauucuacagguucuaauguuuuucaaacacgugcaggcuguuuaauaggggcugaacaugucaacaacucauaugagugugacauacccauuggugcagguauaugcgcuaguuaucagacucagacuaauucuccucggcgggcacguaguguagcuagucaauccaucauugccuacacuaugucacuuggugcagaaaauucaguugcuuacucuaauaacucuauugccauacccacaaauuuuacuauuaguguuaccacagaaauucuaccagugucuaugaccaagacaucaguagauuguacaauguacauuuguggugauucaacugaaugcagcaaucuuuuguugcaauauggcaguuuuuguacacaauuaaaccgugcuuuaacuggaauagcuguugaacaagacaaaaacacccaagaaguuuuugcacaagucaaacaaauuuacaaaacaccaccaauuaaagauuuuggugguuuuaauuuuucacaaauauuaccagauccaucaaaaccaagcaagaggucauuuauugaagaucuacuuuucaacaaagugacacuugcagaugcuggcuucaucaaacaauauggugauugccuuggugauauugcugcuagagaccucauuugugcacaaaaguuuaacggccuuacuguuuugccaccuuugcucacagaugaaaugauugcucaauacacuucugcacuguuagcggguacaaucacuucugguuggaccuuuggugcaggugcugcauuacaaauaccauuugcuaugcaaauggcuuauagguuuaaugguauuggaguuacacagaauguucucuaugagaaccaaaaauugauugccaaccaauuuaauagugcuauuggcaaaauucaagacucacuuucuuucacagcaagugcacuuggaaaacuucaagauguggucaaccaaaaugcacaagcuuuaaacacgcuuguuaaacaacuuagcuccaauuuuggugcaauuucaaguguuuuaaaugauauccuuucacgucuugacaaaguugaggcugaagugcaaauugauagguugaucacaggcagacuucaaaguuugcagacauaugugacucaacaauuaauuagagcugcagaaaucagagcuucugcuaaucuugcugcuacuaaaaugucagaguguguacuuggacaaucaaaaagaguugauuuuuguggaaagggcuaucaucuuauguccuucccucagucagcaccucaugguguagucuucuugcaugugacuuaugucccugcacaagaaaagaacuucacaacugcuccugccauuugucaugauggaaaagcacacuuuccucgugaaggugucuuuguuucaaauggcacacacugguuuguaacacaaaggaauuuuuaugaaccacaaaucauuacuacagacaacacauuugugucugguaacugugauguuguaauaggaauugucaacaacacaguuuaugauccuuugcaaccugaauuagacucauucaaggaggaguuagauaaauauuuuaagaaucauacaucaccagauguugauuuaggugacaucucuggcauuaaugcuucaguuguaaacauucaaaaagaaauugaccgccucaaugagguugccaagaauuuaaaugaaucucucaucgaucuccaagaacuuggaaaguaugagcaguauauaaaauggccaugguacauuuggcuagguuuuauagcuggcuugauugccauaguaauggugacaauuaugcuuugcuguaugaccaguugcuguaguugucucaagggcuguuguucuuguggauccugcugcaaauuugaugaagacgacucugagccagugcucaaaggagucaaauuacauuacacauaa

SEQ ID NO: 11684 - RNA, 3822 nt, Artificial Sequence
  SARS-CoV-2/Australia/NSW10/2020__EPI_ISL_413596 spike protein CDS wt (1-1273)
auguuuguuuuucuuguuuuauugccacuagucucuagucaguguguuaaucuuacaaccagaacucaauuacccccugcauacacuaauucuuucacacgugguguuuauuacccugacaaaguuuucagauccucaguuuuacauucaacucaggacuuguucuuaccuuucuuuuccaauguuacuugguuccaugcuauacaugucucugggaccaaugguacuaagagguuugauaacccuguccuaccauuuaaugaugguguuuauuuugcuuccacugagaagucuaacauaauaagaggcuggauuuuugguacuacuuuagauucgaagacccagucccuacuuauuguuaauaacgcuacuaauguuguuauuaaagucugugaauuucaauuuuguaaugauccauuuuuggguguuuauuaccacaaaaacaacaaaaguuggauggaaagugaguucagaguuuauucuagugcgaauaauugcacuuuugaauaugucucucagccuuuucuuauggaccuugaaggaaaacaggguaauuucaaaaaucuuagggaauuuguguuuaagaauauugaugguuauuuuaaaauauauucuaagcacacgccuauuaauuuagugcgugaucucccucaggguuuuucggcuuuagaaccauugguagauuugccaauagguauuaacaucacuagguuucaaacuuuacuugcuuuacauagaaguuauuugacuccuggugauucuucuucagguuggacagcuggugcugcagcuuauuauguggguuaucuucaaccuaggacuuuucuauuaaaauauaaugaaaauggaaccauuacagaugcuguagacugugcacuugacccucucucagaaacaaaguguacguugaaauccuucacuguagaaaaaggaaucuaucaaacuucuaacuuuagaguccaaccaacagaaucuauuguuagauuuccuaauauuacaaacuugugcccuuuuggugaaguuuuuaacgccaccagauuugcaucuguuuaugcuuggaacaggaagagaaucagcaacuguguugcugauuauucuguccuauauaauuccgcaucauuuuccacuuuuaaguguuauggagugucuccuacuaaauuaaaugaucucugcuuuacuaaugucuaugcagauucauuuguaauuagaggugaugaagucagacaaaucgcuccagggcaaacuggaaagauugcugauuauaauuauaaauuaccagaugauuuuacaggcugcguuauagcuuggaauucuaacaaucuugauucuaagguuggugguaauuauaauuaccuguauagauuguuuaggaagucuaaucucaaaccuuuugagagagauauuucaacugaaaucuaucaggccgguagcacaccuuguaaugguguugaagguuuuaauuguuacuuuccuuuacaaucauaugguuuccaacccacuaaugguguugguuaccaaccauacagaguaguaguacuuucuuuugaacuucuacaugcaccagcaacuguuuguggaccuaaaaagucuacuaauuugguuaaaaacaaaugugucaauuucaacuucaaugguuuaacaggcacagguguucuuacugagucuaacaaaaaguuucugccuuuccaacaauuuggcagagacauugcugacacuacugaugcuguccgugauccacagacacuugagauucuugacauuacaccauguucuuuugguggugucaguguuauaacaccaggaacaaauacuucuaaccagguugcuguucuuuaucaggauguuaacugcacagaagucccuguugcuauucaugcagaucaacuuacuccuacuuggcguguuuauucuacagguucuaauguuuuucaaacacgugcaggcuguuuaauaggggcugaacaugucaacaacucauaugagugugacauacccauuggugcagguauaugcgcuaguuaucagacucagacuaauucuccucggcgggcacguaguguagcuagucaauccaucauugccuacacuaugucacuuggugcagaaaauucaguugcuuacucuaauaacucuauugccauacccacaaauuuuacuauuaguguuaccacagaaauucuaccagugucuaugaccaagacaucaguagauuguacaauguacauuuguggugauucaacugaaugcagcaaucuuuuguugcaauauggcaguuuuuguacacaauuaaaccgugcuuuaacuggaauagcuguugaacaagacaaaaacacccaagaaguuuuugcacaagucaaacaaauuuacaaaacaccaccaauuaaagauuuuggugguuuuaauuuuucacaaauauuaccagauccaucaaaaccaagcaagaggucauuuauugaagaucuacuuuucaacaaagugacacuugcagaugcuggcuucaucaaacaauauggugauugccuuggugauauugcugcuagagaccucauuugugcacaaaaguuuaacggccuuacuguuuugccaccuuugcucacagaugaaaugauugcucaauacacuucugcacuguuagcggguacaaucacuucugguuggaccuuuggugcaggugcugcauuacaaauaccauuugcuaugcaaauggcuuauagguuuaaugguauuggaguuacacagaauguucucuaugagaaccaaaaauugauugccaaccaauuuaauagugcuauuggcaaaauucaagacucacuuucuuccacagcaagugcacuuggaaaacuucaagauguggucaaccaaaaugcacaagcuuuaaacacgcuuguuaaacaacuuagcuccaauuuuggugcaauuucaaguguuuuaaaugauauccuuucacgucuugacaaaguugaggcugaagugcaaauugauagguugaucacaggcagacuucaaaguuugcagacauaugugacucaacaauuaauuagagcugcagaaaucagagcuucugcuaaucuugcugcuacuaaaaugucagaguguguacuuggacaaucaaaaagaguugauuuuuguggaaagggcuaucaucuuauguccuucccucagucagcaccucaugguguagucuucuugcaugugacuuaugucccugcacaagaaaagaacuucacaacugcuccugccauuugucaugauggaaaagcacacuuuccucgugaaggugucuuuguuucaaauggcacacacugguuuguaacacaaaggaauuuuuaugaaccacaaaucauuacuacagacaacacauuugugucugguaacugugauguuguaauaggaauugucaacaacacaguuuaugauccuuugcaaccugaauuagacucauucaaggaggaguuagauaaauauuuuaagaaucauacaucaccagauguugauuuaggugacaucucuggcauuaaugcuucaguuguaaacauucaaaaagaaauugaccgccucaaugagguugccaagaauuuaaaugaaucucucaucgaucuccaagaacuuggaaaguaugagcaguauauaaaauggccaugguacauuuggcuagguuuuauagcuggcuugauugccauaguaauggugacaauuaugcuuugcuguaugaccaguugcuguaguugucucaagggcuguuguucuuguggauccugcuucaaauuugaugaagacgacucugagccagugcucaaaggagucaaauuacauuacacauaa

SEQ ID NO: 11685 - RNA, 3822 nt, Artificial Sequence
  SARS-CoV-2/Switzerland/1000477797/2020__EPI_ISL_413023 spike protein CDS wt (1-1273)
auguuuguuuuucuuguuuuauugccacuagucucuagucaguguguuaaucuuacaaccagaacucaauuacccccugcauacacuaauucuuucacacgugguguuuauuacccugacaaaguuuucagauccucaguuuuacauucaacucaggacuuguucuuaccuuucuuuuccaauguuacuugguuccaugcuauacaugucucugggaccaaugguacuaagagguuugauaacccuguccuaccauuuaaugaugguguuuauuuugcuuccacugagaagucuaacauaauaagaggcuggauuuuugguacuacuuuagauucgaagacccagucccuacuuauuguuaauaacgcuacuaauguuguuauuaaagucugugaauuucaauuuuguaaugauccauuuuuggguguuuauuaccacaaaaacaacaaaaguuggauggaaagugaguucagaguuuauucuagugcgaauaauugcacuuuugaauaugucucucagccuuuucuuauggaccuugaaggaaaacaggguaauuucaaaaaucuuagggaauuuguguuuaagaauauugaugguuauuuuaacauauauucuaagcacacgccuauuaauuuagugcgugaucucccucaggguuuuucggcuuuagaaccauugguagauuugccaauagguauuaacaucacuagguuucaaacuuuacuugcuuuacauagaaguuauuugacuccuggugauucuucuucagguuggacagcuggugcugcagcuuauuauguggguuaucuucaaccuaggacuuuucuauuaaaauauaaugaaaauggaaccauuacagaugcuguagacugugcacuugacccucucucagaaacaaaguguacguugaaauccuucacuguagaaaaaggaaucuaucaaacuucuaacuuuagaguccaaccaacagaaucuauuguuagauuuccuaauauuacaaacuugugcccuuuuggugaaguuuuuaacgccaccagauuugcaucuguuuaugcuuggaacaggaagagaaucagcaacuguguugcugauuauucuguccuauauaauuccgcaucauuuuccacuuuuaaguguuauggagugucuccuacuaaauuaaaugaucucugcuuuacuaaugucuaugcagauucauuuguaauuagaggugaugaagucagacaaaucgcuccagggcaaacuggaaagauugcugauuauaauuauaaauuaccagaugauuuuacaggcugcguuauagcuuggaauucuaacaaucuugauucuaagguuggugguaauuauaauuaccuguauagauuguuuaggaagucuaaucucaaaccuuuugagagagauauuucaacugaaaucuaucaggccgguagcacaccuuguaaugguguugaagguuuuaauuguuacuuuccuuuacaaucauaugguuuccaacccacuaaugguguugguuaccaaccauacagaguaguaguacuuucuuuugaacuucuacaugcaccagcaacuguuuguggaccuaaaaagucuacuaauuugguuaaaaacaaaugugucaauuucaacuucaaugguuuaacaggcacagguguucuuacugagucuaacaaaaaguuucugccuuuccaacaauuuggcagagacauugcugacacuacugaugcuguccgugauccacagacacuugagauucuugacauuacaccauguucuuuugguggugucaguguuauaacaccaggaacaaauacuucuaaccagguugcuguucuuuaucaggguguuaacugcacagaagucccuguugcuauucaugcagaucaacuuacuccuacuuggcguguuuauucuacagguucuaauguuuuucaaacacgugcaggcuguuuaauaggggcugaacaugucaacaacucauaugagugugacauacccauuggugcagguauaugcgcuaguuaucagacucagacuaauucuccucggcgggcacguaguguagcuagucaauccaucauugccuacacuaugucacuuggugcagaaaauucaguugcuuacucuaauaacucuauugccauacccacaaauuuuacuauuaguguuaccacagaaauucuaccagugucuaugaccaagacaucaguagauuguacaauguacauuuguggugauucaacugaaugcagcaaucuuuuguugcaauauggcaguuuuuguacacaauuaaaccgugcuuuaacuggaauagcuguugaacaagacaaaaacacccaagaaguuuuugcacaagucaaacaaauuuacaaaacaccaccaauuaaagauuuuggugguuuuaauuuuucacaaauauuaccagauccaucaaaaccaagcaagaggucauuuauugaagaucuacuuuucaacaaagugacacuugcagaugcuggcuucaucaaacaauauggugauugccuuggugauauugcugcuagagaccucauuugugcacaaaaguuuaacggccuuacuguuuugccaccuuugcucacagaugaaaugauugcucaauacacuucugcacuguuagcggguacaaucacuucugguuggaccuuuggugcaggugcugcauuacaaauaccauuugcuaugcaaauggcuuauagguuuaaugguauuggaguuacacagaauguucucuaugagaaccaaaaauugauugccaaccaauuuaauagugcuauuggcaaaauucaagacucacuuucuuccacagcaagugcacuuggaaaacuucaagauguggucaaccaaaaugcacaagcuuuaaacacgcuuguuaaacaacuuagcuccaauuuuggugcaauuucaaguguuuuaaaugauauccuuucacgucuugacaaaguugaggcugaagugcaaauugauagguugaucacaggcagacuucaaaguuugcagacauaugugacucaacaauuaauuagagcugcagaaaucagagcuucugcuaaucuugcugcuacuaaaaugucagaguguguacuuggacaaucaaaaagaguugauuuuuguggaaagggcuaucaucuuauguccuucccucagucagcaccucaugguguagucuucuugcaugugacuuaugucccugcacaagaaaagaacuucacaacugcuccugccauuugucaugauggaaaagcacacuuuccucgugaaggugucuuuguuucaaauggcacacacugguuuguaacacaaaggaauuuuuaugaaccacaaaucauuacuacagacaacacauuugugucugguaacugugauguuguaauaggaauugucaacaacacaguuuaugauccuuugcaaccugaauuagacucauucaaggaggaguuagauaaauauuuuaagaaucauacaucaccagauguugauuuaggugacaucucuggcauuaaugcuucaguuguaaacauucaaaaagaaauugaccgccucaaugagguugccaagaauuuaaaugaaucucucaucgaucuccaagaacuuggaaaguaugagcaguauauaaaauggccaugguacauuuggcuagguuuuauagcuggcuugauugccauaguaauggugacaauuaugcuuugcuguaugaccaguugcuguaguugucucaagggcuguuguucuuguggauccugcugcaaauuugaugaagacgacucugagccagugcucaaaggagucaaauuacauuacacauaa

SEQ ID NO: 11686 - RNA, 3822 nt, Artificial Sequence
  SARS-CoV-2/Belgium/BA-02291/2020__EPI_ISL_415159 spike protein CDS wt (1-1273)
auguuuguuuuucuuguuuuauugccacuagucucuagucaguguguuaaucuuacaaccagaacucaauuacccccugcauacacuaauucuuucacacgugguguuuauuacccugacaaaguuuucagauccucaguuuuacauucaacucaggacuuguucuuaccuuucuuuuccaauguuacuugguuccaugcuauacaugucucugggaccaaugguacuaagagguuugauaacccuguccuaccauuuaaugaugguguuuauuuugcuuccacugagaagucuaacauaauaagaggcuggauuuuugguacuacuuuagauucgaagacccagucccuacuuauuguuaauaacgcuacuaauguuguuauuaaagucugugaauuucaauuuuguaaugauccauuuuuggguguuuauuaccacaaaaacaacaaaaguuggauggaaagugaguucagaguuuauucuagugcgaauaauugcacuuuugaauaugucucucagccuuuucuuauggaccuugaaggaaaacaggguaauuucaaaaaucuuagggaauuuguguuuaagaauauugaugguuauuuuaaaauauauucuaagcacacgccuauuaauuuagugcgugaucucccucaggguuuuucggcuuuagaaccauugguagauuugccaauagguauuaacaucacuagguuucaaacuuuacuugcuuuacauagaaguuauuugacuccuggugauucuucuucagguuggacagcuggugcugcagcuuauuauguggguuaucuucaaccuaggacuuuucuauuaaaauauaaugaaaauggaaccauuacagaugcuguagacugugcacuugacccucucucagaaacaaaguguacguugaaauccuucacuguagaaaaaggaaucuaucaaacuucuaacuuuagaguccaaccaacagaaucuauuguuagauuuccuaauauuacaaacuugugcccuuuuggugaaguuuuuaacgccaccagauuugcaucuguuuaugcuuggaacaggaagagaaucagcaacuguguugcugauuauucuguccuauauaauuccgcaucauuuuccacuuuuaaguguuauggagugucuccuacuaaauuaaaugaucucugcuuuacuaaugucuaugcagauucauuuguaauuagaggugaugaagucagacaaaucgcuccagggcaaacuggaaagauugcugauuauaauuauaaauuaccagaugauuuuacaggcugcguuauagcuuggaauucuaacaaucuugauucuaagguuggugguaauuauaauuaccuguauagauuguuuaggaggucuaaucucaaaccuuuugagagagauauuucaacugaaaucuaucaggccgguagcacaccuuguaaugguguugaagguuuuaauuguuacuuuccuuuacaaucauaugguuuccaacccacuaaugguguugguuaccaaccauacagaguaguaguacuuucuuuugaacuucuaccugcaccagcaacuguuuguggaccuaaaaagucuacuaauuugguuaaaaacaaaugugucaauuucaacuucaaugguuuaacaggcacagguguucuuacugagucuaacaaaaaguuucugccuuuccaacaauuuggcagagacauugcugacacuacugaugcuguccgugauccacagacacuugagauucuugacauuacaccauguucuuuugguggugucaguguuauaacaccaggaacaaauacuucuaaccagguugcuguucuuuaucaggguguuaacugcacagaagucccuguugcuauucaugcagaucaacuuacuccuacuuggcguguuuauucuacagguucuaauguuuuucaaacacgugcaggcuguuuaauaggggcugaacaugucaacaacucauaugagugugacauacccauuggugcagguauaugcgcuaguuaucagacucagacuaauucuccucggcgggcacguaguguagcuagucaauccaucauugccuacacuaugucacuuggugcagaaaauucaguugcuuacucuaauaacucuauugccauacccacaaauuuuacuauuaguguuaccacagaaauucuaccagugucuaugaccaagacaucaguagauuguacaauguacauuuguggugauucaacugaaugcagcaaucuuuuguugcaauauggcaguuuuuguacacaauuaaaccgugcuuuaacuggaauagcuguugaacaagacaaaaacacccaagaaguuuuugcacaagucaaacaaauuuacaaaacaccaccaauuaaagauuuuggugguuuuaauuuuucacaaauauuaccagauccaucaaaaccaagcaagaggucauuuauugaagaucuacuuuucaacaaagugacacuugcagaugcuggcuucaucaaacaauauggugauugccuuggugauauugcugcuagagaccucauuugugcacaaaaguuuaacggccuuacuguuuugccaccuuugcucacagaugaaaugauugcucaauacacuucugcacuguuagcggguacaaucacuucugguuggaccuuuggugcaggugcugcauuacaaauaccauuugcuaugcaaauggcuuauagguuuaaugguauuggaguuacacagaauguucucuaugagaaccaaaaauugauugccaaccaauuuaauagugcuauuggcaaaauucaagacucacuuucuucugcagcaccugcacuuggaaaacuucaagauguggucaaccaaaaugcacaagcuuuaaacacgcuuguuaaacaacuuagcuccaauuuuggugcaauuucaaguguuuuaaaugauauccuuucacgucuugacaaaguugaggcugaagugcaaauugauagguugaucacaggcagacuucaaaguuugcagacauaugugacucaacaauuaauuagagcugcagaaaucagagcuucugcuaaucuugcugcuacuaaaaugucagaguguguacuuggacaaucaaaaagaguugauuuuuguggaaagggcuaucaucuuauguccuucccucagucagcaccucaugguguagucuucuugcaugugacuuaugucccugcacaagaaaagaacuucacaacugcuccugccauuugucaugauggaaaagcacacuuuccucgugaaggugucuuuguuucaaauggcacacacugguuuguaacacaaaggaauuuuuaugaaccacaaaucauuacuacagacaacacauuugugucugguaacugugauguuguaauaggaauugucaacaacacaguuuaugauccuuugcaaccugaauuagacucauucaaggaggaguuagauaaauauuuuaagaaucauacaucaccagauguugauuuaggugacaucucuggcauuaaugcuucaguuguaaacauucaaaaagaaauugaccgccucaaugagguugccaagaauuuaaaugaaucucucaucgaucuccaagaacuuggaaaguaugagcaguauauaaaauggccaugguacauuuggcuagguuuuauagcuggcuugauugccauaguaauggugacaauuaugcuuugcuguaugaccaguugcuguaguugucucaagggcuguuguucuuguggauccugcugcaaauuugaugaagacgacucugagccagugcucaaaggagucaaauuacauuacacauaa

SEQ ID NO: 11687 - RNA, 3822 nt, Artificial Sequence
  SARS-CoV-2/USA/WA8-UW5/2020__EPI_ISL_413486 spike protein CDS wt (1-1273)
auguuuguuuuucuuguuuuauugccacuagucucuagucaguguguuaaucuuacaaccagaacucaauuacccccugcauacacuaauucuuucacacgugguguuuauuacccugacaaaguuuucagauccucaguuuuacauucaacucaggacuuguucuuaccuuucuuuuccaauguuacuugguuccaugcuauacaugucucugggaccaaugguacuaagagguuugauaacccuguccuaccauuuaaugaugguguuuauuuugcuuccacugagaagucuaacauaauaagaggcuggauuuuugguacuacuuuagauucgaagacccagucccuacuuauuguuaauaacgcuacuaauguuguuauuaaagucugugaauuucaauuuuguaaugauccauuuuuggguguuuauuaccacaaaaacaacaaaaguuggauggaaagugaguucagaguuuauucuagugcgaauaauugcacuuuugaauaugucucucagccuuuucuuauggaccuugaaggaaaacaggguaauuucaaaaaucuuagggaauuuguguuuaagaauauugaugguuauuuuaaaauauauucuaagcacacgccuauuaauuuagugcgugaucucccucaggguuuuucggcuuuagaaccauugguagauuugccaauagguauuaacaucacuagguuucaaacuuuacuugcuuuacauagaaguuauuugacuccuggugauucuucuucagguuggacagcuggugcugcagcuuauuauguggguuaucuucaaccuaggacuuuucuauuaaaauauaaugaaaauggaaccauuacagaugcuguagacugugcacuugacccucucucagaaacaaaguguacguugaaauccuucacuguagaaaaaggaaucuaucaaacuucuaacuuuagaguccaaccaacagaaucuauuguuagauuuccuaauauuacaaacuugugcccuuuuggugaaguuuuuaacgccaccagauuugcaucuguuuaugcuuggaacaggaagagaaucagcaacuguguugcugauuauucuguccuauauaauuccgcaucauuuuccacuuuuaaguguuauggagugucuccuacuaaauuaaaugaucucugcuuuacuaaugucuaugcagauucauuuguaauuagaggugaugaagucagacaaaucgcuccagggcaaacuggaaagauugcugauuauaauuauaaauuaccagaugauuuuacaggcugcguuauagcuuggaauucuaacaaucuugauucuaagguuggugguaauuauaauuaccuguauagauuguuuaggaagucuaaucucaaaccuuuugagagagauauuucaacugaaaucuaucaggccgguagcacaccuuguaaugguguugaagguuuuaauuguuacuuuccuuuacaaucauaugguuuccaacccacuaaugguguugguuaccaaccauacagaguaguaguacuuucuuuugaacuucuacaugcaccagcaacuguuuguggaccuaaaaagucuacuaauuugguuaaaaacaaaugugucaauuucaacuucaaugguuuaacaggcacagguguucuuacugagucuaacaaaaaguuucugccuuuccaacaauuuggcagagacauugcugacacuacugaugcuguccgugauccacagacacuugagauucuugacauuacaccauguucuuuugguggugucaguguuauaacaccaggaacaaauacuucuaaccagguugcuguucuuuaucaggauguuaacugcacagaagucccuguugcuauucaugcagaucaacuuacuccuacuuggcguguuuauucuacagguucuaauguuuuucaaacacgugcaggcuguuuaauaggggcugaauaugucaacaacucauaugagugugacauacccauuggugcagguauaugcgcuaguuaucagacucagacuaauucuccucggcgggcacguaguguagcuagucaauccaucauugccuacacuaugucacuuggugcagaaaauucaguugcuuacucuaauaacucuauugccauacccacaaauuuuacuauuaguguuaccacagaaauucuaccagugucuaugaccaagacaucaguagauuguacaauguacauuuguggugauucaacugaaugcagcaaucuuuuguugcaauauggcaguuuuuguacacaauuaaaccgugcuuuaacuggaauagcuguugaacaagacaaaaacacccaagaaguuuuugcacaagucaaacaaauuuacaaaacaccaccaauuaaagauuuuggugguuuuaauuuuucacaaauauuaccagauccaucaaaaccaagcaagaggucauuuauugaagaucuacuuuucaacaaagugacacuugcagaugcuggcuucaucaaacaauauggugauugccuuggugauauugcugcuagagaccucauuugugcacaaaaguuuaacggccuuacuguuuugccaccuuugcucacagaugaaaugauugcucaauacacuucugcacuguuagcggguacaaucacuucugguuggaccuuuggugcaggugcugcauuacaaauaccauuugcuaugcaaauggcuuauagguuuaaugguauuggaguuacacagaauguucucuaugagaaccaaaaauugauugccaaccaauuuaauagugcuauuggcaaaauucaagacucacuuucuuccacagcaagugcacuuggaaaacuucaagauguggucaaccaaaaugcacaagcuuuaaacacgcuuguuaaacaacuuagcuccaauuuuggugcaauuucaaguguuuuaaaugauauccuuucacgucuugacaaaguugaggcugaagugcaaauugauagguugaucacaggcagacuucaaaguuugcagacauaugugacucaacaauuaauuagagcugcagaaaucagagcuucugcuaaucuugcugcuacuaaaaugucagaguguguacuuggacaaucaaaaagaguugauuuuuguggaaagggcuaucaucuuauguccuucccucagucagcaccucaugguguagucuucuugcaugugacuuaugucccugcacaagaaaagaacuucacaacugcuccugccauuugucaugauggaaaagcacacuuuccucgugaaggugucuuuguuucaaauggcacacacugguuuguaacacaaaggaauuuuuaugaaccacaaaucauuacuacagacaacacauuugugucugguaacugugauguuguaauaggaauugucaacaacacaguuuaugauccuuugcaaccugaauuagacucauucaaggaggaguuagauaaauauuuuaagaaucauacaucaccagauguugauuuaggugacaucucuggcauuaaugcuucaguuguaaacauucaaaaagaaauugaccgccucaaugagguugccaagaauuuaaaugaaucucucaucgaucuccaagaacuuggaaaguaugagcaguauauaaaauggccaugguacauuuggcuagguuuuauagcuggcuugauugccauaguaauggugacaauuaugcuuugcuguaugaccaguugcuguaguugucucaagggcuguuguucuuguggauccugcugcaaauuugaugaagacgacucugagccagugcucaaaggagucaaauuacauuacacauaa

SEQ ID NO: 11688 - RNA, 3822 nt, Artificial Sequence
  SARS-CoV-2/England/20102000506/2020__EPI_ISL_415147 spike protein CDS wt (1-1273)
auguuuguuuuucuuguuuuauugccacuagucucuagucaguguguuaaucuuacaaccagaacucaauuacccccugcauacacuaauucuuucacacgugguguuuauuacccugacaaaguuuucagauccucaguuuuacauucaacucaggacuuguucuuaccuuucuuuuccaauguuacuugguuccaugcuauacaugucucugggaccaaugguacuaagagguuugauaacccuguccuaccauuuaaugaugguguuuauuuugcuuccacugagaagucuaacauaauaagaggcuggauuuuugguacuacuuuagauucgaagacccagucccuacuuauuguuaauaacgcuacuaauguuguuauuaaagucugugaauuucaauuuuguaaugauccauuuuuggguguuuauuaccacaaaaacaacaaaaguuggauggaaagugaguucagaguuuauucuagugcgaauaauugcacuuuugaauaugucucucagccuuuucuuauggaccuugaaggaaaacaggguaauuucaaaaaucuuagggaauuuguguuuaagaauauugaugguuauuuuaaaauauauucuaagcacacgccuauuaauuuagugcgugaucucccucaggguuuuucggcuuuagaaccauugguagauuugccaauagguauuaacaucacuagguuucaaacuuuacuugcuuuacauagaaguuauuugacuccuggugauucuucuucagguuggacagcuggugcugcagcuuauuauguggguuaucuucaaccuaggacuuuucuauuaaaauauaaugaaaauggaaccauuacagaugcuguagacugugcacuugacccucucucagaaacaaaguguacguugaaauccuucacuguagaaaaaggaaucuaucaaacuucuaacuuuagaguccaaccaacagaaucuauuguuagauuuccuaauauuacaaacuugugcccuuuuggugaaguuuuuaacgccaccagauuugcaucuguuuaugcuuggaacaggaagagaaucagcaacuguguugcugauuauucuguccuauauaauuccgcaucauuuuccacuuuuaaguguuauggagugucuccuacuaaauuaaaugaucucugcuuuacuaaugucuaugcagauucauuuguaauuagaggugaugaagucagacaaaucgcuccagggcaaacuggaaagauugcugauuauaauuauaaauuaccagaugauuuuacaggcugcguuauagcuuggaauucuaacaaucuugauucuaagguuggugguaauuauaauuaccuguauagauuguuuaggaagucuaaucucaaaccuuuugagagagauauuucaacugaaaucuaucaggccgguagcacaccuuguaaugguguugaagguuuuaauuguuacuuuccuuuacaaucauaugguuuccaacccacuaaugguguugguuaccaaccauacagaguaguaguacuuucuuuugaacuucuacaugcaccagcaacuguuuguggaccuaaaaagucuacuaauuugguuaaaaacaaaugugucaauuucaacuucaaugguuuaacaggcacagguguucuuacugagucuaacaaaaaguuucugccuuuccaacaauuuggcagagacauugcugacacuacugaugcuguccgugauccacagacacuugagauucuugacauuacaccauguucuuuugguggugucaguguuauaacaccaggaacaaauacuucuaaccagguugcuguucuuuaucaggguguuaacugcacagaagucccuguugcuauucaugcagaucaacuuacuccuacuuggcguguuuauucuacagguucuaauguuuuucaaacacgugcaggcuguuuaauaggggcugaacaugucaacaacucauaugagugugacauacccauuggugcagguauaugcgcuaguuaucagacucagacuaauucuccucggcgggcacguaguguagcuagucaauccaucauugccuacacuaugucacuuggugcagaaaauucaguugcuuacucuaauaacucuauugccauacccacaaauuuuacuauuaguguuaccacagaaauucuaccagugucuaugaccaagacaucaguagauuguacaauguacauuuguggugauucaacugaaugcagcaaucuuuuguugcaauauggcaguuuuuguacacaauuaaaccgugcuuuaacuggaauagcuguugaacaagacaaaaacacccaagaaguuuuugcacaagucaaacaaauuuacaaaacaccaccaauuaaagauuuuggugguuuuaauuuuucacaaauauuaccagauccaucaaaaccaagcaagaggucauuuauugaagaucuacuuuucaacaaagugacacuugcagaugcuggcuucaucaaacaauaugguuauugccuuggugauauugcugcuagagaccucauuugugcacaaaaguuuaacggccuuacuguuuugccaccuuugcucacagaugaaaugauugcucaauacacuucugcacuguuagcggguacaaucacuucugguuggaccuuuggugcaggugcugcauuacaaauaccauuugcuaugcaaauggcuuauagguuuaaugguauuggaguuacacagaauguucucuaugagaaccaaaaauugauugccaaccaauuuaauagugcuauuggcaaaauucaagacucacuuucuuccacagcaagugcacuuggaaaacuucaagauguggucaaccaaaaugcacaagcuuuaaacacgcuuguuaaacaacuuagcuccaauuuuggugcaauuucaaguguuuuaaaugauauccuuucacgucuugacaaaguugaggcugaagugcaaauugauagguugaucacaggcagacuucaaaguuugcagacauaugugacucaacaauuaauuagagcugcagaaaucagagcuucugcuaaucuugcugcuacuaaaaugucagaguguguacuuggacaaucaaaaagaguugauuuuuguggaaagggcuaucaucuuauguccuucccucagucagcaccucaugguguagucuucuugcaugugacuuaugucccugcacaagaaaagaacuucacaacugcuccugccauuugucaugauggaaaagcacacuuuccucgugaaggugucuuuguuucaaauggcacacacugguuuguaacacaaaggaauuuuuaugaaccacaaaucauuacuacagacaacacauuugugucugguaacugugauguuguaauaggaauugucaacaacacaguuuaugauccuuugcaaccugaauuagacucauucaaggaggaguuagauaaauauuuuaagaaucauacaucaccagauguugauuuaggugacaucucuggcauuaaugcuucaguuguaaacauucaaaaagaaauugaccgccucaaugagguugccaagaauuuaaaugaaucucucaucgaucuccaagaacuuggaaaguaugagcaguauauaaaauggccaugguacauuuggcuagguuuuauagcuggcuugauugccauaguaauggugacaauuaugcuuugcuguaugaccaguugcuguaguugucucaagggcuguuguucuuguggauccugcugcaaauuugaugaagacgacucugagccagugcucaaaggagucaaauuacauuacacauaa

SEQ ID NO: 11689 - RNA, 3822 nt, Artificial Sequence
  SARS-CoV-2/Belgium/VAG-03013/2020__EPI_ISL_415155 spike protein CDS wt (1-1273)
auguuuguuuuucuuguuuuauugccacuagucucuagucaguguguuaaucuuacaaccagaacucaauuacccccugcauacacuaauucuuucacacgugguguuuauuacccugacaaaguuuucagauccucaguuuuacauucaacucaggacuuguucuuaccuuucuuuuccaauguuacuugguuccaugcuauacaugucucugggaccaaugguacuaagagguuugauaacccuguccuaccauuuaaugaugguguuuauuuugcuuccacugagaagucuaacauaauaagaggcuggauuuuugguacuacuuuagauucgaagacccagucccuacuuauuguuaauaacgcuacuaauguuguuauuaaagucugugaauuucaauuuuguaaugauccauuuuuggguguuuauuaccacaaaaacaacaaaaguuggauggaaagugaguucagaguuuauucuagugcgaauaauugcacuuuugaauaugucucucagccuuuucuuauggaccuugaaggaaaacaggguaauuucaaaaaucuuagggaauuuguguuuaagaauauugaugguuauuuuaaaauauauucuaagcacacgccuauuaauuuagugcgugaucucccucaggguuuuucggcuuuagaaccauugguagauuugccaauagguauuaacaucacuagguuucaaacuuuacuugcuuuacauagaaguuauuugacuccuggugauucuucuucagguuggacagcuggugcugcagcuuauuauguggguuaucuucaaccuaggacuuuucuauuaaaauauaaugaaaauggaaccauuacagaugcuguagacugugcacuugacccucucucagaaacaaaguguacguugaaauccuucacuguagaaaaaggaaucuaucaaacuucuaacuuuagaguccaaccaacagaaucuauuguuagauuuccuaauauuacaaacuugugcccuuuuggugaaguuuuuaacgccaccagauuugcaucuguuuaugcuuggaacaggaagagaaucagcaacuguguugcugauuauucuguccuauauaauuccgcaucauuuuccacuuuuaaguguuauggagugucuccuacuaaauuaaaugaucucugcuuuacuaaugucuaugcagauucauuuguaauuagaggugaugaagucagacaaaucgcuccagggcaaacuggaaagauugcugauuauaauuauaaauuaccagaugauuuuacaggcugcguuauagcuuggaauucuaacaaucuugauucuaagguuggugguaauuauaauuaccuguauagauuguuuaggaagucuaaucucaaaccuuuugagagagauauuucaacugaaaucuaucaggccgguagcacaccuuguaaugguguugaagguuuuaauuguuacuuuccuuuacaaucauaugguuuccaacccacuaaugguguugguuaccaaccauacagaguaguaguacuuucuuuugaacuucuacaugcaccagcaacuguuuguggaccuaaaaagucuacuaauuugguuaaaaacaaaugugucaauuucaacuucaaugguuuaacaggcacagguguucuuacugagucuaacaaaaaguuucugccuuuccaacaauuuggcagagacauugcugacacuacugaugcuguccgugauccacagacacuugagauucuugacauuacaccauguucuuuugguggugucaguguuauaacaccaggaacaaauacuucuaaccagguugcuguucuuuaucaggguguuaacugcacagaagucccuguugcuauucaugcagaucaacuuacuccuacuuggcguguuuauucuacagguucuaauguuuuucaaacacgugcaggcuguuuaauaggggcugaacaugucaacaacucauaugagugugacauacccauuggugcagguauaugcgcuaguuaucagacucagacuaauucuccucggcgggcacguaguguagcuagucaauccaucauugccuacacuaugucacuuggugcagaaaauucaguugcuuacucuaauaacucuauugccauacccacaaauuuuacuauuaguguuaccacagaaauucuaccagugucuaugaccaagacaucaguagauuguacaauguacauuuguggugauucaacugaaugcagcaaucuuuuguugcaauauggcaguuuuuguacacaauuaaaccgugcuuuaacuggaauagcuguugaacaagacaaaaacacccaagaaguuuuugcacaagucaaacaaauuuacaaaacaccaccaauuaaagauuuuggugguuuuaauuuuucacaaauauuaccagauccaucaaaaccaagcaagaggucauuuauugaagaucuacuuuucaacaaagugacacuugcagaugcuggcuucaucaaacaauauggugauugccuuggugauauugcugcuagagaccucauuugugcacaaaaguuuaacggccuuacuguuuugccaccuuugcucacagaugaaaugauugcucaauacacuucugcacuguuagcggguacaaucacuucugguuggaccuuuggugcaggugcugcauuacaaauaccauuugcuaugcaaauggcuuauagguuuaaugguauuggaguuacacagaauguucucuaugagaaccaaaaauugauugccaaccaauuuaauagugcuauuggcaaaauucaagacucacuuucuuccacagcaacugcacuuggaaaacuucaagauguggucaaccaaaaugcacaagcuuuaaacacgcuuguuaaacaacuuagcuccaauuuuggugcaauuucaaguguuuuaaaugauauccuuucacgucuugacaaaguugaggcugaagugcaaauugauagguugaucacaggcagacuucaaaguuugcagacauaugugacucaacaauuaauuagagcugcagaaaucagagcuucugcuaaucuugcugcuacuaaaaugucagaguguguacuuggacaaucaaaaagaguugauuuuuguggaaagggcuaucaucuuauguccuucccucagucagcaccucaugguguagucuucuugcaugugacuuaugucccugcacaagaaaagaacuucacaacugcuccugccauuugucaugauggaaaagcacacuuuccucgugaaggugucuuuguuucaaauggcacacacugguuuguaacacaaaggaauuuuuaugaaccacaaaucauuacuacagacaacacauuugugucugguaacugugauguuguaauaggaauugucaacaacacaguuuaugauccuuugcaaccugaauuagacucauucaaggaggaguuagauaaauauuuuaagaaucauacaucaccagauguugauuuaggugacaucucuggcauuaaugcuucaguuguaaacauucaaaaagaaauugaccgccucaaugagguugccaagaauuuaaaugaaucucucaucgaucuccaagaacuuggaaaguaugagcaguauauaaaauggccaugguacauuuggcuagguuuuauagcuggcuugauugccauaguaauggugacaauuaugcuuugcuguaugaccaguugcuguaguugucucaagggcuguuguucuuguggauccugcugcaaauuugaugaagacgacucugagccagugcucaaaggagucaaauuacauuacacauaa

SEQ ID NO: 11690 - RNA, 3822 nt, Artificial Sequence
  SARS-CoV-2/Belgium/BC-03016/2020__EPI_ISL_415157 spike protein CDS wt (1-1273)
auguuuguuuuucuuguuuuauugccacuagucucuagucaguguguuaaucuuacaaccagaacucaauuacccccugcauacacuaauucuuucacacgugguguuuauuacccugacaaaguuuucagauccucaguuuuacauucaacucaggacuuguucuuaccuuucuuuuccaauguuacuugguuccaugcuauacaugucucugggaccaaugguacuaagagguuugauaacccuguccuaccauuuaaugaugguguuuauuuugcuuccacugagaagucuaacauaauaagaggcuggauuuuugguacuacuuuagauucgaagacccagucccuacuuauuguuaauaacgcuacuaauguuguuauuaaagucugugaauuucaauuuuguaaugauccauuuuuggguguuuauuaccacaaaaacaacaaaaguuggauggaaagugaguucagaguuuauucuagugcgaauaauugcacuuuugaauaugucucucagccuuuucuuauggaccuugaaggaaaacaggguaauuucaaaaaucuuagggaauuuguguuuaagaauauugaugguuauuuuaaaauauauucuaagcacacgccuauuaauuuagugcgugaucucccucaggguuuuucggcuuuagaaccauugguagauuugccaauagguauuaacaucacuagguuucaaacuuuacuugcuuuacauagaaguuauuugacuccuggugauucuucuucagguuggacagcuggugcugcagcuuauuauguggguuaucuucaaccuaggacuuuucuauuaaaauauaaugaaaauggaaccauuacagaugcuguagacugugcacuugacccucucucagaaacaaaguguacguugaaauccuucacuguagaaaaaggaaucuaucaaacuucuaacuuuagaguccaaccaacagaaucuauuguuagauuuccuaauauuacaaacuugugcccuuuuggugaaguuuuuaacgccaccagauuugcaucuguuuaugcuuggaacaggaagagaaucagcaacuguguugcugauuauucuguccuauauaauuccgcaucauuuuccacuuuuaaguguuauggagugucuccuacuaaauuaaaugaucucugcuuuacuaaugucuaugcagauucauuuguaauuagaggugaugaagucagacaaaucgcuccagggcaaacuggaaagauugcugauuauaauuauaaauuaccagaugauuuuacaggcugcguuauagcuuggaauucuaacaaucuugauucuaagguuggugguaauuauaauuaccuguauagauuguuuaggaagucuaaucucaaaccuuuugagagagauauuucaacugaaaucuaucaggccgguagcacaccuuguaaugguguugaagguuuuaauuguuacuuuccuuuacaaucauaugguuuccaacccacuaaugguguugguuaccaaccauacagaguaguaguacuuucuuuugaacuucuacaugcaccagcaacuguuuguggaccuaaaaagucuacuaauuugguuaaaaacaaaugugucaauuucaacuucaaugguuuaacaggcacagguguucuuacugagucuaacaaaaaguuucugccuuuccaacaauuuggcagagacauugcugacacuacugaugcuguccgugauccacagacacuugagauucuugacauuacaccauguucuuuugguggugucaguguuauaacaccaggaacaaauacuucuaaccagguugcuguucuuuaucaggguguuaacugcacagaagucccuguugcuauucaugcagaucaacuuacuccuacuuggcguguuuauucuacagguucuaauguuuuucaaacacgugcaggcuguuuaauaggggcugaacaugucaacaacucauaugagugugacauacccauuggugcagguauaugcgcuaguuaucagacucagacuaauucuccucggcgggcacguaguguagcuagucaauccaucauugccuacacuaugucacuuggugcagaaaauucaguugcuuacucuaauaacucuauugccauacccacaaauuuuacuauuaguguuaccacagaaauucuaccagugucuaugaccaagacaucaguagauuguacaauguacauuuguggugauucaacugaaugcagcaaucuuuuguugcaauauggcaguuuuuguacacaauuaaaccgugcuuuaacuggaauagcuguugaacaagacaaaaacacccaagaaguuuuugcacaagucaaacaaauuuacaaaacaccaccaauuaaagauuuuggugguuuuaauuuuucacaaauauuaccagauccaucaaaaccaagcaagaggucauuuauugaagaucuacuuuucaacaaagugacacuugcagaugcuggcuucaucaaacaauauggugauugccuuggugauauugcugcuagagaccucauuugugcacaaaaguuuaacggccuuacuguuuugccaccuuugcucacagaugaaaugauugcucaauacacuucugcacuguuagcggguacaaucacuucugguuggaccuuuggugcaggugcugcauuacaaauaccauuugcuaugcaaauggcuuauagguuuaaugguauuggaguuacacagaauguucucuaugagaaccaaaaauugauugccaaccaauuuaauagugcuauuggcaaaauucaagacucacuuucuuccacagcaccugcacuuggaaaacuucaagauguggucaaccaaaaugcacaagcuuuaaacacgcuuguuaaacaacuuagcuccaauuuuggugcaauuucaaguguuuuaaaugauauccuuucacgucuugacaaaguugaggcugaagugcaaauugauagguugaucacaggcagacuucaaaguuugcagacauaugugacucaacaauuaauuagagcugcagaaaucagagcuucugcuaaucuugcugcuacuaaaaugucagaguguguacuuggacaaucaaaaagaguugauuuuuguggaaagggcuaucaucuuauguccuucccucagucagcaccucaugguguagucuucuugcaugugacuuaugucccugcacaagaaaagaacuucacaacugcuccugccauuugucaugauggaaaagcacacuuuccucgugaaggugucuuuguuucaaauggcacacacugguuuguaacacaaaggaauuuuuaugaaccacaaaucauuacuacagacaacacauuugugucugguaacugugauguuguaauaggaauugucaacaacacaguuuaugauccuuugcaaccugaauuagacucauucaaggaggaguuagauaaauauuuuaagaaucauacaucaccagauguugauuuaggugacaucucuggcauuaaugcuucaguuguaaacauucaaaaagaaauugaccgccucaaugagguugccaagaauuuaaaugaaucucucaucgaucuccaagaacuuggaaaguaugagcaguauauaaaauggccaugguacauuuggcuagguuuuauagcuggcuugauugccauaguaauggugacaauuaugcuuugcuguaugaccaguugcuguaguugucucaagggcuguuguucuuguggauccugcugcaaauuugaugaagacgacucugagccagugcucaaaggagucaaauuacauuacacauaa

SEQ ID NO: 11691 - RNA, 3822 nt, Artificial Sequence
  SARS-CoV-2/Germany/BavPat3/2020__EPI_ISL_414521 spike protein CDS wt (1-1273)
auguuuguuuuucuuguuuuauugccacuagucucuagucaguguguuaaucuuacaaccagaacucaauuacccccugcauacacuaauucuuucacacgugguguuuauuacccugacaaaguuuucagauccucaguuuuacauucaacucaggacuuguucuuaccuuucuuuuccaauguuacuugguuccaugcuauacaugucucugggaccaaugguacuaagagguuugauaacccuguccuaccauuuaaugaugguguuuauuuugcuuccacugagaagucuaacauaauaagaggcuggauuuuugguacuacuuuagauucgaagacccagucccuacuuauuguuaauaacgcuacuaauguuguuauuaaagucugugaauuucaauuuuguaaugauccauuuuuggguguuuauuaccacaaaaacaacaaaaguuggauggaaagugaguucagaguuuauucuagugcgaauaauugcacuuuugaauaugucucucagccuuuucuuauggaccuugaaggaaaacaggguaauuucaaaaaucuuagggaauuuguguuuaagaauauugaugguuauuuuaaaauauauucuaagcacacgccuauuaauuuagugcgugaucucccucaggguuuuucggcuuuagaaccauugguagauuugccaauagguauuaacaucacuagguuucaaacuuuacuugcuuuacauagaaguuauuugacuccuggugauucuucuucagguuggacagcuggugcugcagcuuauuauguggguuaucuucaaccuaggacuuuucuauuaaaauauaaugaaaauggaaccauuacagaugcuguagacugugcacuugacccucucucagaaacaaaguguacguugaaauccuucacuguagaaaaaggaaucuaucaaacuucuaacuuuagaguccaaccaacagaaucuauuguuagauuuccuaauauuacaaacuugugcccuuuuggugaaguuuuuaacgccaccagauuugcaucuguuuaugcuuggaacaggaagagaaucagcaacuguguugcugauuauucuguccuauauaauuccgcaucauuuuccacuuuuaaguguuauggagugucuccuacuaaauuaaaugaucucugcuuuacuaaugucuaugcagauucauuuguaauuagaggugaugaagucagacaaaucgcuccagggcaaacuggaaagauugcugauuauaauuauaaauuaccagaugauuuuacaggcugcguuauagcuuggaauucuaacaaucuugauucuaagguuggugguaauuauaauuaccuguauagauuguuuaggaagucuaaucucaaaccuuuugagagagauauuucaacugaaaucuaucaggccgguagcacaccuuguaaugguguugaagguuuuaauuguuacuuuccuuuacaaucauaugguuuccaacccacuaaugguguugguuaccaaccauacagaguaguaguacuuucuuuugaacuucuacaugcaccagcaacuguuuguggaccuaaaaagucuacuaauuugguuaaaaacaaaugugucaauuucaacuucaaugguuuaacaggcacagguguucuuacugagucuaacaaaaaguuucugccuuuccaacaauuuggcagagacauugcugacacuacugaugcuguccgugauccacagacacuugagauucuugacauuacaccauguucuuuugguggugucaguguuauaacaccaggaacaaauacuucuaaccagguugcuguucuuuaucaggauguuaacugcacagaagucccuguugcuauucaugcagaucaacuuacuccuacuuggcguguuuauucuacagguucuaauguuuuucaaacacgugcaggcuguuuaauaggggcugaacaugucaacaacucauaugagugugacauacccauuggugcagguauaugcgcuaguuaucagacucagacuaauucuccucggcgggcacguaguguagcuagucaauccaucauugccuacacuaugucacuuggugcagaaaauucaguugcuuacucuaauaacucuauugccauacccacaaauuuuacuauuaguguuaccacagaaauucuaccagugucuaugaccaagacaucaguagauuguacaauguacauuuguggugauucaacugaaugcagcaaucuuuuguugcaauauggcaguuuuuguacacaauuaaaccgugcuuuaacuggaauagcuguugaacaagacaaaaacacccaacaaguuuuugcacaagucaaacaaauuuacaaaacaccaccaauuaaagauuuuggugguuuuaauuuuucacaaauauuaccagauccaucaaaaccaagcaagaggucauuuauugaagaucuacuuuucaacaaagugacacuugcagaugcuggcuucaucaaacaauauggugauugccuuggugauauugcugcuagagaccucauuugugcacaaaaguuuaacggccuuacuguuuugccaccuuugcucacagaugaaaugauugcucaauacacuucugcacuguuagcggguacaaucacuucugguuggaccuuuggugcaggugcugcauuacaaauaccauuugcuaugcaaauggcuuauagguuuaaugguauuggaguuacacagaauguucucuaugagaaccaaaaauugauugccaaccaauuuaauagugcuauuggcaaaauucaagacucacuuucuuccacagcaagugcacuuggaaaacuucaagauguggucaaccaaaaugcacaagcuuuaaacacgcuuguuaaacaacuuagcuccaauuuuggugcaauuucaaguguuuuaaaugauauccuuucacgucuugacaaaguugaggcugaagugcaaauugauagguugaucacaggcagacuucaaaguuugcagacauaugugacucaacaauuaauuagagcugcagaaaucagagcuucugcuaaucuugcugcuacuaaaaugucagaguguguacuuggacaaucaaaaagaguugauuuuuguggaaagggcuaucaucuuauguccuucccucagucagcaccucaugguguagucuucuugcaugugacuuaugucccugcacaagaaaagaacuucacaacugcuccugccauuugucaugauggaaaagcacacuuuccucgugaaggugucuuuguuucaaauggcacacacugguuuguaacacaaaggaauuuuuaugaaccacaaaucauuacuacagacaacacauuugugucugguaacugugauguuguaauaggaauugucaacaacacaguuuaugauccuuugcaaccugaauuagacucauucaaggaggaguuagauaaauauuuuaagaaucauacaucaccagauguugauuuaggugacaucucuggcauuaaugcuucaguuguaaacauucaaaaagaaauugaccgccucaaugagguugccaagaauuuaaaugaaucucucaucgaucuccaagaacuuggaaaguaugagcaguauauaaaauggccaugguacauuuggcuagguuuuauagcuggcuugauugccauaguaauggugacaauuaugcuuugcuguaugaccaguugcuguaguugucucaagggcuguuguucuuguggauccugcugcaaauuugaugaagacgacucugagccagugcucaaaggagucaaauuacauuacacauaa

SEQ ID NO: 11692 - RNA, 3822 nt, Artificial Sequence
  SARS-CoV-2/France/HF1805/2020__EPI_ISL_414628 spike protein CDS wt (1-1273)
auguuuguuuuucuuguuuuauugccacuagucucuagucaguguguuaaucuuacaaccagaacucaauuacccccugcauacacuaauucuuucacacgugguguuuauuacccugacaaaguuuucagauccucaguuuuacauucaacucaggacuuguucuuaccuuucuuuuccaauguuacuugguuccaugcuauacaugucucugggaccaaugguacuaagagguuugauaacccuguccuaccauuuaaugaugguguuuauuuugcuuccacugagaagucuaacauaauaagaggcuggauuuuugguacuacuuuagauucgaagacccagucccuacuuauuguuaauaacgcuacuaauguuguuauuaaagucugugaauuucaauuuuguaaugauccauuuuuggguguuuauuaccacaaaaacaacaaaaguuggauggaaagugaguucagaguuuauucuagugcgaauaauugcacuuuugaauaugucucucagccuuuucuuauggaccuugaaggaaaacaggguaauuucaaaaaucuuagggaauuuguguuuaagaauauugaugguuauuuuaaaauauauucuaagcacacgccuauuaauuuagugcgugaucucccucaggguuuuucggcuuuagaaccauugguagauuugccaauagguauuaacaucacuagguuucaaacuuuacuugcuuuacauagaaguuauuugacuccuggugauucuucuucagguuggacagcuggugcugcagcuuauuauguggguuaucuucaaccuaggacuuuucuauuaaaauauaaugaaaauggaaccauuacagaugcuguagacugugcacuugacccucucucagaaacaaaguguacguugaaauccuucacuguagaaaaaggaaucuaucaaacuucuaacuuuagaguccaaccaacagaaucuauuguuagauuuccuaauauuacaaacuugugcccuuuuggugaaguuuuuaacgccaccagauuugcaucuguuuaugcuuggaacaggaagagaaucagcaacuguguugcugauuauucuguccuauauaauuccgcaucauuuuccacuuuuaaguguuauggagugucuccuacuaaauuaaaugaucucugcuuuacuaaugucuaugcagauucauuuguaauuagaggugaugaagucagacaaaucgcuccagggcaaacuggaaagauugcugauuauaauuauaaauuaccagaugauuuuacaggcugcguuauagcuuggaauucuaacaaucuugauucuaagguuggugguaauuauaauuaccuguauagauuguuuaggaagucuaaucucaaaccuuuugagagagauauuucaacugaaaucuaucaggccgguagcacaccuuguaaugguguugaagguuuuaauuguuacuuuccuuuacaaucauaugguuuccaacccacuaaugguguugguuaccaaccauacagaguaguaguacuuucuuuugaacuucuacaugcaccagcaacuguuuguggaccuaaaaagucuacuaauuugguuaaaaacaaaugugucaauuucaacuucaaugguuuaacaggcacagguguucuuacugagucuaacaaaaaguuucugccuuuccaacaauuuggcagagacauugcugacacuacugaugcuguccgugauccacagacacuugagauucuugacauuacaccauguucuuuugguggugucaguguuauaacaccaggaacaaauacuucuaaccagguugcuguucuuuaucaggguguuaacugcacagaagucccuguugcuauucaugcagaucaacuuacuccuacuuggcguguuuauucuacagguucuaauguuuuucaaacacgugcaggcuguuuaauaggggcugaacaugucaacaacucauaugagugugacauacccauuggugcagguauaugcgcuaguuaucagacucagacuaauucuccucggcgggcacguaguguagcuagucaauccaucauugccuacacuaugucacuuggugcagaaaauucaguugcuuacucuaauaacucuauugccauacccacaaauuuuacuauuaguguuaccacagaaauucuaccagugucuaugaccaagacaucaguagauuguacaauguacauuuguggugauucaacugaaugcagcaaucuuuuguugcaauauggcaguuuuuguacacaauuaaaccgugcuuuaacuggaauagcuguugaacaagacaaaaacacccaagaaguuuuugcacaagucaaacaaauuuacaaaacaccaccaauuaaagauuuuggugguuuuaauuuuucacaaauauuaccagauccaucaaaaccaagcaagaggucauuuauugaagaucuacuuuucaacaaagugacacuugcagaugcuggcuucaucaaacaauauggugauugccuuggugauauugcugcuagagaccucauuugugcacaaaaguuuaacggccuuacuguuuugccaccuuugcucacagaugaaaugauugcucaauacacuucugcacuguuagcggguacaaucacuucugguuggaccuuuggugcaggugcugcauuacaaauaccauuugcuaugcaaauggcuuauagguuuaaugguauuggaguuacacagaauguucucuaugagaaccaaaaauugauugccaaccaauuuaauagugcuauuggcaaaauucaagacucacuuucuuccacagcaagugcacuuggaaaacuucaagauguggucaaccaaaaugcacaagcuuuaaacacgcuuguuaaacaacuuagcuccaauuuuggugcaauuucaaguguuuuaaaugauauccuuucacgucuugacaaaguugaggcugaagugcaaauugauagguugaucacaggcagacuucaaaguuugcagacauaugugacucaacaauuaauuagagcugcagaaaucagagcuucugcuaaucuugcugcuacuaaaaugucagaguguguacuuggacaaucaaaaagaguugauuuuuguggaaagggcuaucaucuuauguccuucccucagucagcaccucaugguguagucuucuugcaugugacuuaugucccugcacaagaaaagaacuucacaacugcuccugccauuugucaugauggaaaagcacacuuuccucgugaaggugucuuuguuucaaauggcacacacugguuuguaacacaaaggaauuuuuaugaaccacaaaucauuacuacagacaacacauuugugucugguaacugugauguuguaauaggaguugucaacaacacaguuuaugauccuuugcaaccugaauuagacucauucaaggaggaguuagauaaauauuuuaagaaucauacaucaccagauguugauuuaggugacaucucuggcauuaaugcuucaguuguaaacauucaaaaagaaauugaccgccucaaugagguugccaagaauuuaaaugaaucucucaucgaucuccaagaacuuggaaaguaugagcaguauauaaaauggccaugguacauuuggcuagguuuuauagcuggcuugauugccauaguaauggugacaauuaugcuuugcuguaugaccaguugcuguaguugucucaagggcuguuguucuuguggauccugcugcaaauuugaugaagacgacucugagccagugcucaaaggagucaaauuacauuacacauaa

SEQ ID NO: 11693 - RNA, 3822 nt, Artificial Sequence
  SARS-CoV-2/Netherlands/ZuidHolland_9/2020__EPI_ISL_414445 spike protein CDS wt (1-1273)
auguuuguuuuucuuguuuuauugccacuagucucuagucaguguguuaaucuuacaaccagaacucaauuacccccugcauacacuaauucuuucacacgugguguuuauuacccugacaaaguuuucagauccucaguuuuacauucaacucaggacuuguucuuaccuuucuuuuccaauguuacuugguuccaugcuauacaugucucugggaccaaugguacuaagagguuugauaacccuguccuaccauuuaaugaugguguuuauuuugcuuccacugagaagucuaacauaauaagaggcuggauuuuugguacuacuuuagauucgaagacccagucccuacuuauuguuaauaacgcuacuaauguuguuauuaaagucugugaauuucaauuuuguaaugauccauuuuuggguguuuauuaccacaaaaacaacaaaaguuggauggaaagugaguucagaguuuauucuagugcgaauaauugcacuuuugaauaugucucucagccuuuucuuauggaccuugaaggaaaacaggguaauuucaaaaaucuuagggaauuuguguuuaagaauauugaugguuauuuuaaaauauauucuaagcacacgccuauuaauuuagugcgugaucucccucaggguuuuucggcuuuagaaccauugguagauuugccaauagguauuaacaucacuagguuucaaacuuuacuugcuuuacauagaaguuauuugacuccuggugauucuucuucagguuggacagcuggugcugcagcuuauuauguggguuaucuucaaccuaggacuuuucuauuaaaauauaaugaaaauggaaccauuacagaugcuguagacugugcacuugacccucucucagaaacaaaguguacguugaaauccuucacuguagaaaaaggaaucuaucaaacuucuaacuuuagaguccaaccaacagaaucuauuguuagauuuccuaauauuacaaacuugugcccuuuuggugaaguuuuuaacgccaccagauuugcaucuguuuaugcuuggaacaggaagagaaucagcaacuguguugcugauuauucuguccuauauaauuccgcaucauuuuccacuuuuaaguguuauggagugucuccuacuaaauuaaaugaucucugcuuuacuaaugucuaugcagauucauuuguaauuagaggugaugaagucagacaaaucgcuccagggcaaacuggaaagauugcugauuauaauuauaaauuaccagaugauuuuacaggcugcguuauagcuuggaauucuaacaaucuugauucuaagguuggugguaauuauaauuaccuguauagauuguuuaggaagucuaaucucaaaccuuuugagagagauauuucaacugaaaucuaucaggccgguagcacaccuuguaaugguguugaagguuuuaauuguuacuuuccuuuacaaucauaugguuuccaacccacuaaugguguugguuaccaaccauacagaguaguaguacuuucuuuugaacuucuacaugcaccagcaacuguuuguggaccuaaaaagucuacuaauuugguuaaaaacaaaugugucaauuucaacuucaaugguuuaacaggcacagguguucuuacugagucuaacaaaaaguuucugccuuuccaacaauuuggcagagacauugcugacacuacugaugcuguccgugauccacagacacuugagauucuugacauuacaccauguucuuuugguggugucaguguuauaacaccaggaacaaauacuucuaaccagguugcuguucuuuaucaggguguuaacugcacagaagucccuguugcuauucaugcagaucaacuuacuccuacuuggcguguuuauucuacagguucuaauguuuuucaaacacgugcaggcuguuuaauaggggcugaacaugucaacaacucauaugagugugacauacccauuggugcagguauaugcgcuaguuaucagacucagacuaauucuccucggcgggcacguaguguagcuagucaauccaucauugccuacacuaugucacuuggugcagaaaauucaguugcuuacucuaauaacucuauugccauacccacaaauuuuacuauuaguguuaccacagaaauucuaccagugucuaugaccaagacaucaguagauuguacaauguacauuuguggugauucaacugaaugcagcaaucuuuuguugcaauauggcaguuuuuguacacaauuaaaccgugcuuuaacuggaauagcuguugaacaagacaaaaacacccaagaaguuuuugcacaagucaaacaaauuuacaaaacaccaccaauuaaagauuuuggugguuuuaauuuuucacaaauauuaccagauccaucaaaaccaagcaagaggucauuuauugaagaucuacuuuucaacaaagugacacuugcagaugcuggcuucaucaaacaauauggugauugccuuggugauauugcugcuagagaccucauuuguguacaaaaguuuaacggccuuacuguuuugccaccuuugcucacagaugaaaugauugcucaauacacuucugcacuguuagcggguacaaucacuucugguuggaccuuuggugcaggugcugcauuacaaauaccauuugcuaugcaaauggcuuauagguuuaaugguauuggaguuacacagaauguucucuaugagaaccaaaaauugauugccaaccaauuuaauagugcuauuggcaaaauucaagacucacuuucuuccacagcaagugcacuuggaaaacuucaagauguggucaaccaaaaugcacaagcuuuaaacacgcuuguuaaacaacuuagcuccaauuuuggugcaauuucaaguguuuuaaaugauauccuuucacgucuugacaaaguugaggcugaagugcaaauugauagguugaucacaggcagacuucaaaguuugcagacauaugugacucaacaauuaauuagagcugcagaaaucagagcuucugcuaaucuugcugcuacuaaaaugucagaguguguacuuggacaaucaaaaagaguugauuuuuguggaaagggcuaucaucuuauguccuucccucagucagcaccucaugguguagucuucuugcaugugacuuaugucccugcacaagaaaagaacuucacaacugcuccugccauuugucaugauggaaaagcacacuuuccucgugaaggugucuuuguuucaaauggcacacacugguuuguaacacaaaggaauuuuuaugaaccacaaaucauuacuacagacaacacauuugugucugguaacugugauguuguaauaggaauugucaacaacacaguuuaugauccuuugcaaccugaauuagacucauucaaggaggaguuagauaaauauuuuaagaaucauacaucaccagauguugauuuaggugacaucucuggcauuaaugcuucaguuguaaacauucaaaaagaaauugaccgccucaaugagguugccaagaauuuaaaugaaucucucaucgaucuccaagaacuuggaaaguaugagcaguauauaaaauggccaugguacauuuggcuagguuuuauagcuggcuugauugccauaguaauggugacaauuaugcuuugcuguaugaccaguugcuguaguugucucaagggcuguuguucuuguggauccugcugcaaauuugaugaagacgacucugagccagugcucaaaggagucaaauuacauuacacauaa

SEQ ID NO: 11694 - RNA, 3822 nt, Artificial Sequence
  SARS-CoV-2/Finland/FIN03032020A/2020__EPI_ISL_413602 spike protein CDS wt (1-1273)
auguuuguuuuucuuguuuuauugccacuagucucuagucaguguguuaaucuuacaaccagaacucaauuacccccugcauacacuaauucuuucacacgugguguuuauuacccugacaaaguuuucagauccucaguuuuacauucaacucaggacuuguucuuaccuuucuuuuccaauguuacuugguuccaugcuauacaugucucugggaccaaugguacuaagagguuugauaacccuguccuaccauuuaaugaugguguuuauuuugcuuccacugagaagucuaacauaauaagaggcuggauuuuugguacuacuuuagauucgaagacccagucccuacuuauuguuaauaacgcuacuaauguuguuauuaaagucugugaauuucaauuuuguaaugauccauuuuuggguguuuauuaccacaaaaacaacaaaaguuggauggaaagugaguucagaguuuauucuagugcgaauaauugcacuuuugaauaugucucucagccuuuucuuauggaccuugaaggaaaacaggguaauuucaaaaaucuuagggaauuuguguuuaagaauauugaugguuauuuuaaaauauauucuaagcacacgccuauuaauuuagugcgugaucucccucaggguuuuucggcuuuagaaccauugguagauuugccaauagguauuaacaucacuagguuucaaacuuuacuugcuuuacauagaaguuauuugacuccuggugauucuucuucagguuggacagcuggugcugcagcuuauuauguggguuaucuucaaccuaggacuuuucuauuaaaauauaaugaaaauggaaccauuacagaugcuguagacugugcacuugacccucucucagaaacaaaguguacguugaaauccuucacuguagaaaaaggaaucuaucaaacuucuaacuuuagaguccaaccaacagaaucuauuguuagauuuccuaauauuacaaacuugugcccuuuuggugaaguuuuuaacgccaccagauuugcaucuguuuaugcuuggaacaggaagagaaucagcaacuguguugcugauuauucuguccuauauaauuccgcaucauuuuccacuuuuaaguguuauggagugucuccuacuaaauuaaaugaucucugcuuuacuaaugucuaugcagauucauuuguaauuagaggugaugaagucagacaaaucgcuccagggcaaacuggaaagauugcugauuauaauuauaaauuaccagaugauuuuacaggcugcguuauaucuuggaauucuaacaaucuugauucuaagguuggugguaauuauaauuaccuguauagauuguuuaggaagucuaaucucaaaccuuuugagagagauauuucaacugaaaucuaucaggccgguagcacaccuuguaaugguguugaagguuuuaauuguuacuuuccuuuacaaucauaugguuuccaacccacuaaugguguugguuaccaaccauacagaguaguaguacuuucuuuugaacuucuacaugcaccagcaacuguuuguggaccuaaaaagucuacuaauuugguuaaaaacaaaugugucaauuucaacuucaaugguuuaacaggcacagguguucuuacugagucuaacaaaaaguuucugccuuuccaacaauuuggcagagacauugcugacacuacugaugcuguccgugauccacagacacuugagauucuugacauuacaccauguucuuuugguggugucaguguuauaacaccaggaacaaauacuucuaaccagguugcuguucuuuaucaggguguuaacugcacagaagucccuguugcuauucaugcagaucaacuuacuccuacuuggcguguuuauucuacagguucuaauguuuuucaaacacgugcaggcuguuuaauaggggcugaacaugucaacaacucauaugagugugacauacccauuggugcagguauaugcgcuaguuaucagacucagacuaauucuccucggcgggcacguaguguagcuagucaauccaucauugccuacacuaugucacuuggugcagaaaauucaguugcuuacucuaauaacucuauugccauacccacaaauuuuacuauuaguguuaccacagaaauucuaccagugucuaugaccaagacaucaguagauuguacaauguacauuuguggugauucaacugaaugcagcaaucuuuuguugcaauauggcaguuuuuguacacaauuaaaccgugcuuuaacuggaauagcuguugaacaagacaaaaacacccaagaaguuuuugcacaagucaaacaaauuuacaaaacaccaccaauuaaagauuuuggugguuuuaauuuuucacaaauauuaccagauccaucaaaaccaagcaagaggucauuuauugaagaucuacuuuucaacaaagugacacuugcagaugcuggcuucaucaaacaauauggugauugccuuggugauauugcugcuagagaccucauuugugcacaaaaguuuaacggccuuacuguuuugccaccuuugcucacagaugaaaugauugcucaauacacuucugcacuguuagcggguacaaucacuucugguuggaccuuuggugcaggugcugcauuacaaauaccauuugcuaugcaaauggcuuauagguuuaaugguauuggaguuacacagaauguucucuaugagaaccaaaaauugauugccaaccaauuuaauagugcuauuggcaaaauucaagacucacuuucuuccacagcaagugcacuuggaaaacuucaagauguggucaaccaaaaugcacaagcuuuaaacacgcuuguuaaacaacuuagcuccaauuuuggugcaauuucaaguguuuuaaaugauauccuuucacgucuugacaaaguugaggcugaagugcaaauugauagguugaucacaggcagacuucaaaguuugcagacauaugugacucaacaauuaauuagagcugcagaaaucagagcuucugcuaaucuugcugcuacuaaaaugucagaguguguacuuggacaaucaaaaagaguugauuuuuguggaaagggcuaucaucuuauguccuucccucagucagcaccucaugguguagucuucuugcaugugacuuaugucccugcacaagaaaagaacuucacaacugcuccugccauuugucaugauggaaaagcacacuuuccucgugaaggugucuuuguuucaaauggcacacacugguuuguaacacaaaggaauuuuuaugaaccacaaaucauuacuacagacaacacauuugugucugguaacugugauguuguaauaggaauugucaacaacacaguuuaugauccuuugcaaccugaauuagacucauucaaggaggaguuagauaaauauuuuaagaaucauacaucaccagauguugauuuaggugacaucucuggcauuaaugcuucaguuguaaacauucaaaaagaaauugaccgccucaaugagguugccaagaauuuaaaugaaucucucaucgaucuccaagaacuuggaaaguaugagcaguauauaaaauggccaugguacauuuggcuagguuuuauagcuggcuugauugccauaguaauggugacaauuaugcuuugcuguaugaccaguugcuguaguugucucaagggcuguuguucuuguggauccugcugcaaauuugaugaagacgacucugagccagugcucaaaggagucaaauuacauuacacauaa

SEQ ID NO: 11695 - RNA, 3822 nt, Artificial Sequence
  SARS-CoV-2/France/GE1977/2020__EPI_ISL_414632 spike protein CDS wt (1-1273)
auguuuguuuuucuuguuuuauugccacuagucucuagucaguguguuaaucuuacaaccagaacucaauuacccccugcauacacuaauucuuucacacgugguguuuauuacccugacaaaguuuucagauccucaguuuuacauucaacucaggacuuguucuuaccuuucuuuuccaauguuacuugguuccaugcuauacaugucucugggaccaaugguacuaagagguuugauaacccuguccuaccauuuaaugaugguguuuauuuugcuuccacugagaagucuaacauaauaagaggcuggauuuuugguacuacuuuagauucgaagacccagucccuacuuauuguuaauaacgcuacuaauguuguuauuaaagucugugaauuucaauuuuguaaugauccauuuuuggguguuuauuaccacaaaaacaacaaaaguuggauggaaagugaguucagaguuuauucuagugcgaauaauugcacuuuugaauaugucucucagccuuuucuuauggaccuugaaggaaaacaggguaauuucaaaaaucuuagggaauuuguguuuaagaauauugaugguuauuuuaaaauauauucuaagcacacgccuauuaauuuagugcgugaucucccucaggguuuuucggcuuuagaaccauugguagauuugccaauagguauuaacaucacuagguuucaaacuuuacuugcuuuacauagaaguuauuugacuccuggugauucuucuucagguuggacagcuggugcugcagcuuauuauguggguuaucuucaaccuaggacuuuucuauuaaaauauaaugaaaauggaaccauuacagaugcuguagacugugcacuugacccucucucagaaacaaaguguacguugaaauccuucacuguagaaaaaggaaucuaucaaacuucuaacuuuagaguccaaccaacagaaucuauuguuagauuuccuaauauuacaaacuugugcccuuuuggugaaguuuuuaacgccaccagauuugcaucuguuuaugcuuggaacaggaagagaaucagcaacuguguugcugauuauucuguccuauauaauuccgcaucauuuuccacuuuuaaguguuauggagugucuccuacuaaauuaaaugaucucugcuuuacuaaugucuaugcagauucauuuguaauuagaggugaugaagucagacaaaucgcuccagggcaaacuggaaagauugcugauuauaauuauaaauuaccagaugauuuuacaggcugcguuauagcuuggaauucuaacaaucuugauucuaagguuggugguaauuauaauuaccuguauagauuguuuaggaagucuaaucucaaaccuuuugagagagauauuucaacugaaaucuaucaggccgguagcacaccuuguaaugguguugaagguuuuaauuguuacuuuccuuuacaaucauaugguuuccaacccacuaaugguguugguuaccaaccauacagaguaguaguacuuucuuuugaacuucuacaugcaccagcaacuguuuguggaccuaaaaagucuacuaauuugguuaaaaacaaaugugucaauuucaacuucaaugguuuaacaggcacagguguucuuacugagucuaacaaaaaguuucugccuuuccaacaauuuggcagagacauugcugacacuacugaugcuguccgugauccacagacacuugagauucuugacauuacaccauguucuuuugguggugucaguguuauaacaccaggaacaaauacuucuaaccagguugcuguucuuuaucaggguguuaacugcacagaagucccuguugcuauucaugcagaucaacuuacuccuacuuggcguguuuauucuacagguucuaauguuuuucaaacacgugcaggcuguuuaauaggggcugaacaugucaacaacucauaugagugugacauacccauuggugcagguauaugcgcuaguuaucagacucagacuaauucuccucggcgggcacguaguguagcuagucaauccaucauugccuacacuaugucacuuggugcagaaaauucaguugcuuacucuaauaacucuauugccauacccacaaauuuuacuauuaguguuaccacagaaauucuaccagugucuaugaccaagacaucaguagauuguacaauguacauuuguggugauucaacugaaugcagcaaucuuuuguugcaauauggcaguuuuuguacacaauuaaaccgugcuuuaacuggaauagcuguugaacaagacaaaaacacccaagaaguuuuugcacaagucaaacaaauuuacaaaacaccaccaauuaaagauuuuggugguuuuaauuuuucacaaauauuaccagauccaucaaaaccaagcaagaggucauuuauugaagaucuacuuuucaacaaagugacacuugcagaugcuggcuucaucaaacaauauggugauugccuuggugauauugcugcuagagaccucauuugugcacaaaaguuuaacggccuuacuguuuugccaccuuugcucacagaugaaaugauugcucaauacacuucugcacuguuagcggguacaaucacuucugguuggaccuuuggugcaggugcugcauuacaaauaccauuugcuaugcaaauggcuuauagguuuaaugguauuggaguuacacagaauguucucuaugagaaccaaaaauugauugccaaccaauuuaauagugcuauuggcaaaauucaagacucacuuuuuuccacagcaagugcacuuggaaaacuucaagauguggucaaccaaaaugcacaagcuuuaaacacgcuuguuaaacaacuuagcuccaauuuuggugcaauuucaaguguuuuaaaugauauccuuucacgucuugacaaaguugaggcugaagugcaaauugauagguugaucacaggcagacuucaaaguuugcagacauaugugacucaacaauuaauuagagcugcagaaaucagagcuucugcuaaucuugcugcuacuaaaaugucagaguguguacuuggacaaucaaaaagaguugauuuuuguggaaagggcuaucaucuuauguccuucccucagucagcaccucaugguguagucuucuugcaugugacuuaugucccugcacaagaaaagaacuucacaacugcuccugccauuugucaugauggaaaagcacacuuuccucgugaaggugucuuuguuucaaauggcacacacugguuuguaacacaaaggaauuuuuaugaaccacaaaucauuacuacagacaacacauuugugucugguaacugugauguuguaauaggaauugucaacaacacaguuuaugauccuuugcaaccugaauuagacucauucaaggaggaguuagauaaauauuuuaagaaucauacaucaccagauguugauuuaggugacaucucuggcauuaaugcuucaguuguaaacauucaaaaagaaauugaccgccucaaugagguugccaagaauuuaaaugaaucucucaucgaucuccaagaacuuggaaaguaugagcaguauauaaaauggccaugguacauuuggcuagguuuuauagcuggcuugauugccauaguaauggugacaauuaugcuuugcuguaugaccaguugcuguaguugucucaagggcuguuguucuuguggauccugcugcaaauuugaugaagacgacucugagccagugcucaaaggagucaaauuacauuacacauaa

SEQ ID NO: 11696 - RNA, 3822 nt, Artificial Sequence
  SARS-CoV-2/Finland/FIN-313/2020__EPI_ISL_414641 spike protein CDS wt (1-1273)
auguuuguuuuucuuguuuuauugccacuagucucuagucaguguguuaaucuuacaaccagaacucaauuacccccugcauacacuaauucuuucacacgugguguuuauuacccugacaaaguuuucagauccucaguuuuacauucaacucaggacuuguucuuaccuuucuuuuccaauguuacuugguuccaugcuauacaugucucugggaccaaugguacuaagagguuugauaacccuguccuaccauuuaaugaugguguuuauuuugcuuccacugagaagucuaacauaauaagaggcuggauuuuugguacuacuuuagauucgaagacccagucccuacuuauuguuaauaacgcuacuaauguuguuauuaaagucugugaauuucaauuuuguaaugauccauuuuuggguguuuauuaccacaaaaacaacaaaaguuggauggaaagugaguucagaguuuauucuagugcgaauaauugcacuuuugaauaugucucucagccuuuucuuauggaccuugaaggaaaacaggguaauuucaaaaaucuuagggaauuuguguuuaagaauauugaugguuauuuuaaaauauauucuaagcacacgccuauuaauuuagugcgugaucucccucaggguuuuucggcuuuagaaccauugguagauuugccaauagguauuaacaucacuagguuuaaaacuuuacuugcuuuacauagaaguuauuugacuccuggugauucuucuucagguuggacagcuggugcugcagcuuauuauguggguuaucuucaaccuaggacuuuucuauuaaaauauaaugaaaauggaaccauuacagaugcuguagacugugcacuugacccucucucagaaacaaaguguacguugaaauccuucacuguagaaaaaggaaucuaucaaacuucuaacuuuagaguccaaccaacagaaucuauuguuagauuuccuaauauuacaaacuugugcccuuuuggugaaguuuuuaacgccaccagauuugcaucuguuuaugcuuggaacaggaagagaaucagcaacuguguugcugauuauucuguccuauauaauuccgcaucauuuuccacuuuuaaguguuauggagugucuccuacuaaauuaaaugaucucugcuuuacuaaugucuaugcagauucauuuguaauuagaggugaugaagucagacaaaucgcuccagggcaaacuggaaagauugcugauuauaauuauaaauuaccagaugauuuuacaggcugcguuauagcuuggaauucuaacaaucuugauucuaagguuggugguaauuauaauuaccuguauagauuguuuaggaagucuaaucucaaaccuuuugagagagauauuucaacugaaaucuaucaggccgguagcacaccuuguaaugguguugaagguuuuaauuguuacuuuccuuuacaaucauaugguuuccaacccacuaaugguguugguuaccaaccauacagaguaguaguacuuucuuuugaacuucuacaugcaccagcaacuguuuguggaccuaaaaagucuacuaauuugguuaaaaacaaaugugucaauuucaacuucaaugguuuaacaggcacagguguucuuacugagucuaacaaaaaguuucugccuuuccaacaauuuggcagagacauugcugacacuacugaugcuguccgugauccacagacacuugagauucuugacauuacaccauguucuuuugguggugucaguguuauaacaccaggaacaaauacuucuaaccagguugcuguucuuuaucaggguguuaacugcacagaagucccuguugcuauucaugcagaucaacuuacuccuacuuggcguguuuauucuacagguucuaauguuuuucaaacacgugcaggcuguuuaauaggggcugaacaugucaacaacucauaugagugugacauacccauuggugcagguauaugcgcuaguuaucagacucagacuaauucuccucggcgggcacguaguguagcuagucaaucuaucauugccuacacuaugucacuuggugcagaaaauucaguugcuuacucuaauaacucuauugccauacccacaaauuuuacuauuaguguuaccacagaaauucuaccagugucuaugaccaagacaucaguagauuguacaauguacauuuguggugauucaacugaaugcagcaaucuuuuguugcaauauggcaguuuuuguacacaauuaaaccgugcuuuaacuggaauagcuguugaacaagacaaaaacacccaagaaguuuuugcacaagucaaacaaauuuacaaaacaccaccaauuaaagauuuuggugguuuuaauuuuucacaaauauuaccagauccaucaaaaccaagcaagaggucauuuauugaagaucuacuuuucaacaaagugacacuugcagaugcuggcuucaucaaacaauauggugauugccuuggugauauugcugcuagagaccucauuugugcacaaaaguuuaacggccuuacuguuuugccaccuuugcucacagaugaaaugauugcucaauacacuucugcacuguuagcggguacaaucacuucugguuggaccuuuggugcaggugcugcauuacaaauaccauuugcuaugcaaauggcuuauagguuuaaugguauuggaguuacacagaauguucucuaugagaaccaaaaauugauugccaaccaauuuaauagugcuauuggcaaaauucaagacucacuuucuuccacagcaagugcacuuggaaaacuucaagauguggucaaccaaaaugcacaagcuuuaaacacgcuuguuaaacaacuuagcuccaauuuuggugcaauuucaaguguuuuaaaugauauccuuucacgucuugacaaaguugaggcugaagugcaaauugauagguugaucacaggcagacuucaaaguuugcagacauaugugacucaacaauuaauuagagcugcagaaaucagagcuucugcuaaucuugcugcuacuaaaaugucagaguguguacuuggacaaucaaaaagaguugauuuuuguggaaagggcuaucaucuuauguccuucccucagucagcaccucaugguguagucuucuugcaugugacuuaugucccugcacaagaaaagaacuucacaacugcuccugccauuugucaugauggaaaagcacacuuuccucgugaaggugucuuuguuucaaauggcacacacugguuuguaacacaaaggaauuuuuaugaaccacaaaucauuacuacagacaacacauuugugucugguaacugugauguuguaauaggaauugucaacaacacaguuuaugauccuuugcaaccugaauuagacucauucaaggaggaguuagauaaauauuuuaagaaucauacaucaccagauguugauuuaggugacaucucuggcauuaaugcuucaguuguaaacauucaaaaagaaauugaccgccucaaugagguugccaagaauuuaaaugaaucucucaucgaucuccaagaacuuggaaaguaugagcaguauauaaaauggccaugguacauuuggcuagguuuuauagcuggcuugauugccauaguaauggugacaauuaugcuuugcuguaugaccaguugcuguaguugucucaagggcuguuguucuuguggauccugcugcaaauuugaugaagacgacucugagccagugcucaaaggagucaaauuacauuacacauaa

SEQ ID NO: 11697 - RNA, 3822 nt, Artificial Sequence
  SARS-CoV-2/Netherlands/ZuidHolland_2/2020__EPI_ISL_414556 spike protein CDS wt (1-1273)
auguuuguuuuucuuguuuuauugccacuagucucuagucaguguguuaaucuuacaaccagaacucaauuacccccugcauacacuaauucuuucacacgugguguuuauuacccugacaaaguuuucagauccucaguuuuacauucaacucaggacuuguucuuaccuuucuuuuccaauguuacuugguuccaugcuauacaugucucugggaccaaugguacuaagagguuugauaacccuguccuaccauuuaaugaugguguuuauuuugcuuccacugagaagucuaacauaauaagaggcuggauuuuugguacuacuuuagauucgaagacccagucccuacuuauuguuaauaacgcuacuaauguuguuauuaaagucugugaauuucaauuuuguaaugauccauuuuuggguguuuauuaccacaaaaacaacaaaaguuggauggaaagugaguucagaguuuauucuagugcgaauaauugcacuuuugaauaugucucucagccuuuucuuauggaccuugaaggaaaacaggguaauuucaaaaaucuuagggaauuuguguuuaagaauauugaugguuauuuuaaaauauauucuaagcacacgccuauuaauuuagugcgugaucucccucaggguuuuucggcuuuagaaccauugguagauuugccaauagguauuaacaucacuagguuucaaacuuuacuugcuuuacauagaaguuauuugacuccuggugauucuucuucagguuggacagcuggugcugcagcuuauuauguggguuaucuucaaccuaggacuuuucuauuaaaauauaaugaaaauggaaccauuacagaugcuguagacugugcacuugacccucucucagaaacaaaguguacguugaaauccuucacuguagaaaaaggaaucuaucaaacuucuaacuuuagaguccaaccaacagaaucuauuguuagauuuccuaauauuacaaacuugugcccuuuuggugaaguuuuuaacgccaccagauuugcaucuguuuaugcuuggaacaggaagagaaucagcaacuguguugcugauuauucuguccuauauaauuccgcaucauuuuccacuuuuaaguguuauggagugucuccuacuaaauuaaaugaucucugcuuuacuaaugucuaugcagauucauuuguaauuagaggugaugaagucagacaaaucgcuccagggcaaacuggaaagauugcugauuauaauuauaaauuaccagaugauuuuacaggcugcguuauagcuuggaauucuaacaaucuugauucuaagguuggugguaauuauaauuaccuguauagauuguuuaggaagucuaaucucaaaccuuuugagagagauauuucaacugaaaucuaucaggccgguagcacaccuuguaaugguguugaagguuuuaauuguuacuuuccuuuacaaucauaugguuuccaacccacuaaugguguugguuaccaaccauacagaguaguaguacuuucuuuugaacuucuacaugcaccagcaacuguuuguggaccuaaaaagucuacuaauuugguuaaaaacaaaugugucaauuucaacuucaaugguuuaacaggcacagguguucuuacugagucuaacaaaaaguuucugccuuuccaacaauuuggcagagacauugcugacacuacugaugcuguccgugauccacagacacuugagauucuugacauuacaccauguucuuuugguggugucaguguuauaacaccaggaacaaauacuucuaaccagguugcuguucuuuaucaggguguuaacugcacagaagucccuguugcuauucaugcagaucaacuuacuccuacuuggcguguuuauucuacagguucuaauguuuuucaaacacgugcaggcuguuuaauaggggcugaacaugucaacaacucauaugagugugacauacccauuggugcagguauaugcgcuaguuaucagacucagacuaauucuccucggcgggcacguaguguagcuagucaauccaucauugccuacacuaugucacuuggugcagaaaauucaguugcuuacucuaauaacucuauugccauacccacaaauuuuacuauuaguguuaccacagaaauucuaccagugucuaugaccaagacaucaguagauuguacaauguacauuuguggugauucaacugaaugcagcaaucuuuuguugcaauauggcaguuuuuguacacaauuaaaccgugcuuuaacuggaauagcucuugaacaagacaaaaacacccaagaaguuuuugcacaagucaaacaaauuuacaaaacaccaccaauuaaagauuuuggugguuuuaauuuuucacaaauauuaccagauccaucaaaaccaagcaagaggucauuuauugaagaucuacuuuucaacaaagugacacuugcagaugcuggcuucaucaaacaauauggugauugccuuggugauauugcugcuagagaccucauuugugcacaaaaguuuaacggccuuacuguuuugccaccuuugcucacagaugaaaugauugcucaauacacuucugcacuguuagcggguacaaucacuucugguuggaccuuuggugcaggugcugcauuacaaauaccauuugcuaugcaaauggcuuauagguuuaaugguauuggaguuacacagaauguucucuaugagaaccaaaaauugauugccaaccaauuuaauagugcuauuggcaaaauucaagacucacuuucuuccacagcaagugcacuuggaaaacuucaagauguggucaaccaaaaugcacaagcuuuaaacacgcuuguuaaacaacuuagcuccaauuuuggugcaauuucaaguguuuuaaaugauauccuuucacgucuugacaaaguugaggcugaagugcaaauugauagguugaucacaggcagacuucaaaguuugcagacauaugugacucaacaauuaauuagagcugcagaaaucagagcuucugcuaaucuugcugcuacuaaaaugucagaguguguacuuggacaaucaaaaagaguugauuuuuguggaaagggcuaucaucuuauguccuucccucagucagcaccucaugguguagucuucuugcaugugacuuaugucccugcacaagaaaagaacuucacaacugcuccugccauuugucaugauggaaaagcacacuuuccucgugaaggugucuuuguuucaaauggcacacacugguuuguaacacaaaggaauuuuuaugaaccacaaaucauuacuacagacaacacauuugugucugguaacugugauguuguaauaggaauugucaacaacacaguuuaugauccuuugcaaccugaauuagacucauucaaggaggaguuagauaaauauuuuaagaaucauacaucaccagauguugauuuaggugacaucucuggcauuaaugcuucaguuguaaacauucaaaaagaaauugaccgccucaaugagguugccaagaauuuaaaugaaucucucaucgaucuccaagaacuuggaaaguaugagcaguauauaaaauggccaugguacauuuggcuagguuuuauagcuggcuugauugccauaguaauggugacaauuaugcuuugcuguaugaccaguugcuguaguugucucaagggcuguuguucuuguggauccugcugcaaauuugaugaagacgacucugagccagugcucaaaggagucaaauuacauuacacauaa

SEQ ID NO: 11698 - RNA, 3822 nt, Artificial Sequence
  SARS-CoV-2/USA/WA-UW31/2020__EPI_ISL_414618 spike protein CDS wt (1-1273)
auguuuguuuuucuuguuuuauugccacuagucucuagucaguguguuaaucuuacaaccagaacucaauuacccccugcauacacuaauucuuucacacgugguguuuauuacccugacaaaguuuucagauccucaguuuuacauucaacucaggacuuguucuuaccuuucuuuuccaauguuacuugguuccaugcuauacaugucucugggaccaaugguacuaagagguuugauaacccuguccuaccauuuaaugaugguguuuauuuugcuuccacugagaagucuaacauaauaagaggcuggauuuuugguacuacuuuagauucgaagacccagucccuacuuauuguuaauaacgcuacuaauguuguuauuaaagucugugaauuucaauuuuguaaugauccauuuuuggguguuuauuaccacaaaaacaacaaaaguuggauggaaagugaguucagaguuuauucuagugcgaauaauugcacuuuugaauaugucucucagccuuuucuuauggaccuugaaggaaaacaggguaauuucaaaaaucuuagggaauuuguguuuaagaauauugaugguuauuuuaaaauauauucuaagcacacgccuauuaauuuagugcgugaucucccucaggguuuuucggcuuuagaaccauugguagauuugccaauagguauuaacaucacuagguuucaaacuuuacuugcuuuacauagaaguuauuugacuccuggugauucuucuucagguuggacagcuggugcugcagcuuauuauguggguuaucuucaaccuaggacuuuucuauuaaaauauaaugaaaauggaaccauuacagaugcuguagacugugcacuugacccucucucagaaacaaaguguacguugaaauccuucacuguagaaaaaggaaucuaucaaacuucuaacuuuagaguccaaccaacagaaucuauuguuagauuuccuaauauuacaaacuugugcccuuuuggugaaguuuuuaacgccaccagauuugcaucuguuuaugcuuggaacaggaagagaaucagcaacuguguugcugauuauucuguccuauauaauuccgcaucauuuuccacuuuuaaguguuauggagugucuccuacuaaauuaaaugaucucugcuuuacuaaugucuaugcagauucauuuguaauuagaggugaugaagucagacaaaucgcuccagggcaaacuggaaagauugcugauuauaauuauaaauuaccagaugauuuuacaggcugcguuauagcuuggaauucuaacaaucuugauucuaagguuggugguaauuauaauuaccuguauagauuguuuaggaagucuaaucucaaaccuuuugagagagauauuucaacugaaaucuaucaggccgguagcacaccuuguaauggugcugaagguuuuaauuguuacuuuccuuuacaaucauaugguuuccaacccacuaaugguguugguuaccaaccauacagaguaguaguacuuucuuuugaacuucuacaugcaccagcaacuguuuguggaccuaaaaagucuacuaauuugguuaaaaacaaaugugucaauuucaacuucaaugguuuaacaggcacagguguucuuacugagucuaacaaaaaguuucugccuuuccaacaauuuggcagagacauugcugacacuacugaugcuguccgugauccacagacacuugagauucuugacauuacaccauguucuuuugguggugucaguguuauaacaccaggaacaaauacuucuaaccagguugcuguucuuuaucaggauguuaacugcacagaagucccuguugcuauucaugcagaucaacuuacuccuacuuggcguguuuauucuacagguucuaauguuuuucaaacacgugcaggcuguuuaauaggggcugaacaugucaacaacucauaugagugugacauacccauuggugcagguauaugcgcuaguuaucagacucagacuaauucuccucggcgggcacguaguguagcuagucaauccaucauugccuacacuaugucacuuggugcagaaaauucaguugcuuacucuaauaacucuauugccauacccacaaauuuuacuauuaguguuaccacagaaauucuaccagugucuaugaccaagacaucaguagauuguacaauguacauuuguggugauucaacugaaugcagcaaucuuuuguugcaauauggcaguuuuuguacacaauuaaaccgugcuuuaacuggaauagcuguugaacaagacaaaaacacccaagaaguuuuugcacaagucaaacaaauuuacaaaacaccaccaauuaaagauuuuggugguuuuaauuuuucacaaauauuaccagauccaucaaaaccaagcaagaggucauuuauugaagaucuacuuuucaacaaagugacacuugcagaugcuggcuucaucaaacaauauggugauugccuuggugauauugcugcuagagaccucauuugugcacaaaaguuuaacggccuuacuguuuugccaccuuugcucacagaugaaaugauugcucaauacacuucugcacuguuagcggguacaaucacuucugguuggaccuuuggugcaggugcugcauuacaaauaccauuugcuaugcaaauggcuuauagguuuaaugguauuggaguuacacagaauguucucuaugagaaccaaaaauugauugccaaccaauuuaauagugcuauuggcaaaauucaagacucacuuucuuccacagcaagugcacuuggaaaacuucaagauguggucaaccaaaaugcacaagcuuuaaacacgcuuguuaaacaacuuagcuccaauuuuggugcaauuucaaguguuuuaaaugauauccuuucacgucuugacaaaguugaggcugaagugcaaauugauagguugaucacaggcagacuucaaaguuugcagacauaugugacucaacaauuaauuagagcugcagaaaucagagcuucugcuaaucuugcugcuacuaaaaugucagaguguguacuuggacaaucaaaaagaguugauuuuuguggaaagggcuaucaucuuauguccuucccucagucagcaccucaugguguagucuucuugcaugugacuuaugucccugcacaagaaaagaacuucacaacugcuccugccauuugucaugauggaaaagcacacuuuccucgugaaggugucuuuguuucaaauggcacacacugguuuguaacacaaaggaauuuuuaugaaccacaaaucauuacuacagacaacacauuugugucugguaacugugauguuguaauaggaauugucaacaacacaguuuaugauccuuugcaaccugaauuagacucauucaaggaggaguuagauaaauauuuuaagaaucauacaucaccagauguugauuuaggugacaucucuggcauuaaugcuucaguuguaaacauucaaaaagaaauugaccgccucaaugagguugccaagaauuuaaaugaaucucucaucgaucuccaagaacuuggaaaguaugagcaguauauaaaauggccaugguacauuuggcuagguuuuauagcuggcuugauugccauaguaauggugacaauuaugcuuugcuguaugaccaguugcuguaguugucucaagggcuguuguucuuguggauccugcugcaaauuugaugaagacgacucugagccagugcucaaaggagucaaauuacauuacacauaa

SEQ ID NO: 11699 - RNA, 3822 nt, Artificial Sequence
  SARS-CoV-2/South Korea/SNU01/2020__EPI_ISL_411929 spike protein CDS wt (1-1273)
auguuuguuuuucuuguuuuauugccacuagucucuagucaguguguuaaucuuacaaccagaacucaauuacccccugcauacacuaauucuuucacacgugguguuuauuacccugacaaaguuuucagauccucaguuuuacauucaacucaggacuuguucuuaccuuucuuuuccaauguuacuugguuccaugcuauacaugucucugggaccaaugguacuaagagguuugauaacccuguccuaccauuuaaugaugguguuuauuuugcuuccacugagaagucuaacauaauaagaggcuggauuuuugguacuacuuuagauucgaagacccagucccuacuuauuguuaauaacgcuacuaauguuguuauuaaagucugugaauuucaauuuuguaaugauccauuuuuggguguuuauuaccacaaaaacaacaaaaguuggauggaaagugaguucagaguuuauucuagugcgaauaauugcacuuuugaauaugucucucagccuuuucuuauggaccuugaaggaaaacaggguaauuucaaaaaucuuagggaauuuguguuuaagaauauugaugguuauuuuaaaauauauucuaagcacacgccuauuaauuuagugcgugaucucccucaggguuuuugggcuuuagaaccauugguagauuugccaauagguauuaacaucacuagguuucaaacuuuacuugcuuuacauagaaguuauuugacuccuggugauucuucuucagguuggacagcuggugcugcagcuuauuauguggguuaucuucaaccuaggacuuuucuauuaaaauauaaugaaaauggaaccauuacagaugcuguagacugugcacuugacccucucucagaaacaaaguguacguugaaauccuucacuguagaaaaaggaaucuaucaaacuucuaacuuuagaguccaaccaacagaaucuauuguuagauuuccuaauauuacaaacuugugcccuuuuggugaaguuuuuaacgccaccagauuugcaucuguuuaugcuuggaacaggaagagaaucagcaacuguguugcugauuauucuguccuauauaauuccgcaucauuuuccacuuuuaaguguuauggagugucuccuacuaaauuaaaugaucucugcuuuacuaaugucuaugcagauucauuuguaauuagaggugaugaagucagacaaaucgcuccagggcaaacuggaaagauugcugauuauaauuauaaauuaccagaugauuuuacaggcugcguuauagcuuggaauucuaacaaucuugauucuaagguuggugguaauuauaauuaccuguauagauuguuuaggaagucuaaucucaaaccuuuugagagagauauuucaacugaaaucuaucaggccgguagcacaccuuguaaugguguugaagguuuuaauuguuacuuuccuuuacaaucauaugguuuccaacccacuaaugguguugguuaccaaccauacagaguaguaguacuuucuuuugaacuucuacaugcaccagcaacuguuuguggaccuaaaaagucuacuaauuugguuaaaaacaaaugugucaauuucaacuucaaugguuuaacaggcacagguguucuuacugagucuaacaaaaaguuucugccuuuccaacaauuuggcagagacauugcugacacuacugaugcuguccgugauccacagacacuugagauucuugacauuacaccauguucuuuugguggugucaguguuauaacaccaggaacaaauacuucuaaccagguugcuguucuuuaucaggauguuaacugcacagaagucccuguugcuauucaugcagaucaacuuacuccuacuuggcguguuuauucuacagguucuaauguuuuucaaacacgugcaggcuguuuaauaggggcugaacaugucaacaacucauaugagugugacauacccauuggugcagguauaugcgcuaguuaucagacucagacuaauucuccucggcgggcacguaguguagcuagucaauccaucauugccuacacuaugucacuuggugcagaaaauucaguugcuuacucuaauaacucuauugccauacccacaaauuuuacuauuaguguuaccacagaaauucuaccagugucuaugaccaagacaucaguagauuguacaauguacauuuguggugauucaacugaaugcagcaaucuuuuguugcaauauggcaguuuuuguacacaauuaaaccgugcuuuaacuggaauagcuguugaacaagacaaaaacacccaagaaguuuuugcacaagucaaacaaauuuacaaaacaccaccaauuaaagauuuuggugguuuuaauuuuucacaaauauuaccagauccaucaaaaccaagcaagaggucauuuauugaagaucuacuuuucaacaaagugacacuugcagaugcuggcuucaucaaacaauauggugauugccuuggugauauugcugcuagagaccucauuugugcacaaaaguuuaacggccuuacuguuuugccaccuuugcucacagaugaaaugauugcucaauacacuucugcacuguuagcggguacaaucacuucugguuggaccuuuggugcaggugcugcauuacaaauaccauuugcuaugcaaauggcuuauagguuuaaugguauuggaguuacacagaauguucucuaugagaaccaaaaauugauugccaaccaauuuaauagugcuauuggcaaaauucaagacucacuuucuuccacagcaagugcacuuggaaaacuucaagauguggucaaccaaaaugcacaagcuuuaaacacgcuuguuaaacaacuuagcuccaauuuuggugcaauuucaaguguuuuaaaugauauccuuucacgucuugacaaaguugaggcugaagugcaaauugauagguugaucacaggcagacuucaaaguuugcagacauaugugacucaacaauuaauuagagcugcagaaaucagagcuucugcuaaucuugcugcuacuaaaaugucagaguguguacuuggacaaucaaaaagaguugauuuuuguggaaagggcuaucaucuuauguccuucccucagucagcaccucaugguguagucuucuugcaugugacuuaugucccugcacaagaaaagaacuucacaacugcuccugccauuugucaugauggaaaagcacacuuuccucgugaaggugucuuuguuucaaauggcacacacugguuuguaacacaaaggaauuuuuaugaaccacaaaucauuacuacagacaacacauuugugucugguaacugugauguuguaauaggaauugucaacaacacaguuuaugauccuuugcaaccugaauuagacucauucaaggaggaguuagauaaauauuuuaagaaucauacaucaccagauguugauuuaggugacaucucuggcauuaaugcuucaguuguaaacauucaaaaagaaauugaccgccucaaugagguugccaagaauuuaaaugaaucucucaucgaucuccaagaacuuggaaaguaugagcaguauauaaaauggccaugguacauuuggcuagguuuuauagcuggcuugauugccauaguaauggugacaauuaugcuuugcuguaugaccaguugcuguaguugucucaagggcuguuguucuuguggauccugcugcaaauuugaugaagacgacucugagccagugcucaaaggagucaaauuacauuacacauaa
